United States Patent Application Publication US 2018/0126003 A1 - sequence listing, part 58

SEQ ID NO: 102873 - DNA, 8379 bp, Artificial Sequence
  derived and/or modified sequence
atgaccagcatccacttcgtggtgcaccccctgcccggcaccgaggaccagctgaacgacagactgagagaggtgagcgagaagctgaacaagtacaacctgaacagccacccccccctgaacgtgctggagcaggccaccatcaagcagtgcgtggtgggccccaaccacgccgccttcctgctggaggacggcagagtgtgcagaatcggcttcagcgtgcagcccgacagactggagctgggcaagcccgacaacaacgacggcagcaagctgaacagcaacagcggcgccggcagaaccagcagacccggcagaaccagcgacagcccctggttcctgagcggcagcgagaccctgggcagactggccggcaacaccctgggcagcagatggagcagcggcgtgggcggcagcggcggcggcagcagcggcagaagcagcgccggcgccagagacagcagaagacagaccagagtgatcagaaccggcagagacagaggcagcggcctgctgggcagccagccccagcccgtgatccccgccagcgtgatccccgaggagctgatcagccaggcccaggtggtgctgcagggcaagagcagaagcgtgatcatcagagagctgcagagaaccaacctggacgtgaacctggccgtgaacaacctgctgagcagagacgacgaggacggcgacgacggcgacgacaccgccagcgagagctacctgcccggcgaggacctgatgagcctgctggacgccgacatccacagcgcccaccccagcgtgatcatcgacgccgacgccatgttcagcgaggacatcagctacttcggctaccccagcttcagaagaagcagcctgagcagactgggcagcagcagagagagagacagcgagctgctgagagagagagagagcgtgctgagactgagagagagaagatggctggacggcgccagcttcgacaacgagagaggcagcaccagcaaggagggcgagcccaacctggacaagaagaacacccccgtgcagagccccgtgagcctgggcgaggacctgcagtggtggcccgacaaggacggcaccaagttcatctgcatcggcgccctgtacagcgagctgctggccgtgagcagcaagggcgagctgtaccagtggaagtggagcgagagcgagccctacagaaacgcccagaaccccagcctgcaccaccccagagccaccttcctgggcctgaccaacgagaagatcgtgctgctgagcgccaacagcatcagagccaccgtggccaccgagaacaacaaggtggccacctgggtggacgagaccctgagcagcgtggccagcaagctggagcacaccgcccagacctacagcgagctgcagggcgagagaatcgtgagcctgcactgctgcgccctgtacacctgcgcccagctggagaacagcctgtactggtggggcgtggtgcccttcagccagagaaagaagatgctggagaaggccagagccaagaacaagaagcccaagagcagcgccggcatcagcagcatgcccaacatcaccgtgggcacccaggtgtgcctgagaaacaaccccctgtaccacgccggcgccgtggccttcagcatcagcgccggcatccccaaggtgggcgtgctgatggagagcgtgtggaacatgaacgacagctgcagattccagctgagaagccccgagagcctgaagaacatggagaaggccagcaagaccaccgaggccaagcccgagagcaagcaggagcccgtgaagaccgagatgggccccccccccagccccgccagcacctgcagcgacgccagcagcatcgccagcagcgccagcatgccctacaagagaagaagaagcacccccgcccccaaggaggaggagaaggtgaacgaggagcagtggagcctgagagaggtggtgttcgtggaggacgtgaagaacgtgcccgtgggcaaggtgctgaaggtggacggcgcctacgtggccgtgaagttccccggcaccagcagcaacaccaactgccagaacagcagcggccccgacgccgaccccagcagcctgctgcaggactgcagactgctgagaatcgacgagctgcaggtggtgaagaccggcggcacccccaaggtgcccgactgcttccagagaacccccaagaagctgtgcatccccgagaagaccgagatcctggccgtgaacgtggacagcaagggcgtgcacgccgtgctgaagaccggcaactgggtgagatactgcatcttcgacctggccaccggcaaggccgagcaggagaacaacttccccaccagcagcatcgccttcctgggccagaacgagagaaacgtggccatcttcaccgccggccaggagagccccatcatcctgagagacggcaacggcaccatctaccccatggccaaggactgcatgggcggcatcagagaccccgactggctggacctgccccccatcagcagcctgggcatgggcgtgcacagcctgatcaacctgcccgccaacagcaccatcaagaagaaggccgccgtgatcatcatggccgtggagaagcagaccctgatgcagcacatcctgagatgcgactacgaggcctgcagacagtacctgatgaacctggagcaggccgtggtgctggagcagaacctgcagatgctgcagaccttcatcagccacagatgcgacggcaacagaaacatcctgcacgcctgcgtgagcgtgtgcttccccaccagcaacaaggagaccaaggaggaggaggaggccgagagaagcgagagaaacaccttcgccgagagactgagcgccgtggaggccatcgccaacgccatcagcgtggtgagcagcaacggccccggcaacagagccggcagcagcagcagcagaagcctgagactgagagagatgatgagaagaagcctgagagccgccggcctgggcagacacgaggccggcgccagcagcagcgaccaccaggaccccgtgagcccccccatcgccccccccagctgggtgcccgacccccccgccatggaccccgacggcgacatcgacttcatcctggcccccgccgtgggcagcctgaccaccgccgccaccggcaccggccagggccccagcaccagcaccatccccggccccagcaccgagcccagcgtggtggagagcaaggacagaaaggccaacgcccacttcatcctgaagctgctgtgcgacagcgtggtgctgcagccctacctgagagagctgctgagcgccaaggacgccagaggcatgacccccttcatgagcgccgtgagcggcagagcctaccccgccgccatcaccatcctggagaccgcccagaagatcgccaaggccgagatcagcagcagcgagaaggaggaggacgtgttcatgggcatggtgtgccccagcggcaccaaccccgacgacagccccctgtacgtgctgtgctgcaacgacacctgcagcttcacctggaccggcgccgagcacatcaaccaggacatcttcgagtgcagaacctgcggcctgctggagagcctgtgctgctgcaccgagtgcgccagagtgtgccacaagggccacgactgcaagctgaagagaaccagccccaccgcctactgcgactgctgggagaagtgcaagtgcaagaccctgatcgccggccagaagagcgccagactggacctgctgtacagactgctgaccgccaccaacctggtgaccctgcccaacagcagaggcgagcacctgctgctgttcctggtgcagaccgtggccagacagaccgtggagcactgccagtacagaccccccagaatcagagaggacagaaacagaaagaccgccagccccgaggacagcgacatgcccgaccacgacctggagccccccagattcgcccagctggccctggagagagtgctgcaggactggaacgccctgaagagcatgatcatgttcggcagccaggagaacaaggaccccctgagcgccagcagcagaatcggccacctgctgcccgaggagcaggtgtacctgaaccagcagagcggcaccatcagactggactgcttcacccactgcctgatcgtgaagtgcaccgccgacatcctgctgctggacaccctgctgggcaccctggtgaaggagctgcagaacaagtacacccccggcagaagagaggaggccatcgccgtgaccatgagattcctgagaagcgtggccagagtgttcgtgatcctgagcgtggagatggccagcagcaagaagaagaacaacttcatcccccagcccatcggcaagtgcaagagagtgttccaggccctgctgccctacgccgtggaggagctgtgcaacgtggccgagagcctgatcgtgcccgtgagaatgggcatcgccagacccaccgcccccttcaccctggccagcaccagcatcgacgccatgcagggcagcgaggagctgttcagcgtggagcccctgccccccagacccagcagcgaccagagcagcagcagcagccagagccagagcagctacatcatcagaaacccccagcagagaagaatcagccagagccagcccgtgagaggcagagacgaggagcaggacgacatcgtgagcgccgacgtggaggaggtggaggtggtggagggcgtggccggcgaggaggaccaccacgacgagcaggaggagcacggcgaggagaacgccgaggccgagggccagcacgacgagcacgacgaggacggcagcgacatggagctggacctgctggccgccgccgagaccgagagcgacagcgagagcaaccacagcaaccaggacaacgccagcggcagaagaagcgtggtgaccgccgccaccgccggcagcgaggccggcgccagcagcgtgcccgccttcttcagcgaggacgacagccagagcaacgacagcagcgacagcgacagcagcagcagccagagcgacgacatcgagcaggagaccttcatgctggacgagcccctggagagaaccaccaacagcagccacgccaacggcgccgcccaggcccccagaagcatgcagtgggccgtgagaaacacccagcaccagagagccgccagcaccgcccccagcagcaccagcacccccgccgccagcagcgccggcctgatctacatcgaccccagcaacctgagaagaagcggcaccatcagcaccagcgccgccgccgccgccgccgccctggaggccagcaacgccagcagctacctgaccagcgccagcagcctggccagagcctacagcatcgtgatcagacagatcagcgacctgatgggcctgatccccaagtacaaccacctggtgtacagccagatccccgccgccgtgaagctgacctaccaggacgccgtgaacctgcagaactacgtggaggagaagctgatccccacctggaactggatggtgagcatcatggacagcaccgaggcccagctgagatacggcagcgccctggccagcgccggcgaccccggccaccccaaccaccccctgcacgccagccagaacagcgccagaagagagagaatgaccgccagagaggaggccagcctgagaaccctggagggcagaagaagagccaccctgctgagcgccagacagggcatgatgagcgccagaggcgacttcctgaactacgccctgagcctgatgagaagccacaacgacgagcacagcgacgtgctgcccgtgctggacgtgtgcagcctgaagcacgtggcctacgtgttccaggccctgatctactggatcaaggccatgaaccagcagaccaccctggacaccccccagctggagagaaagagaaccagagagctgctggagctgggcatcgacaacgaggacagcgagcacgagaacgacgacgacaccaaccagagcgccaccctgaacgacaaggacgacgacagcctgcccgccgagaccggccagaaccaccccttcttcagaagaagcgacagcatgaccttcctgggctgcatcccccccaaccccttcgaggtgcccctggccgaggccatccccctggccgaccagccccacctgctgcagcccaacgccagaaaggaggacctgttcggcagacccagccagggcctgtacagcagcagcgccagcagcggcaagtgcctgatggaggtgaccgtggacagaaactgcctggaggtgctgcccaccaagatgagctacgccgccaacctgaagaacgtgatgaacatgcagaacagacagaagaaggagggcgaggagcagcccgtgctgcccgaggagaccgagagcagcaagcccggccccagcgcccacgacctggccgcccagctgaagagcagcctgctggccgagatcggcctgaccgagagcgagggcccccccctgaccagcttcagaccccagtgcagcttcatgggcatggtgatcagccacgacatgctgctgggcagatggagactgagcctggagctgttcggcagagtgttcatggaggacgtgggcgccgagcccggcagcatcctgaccgagctgggcggcttcgaggtgaaggagagcaagttcagaagagagatggagaagctgagaaaccagcagagcagagacctgagcctggaggtggacagagacagagacctgctgatccagcagaccatgagacagctgaacaaccacttcggcagaagatgcgccaccacccccatggccgtgcacagagtgaaggtgaccttcaaggacgagcccggcgagggcagcggcgtggccagaagcttctacaccgccatcgcccaggccttcctgagcaacgagaagctgcccaacctggagtgcatccagaacgccaacaagggcacccacaccagcctgatgcagagactgagaaacagaggcgagagagacagagagagagagagagagagagagatgagaagaagcagcggcctgagagccggcagcagaagagacagagacagagacttcagaagacagctgagcatcgacaccagacccttcagacccgccagcgagggcaaccccagcgacgaccccgagcccctgcccgcccacagacaggccctgggcgagagactgtaccccagagtgcaggccatgcagcccgccttcgccagcaagatcaccggcatgctgctggagctgagccccgcccagctgctgctgctgctggccagcgaggacagcctgagagccagagtggacgaggccatggagctgatcatcgcccacggcagagagaacggcgccgacagcatcctggacctgggcctggtggacagcagcgagaaggtgcaggagaacagaaagagacacggcagcagcagaagcgtggtggacatggacctggacgacaccgacgacggcgacgacaacgcccccctgttctaccagcccggcaagagaggcttctacacccccagacccggcaagaacaccgaggccagactgaactgcttcagaaacatcggcagaatcctgggcctgtgcctgctgcagaacgagctgtgccccatcaccctgaacagacacgtgatcaaggtgctgctgggcagaaaggtgaactggcacgacttcgccttcttcgaccccgtgatgtacgagagcctgagacagctgatcctggccagccagagcagcgacgccgacgccgtgttcagcgccatggacctggccttcgccatcgacctgtgcaaggaggagggcggcggccaggtggagctgatccccaacggcgtgaacatccccgtgaccccccagaacgtgtacgagtacgtgagaaagtacgccgagcacagaatgctggtggtggccgagcagcccctgcacgccatgagaaagggcctgctggacgtgctgcccaagaacagcctggaggacctgaccgccgaggacttcagactgctggtgaacggctgcggcgaggtgaacgtgcagatgctgatcagcttcaccagcttcaacgacgagagcggcgagaacgccgagaagctgctgcagttcaagagatggttctggagcatcgtggagaagatgagcatgaccgagagacaggacctggtgtacttctggaccagcagccccagcctgcccgccagcgaggagggcttccagcccatgcccagcatcaccatcagaccccccgacgaccagcacctgcccaccgccaacacctgcatcagcagactgtacgtgcccctgtacagcagcaagcagatcctgaagcagaagctgctgctggccatcaagaccaagaacttcggcttcgtgtag

SEQ ID NO: 102874 - DNA, 8397 bp, Artificial Sequence
  derived and/or modified sequence
atgaccagcatccacttcgtggtgcaccccctgcccggcaccgaggaccagctgaacgacagactgagagaggtgagcgagaagctgaacaagtacaacctgaacagccacccccccctgaacgtgctggagcaggccaccatcaagcagtgcgtggtgggccccaaccacgccgccttcctgctggaggacggcagagtgtgcagaatcggcttcagcgtgcagcccgacagactggagctgggcaagcccgacaacaacgacggcagcaagctgaacagcaacagcggcgccggcagaaccagcagacccggcagaaccagcgacagcccctggttcctgagcggcagcgagaccctgggcagactggccggcaacaccctgggcagcagatggagcagcggcgtgggcggcagcggcggcggcagcagcggcagaagcagcgccggcgccagagacagcagaagacagaccagagtgatcagaaccggcagagacagaggcagcggcctgctgggcagccagccccagcccgtgatccccgccagcgtgatccccgaggagctgatcagccaggcccaggtggtgctgcagggcaagagcagaagcgtgatcatcagagagctgcagagaaccaacctggacgtgaacctggccgtgaacaacctgctgagcagagacgacgaggacggcgacgacggcgacgacaccgccagcgagagctacctgcccggcgaggacctgatgagcctgctggacgccgacatccacagcgcccaccccagcgtgatcatcgacgccgacgccatgttcagcgaggacatcagctacttcggctaccccagcttcagaagaagcagcctgagcagactgggcagcagcagagtgctgctgctgcccctggagagagacagcgagctgctgagagagagagagagcgtgctgagactgagagagagaagatggctggacggcgccagcttcgacaacgagagaggcagcaccagcaaggagggcgagcccaacctggacaagaagaacacccccgtgcagagccccgtgagcctgggcgaggacctgcagtggtggcccgacaaggacggcaccaagttcatctgcatcggcgccctgtacagcgagctgctggccgtgagcagcaagggcgagctgtaccagtggaagtggagcgagagcgagccctacagaaacgcccagaaccccagcctgcaccaccccagagccaccttcctgggcctgaccaacgagaagatcgtgctgctgagcgccaacagcatcagagccaccgtggccaccgagaacaacaaggtggccacctgggtggacgagaccctgagcagcgtggccagcaagctggagcacaccgcccagacctacagcgagctgcagggcgagagaatcgtgagcctgcactgctgcgccctgtacacctgcgcccagctggagaacagcctgtactggtggggcgtggtgcccttcagccagagaaagaagatgctggagaaggccagagccaagaacaagaagcccaagagcagcgccggcatcagcagcatgcccaacatcaccgtgggcacccaggtgtgcctgagaaacaaccccctgtaccacgccggcgccgtggccttcagcatcagcgccggcatccccaaggtgggcgtgctgatggagagcgtgtggaacatgaacgacagctgcagattccagctgagaagccccgagagcctgaagaacatggagaaggccagcaagaccaccgaggccaagcccgagagcaagcaggagcccgtgaagaccgagatgggccccccccccagccccgccagcacctgcagcgacgccagcagcatcgccagcagcgccagcatgccctacaagagaagaagaagcacccccgcccccaaggaggaggagaaggtgaacgaggagcagtggagcctgagagaggtggtgttcgtggaggacgtgaagaacgtgcccgtgggcaaggtgctgaaggtggacggcgcctacgtggccgtgaagttccccggcaccagcagcaacaccaactgccagaacagcagcggccccgacgccgaccccagcagcctgctgcaggactgcagactgctgagaatcgacgagctgcaggtggtgaagaccggcggcacccccaaggtgcccgactgcttccagagaacccccaagaagctgtgcatccccgagaagaccgagatcctggccgtgaacgtggacagcaagggcgtgcacgccgtgctgaagaccggcaactgggtgagatactgcatcttcgacctggccaccggcaaggccgagcaggagaacaacttccccaccagcagcatcgccttcctgggccagaacgagagaaacgtggccatcttcaccgccggccaggagagccccatcatcctgagagacggcaacggcaccatctaccccatggccaaggactgcatgggcggcatcagagaccccgactggctggacctgccccccatcagcagcctgggcatgggcgtgcacagcctgatcaacctgcccgccaacagcaccatcaagaagaaggccgccgtgatcatcatggccgtggagaagcagaccctgatgcagcacatcctgagatgcgactacgaggcctgcagacagtacctgatgaacctggagcaggccgtggtgctggagcagaacctgcagatgctgcagaccttcatcagccacagatgcgacggcaacagaaacatcctgcacgcctgcgtgagcgtgtgcttccccaccagcaacaaggagaccaaggaggaggaggaggccgagagaagcgagagaaacaccttcgccgagagactgagcgccgtggaggccatcgccaacgccatcagcgtggtgagcagcaacggccccggcaacagagccggcagcagcagcagcagaagcctgagactgagagagatgatgagaagaagcctgagagccgccggcctgggcagacacgaggccggcgccagcagcagcgaccaccaggaccccgtgagcccccccatcgccccccccagctgggtgcccgacccccccgccatggaccccgacggcgacatcgacttcatcctggcccccgccgtgggcagcctgaccaccgccgccaccggcaccggccagggccccagcaccagcaccatccccggccccagcaccgagcccagcgtggtggagagcaaggacagaaaggccaacgcccacttcatcctgaagctgctgtgcgacagcgtggtgctgcagccctacctgagagagctgctgagcgccaaggacgccagaggcatgacccccttcatgagcgccgtgagcggcagagcctaccccgccgccatcaccatcctggagaccgcccagaagatcgccaaggccgagatcagcagcagcgagaaggaggaggacgtgttcatgggcatggtgtgccccagcggcaccaaccccgacgacagccccctgtacgtgctgtgctgcaacgacacctgcagcttcacctggaccggcgccgagcacatcaaccaggacatcttcgagtgcagaacctgcggcctgctggagagcctgtgctgctgcaccgagtgcgccagagtgtgccacaagggccacgactgcaagctgaagagaaccagccccaccgcctactgcgactgctgggagaagtgcaagtgcaagaccctgatcgccggccagaagagcgccagactggacctgctgtacagactgctgaccgccaccaacctggtgaccctgcccaacagcagaggcgagcacctgctgctgttcctggtgcagaccgtggccagacagaccgtggagcactgccagtacagaccccccagaatcagagaggacagaaacagaaagaccgccagccccgaggacagcgacatgcccgaccacgacctggagccccccagattcgcccagctggccctggagagagtgctgcaggactggaacgccctgaagagcatgatcatgttcggcagccaggagaacaaggaccccctgagcgccagcagcagaatcggccacctgctgcccgaggagcaggtgtacctgaaccagcagagcggcaccatcagactggactgcttcacccactgcctgatcgtgaagtgcaccgccgacatcctgctgctggacaccctgctgggcaccctggtgaaggagctgcagaacaagtacacccccggcagaagagaggaggccatcgccgtgaccatgagattcctgagaagcgtggccagagtgttcgtgatcctgagcgtggagatggccagcagcaagaagaagaacaacttcatcccccagcccatcggcaagtgcaagagagtgttccaggccctgctgccctacgccgtggaggagctgtgcaacgtggccgagagcctgatcgtgcccgtgagaatgggcatcgccagacccaccgcccccttcaccctggccagcaccagcatcgacgccatgcagggcagcgaggagctgttcagcgtggagcccctgccccccagacccagcagcgaccagagcagcagcagcagccagagccagagcagctacatcatcagaaacccccagcagagaagaatcagccagagccagcccgtgagaggcagagacgaggagcaggacgacatcgtgagcgccgacgtggaggaggtggaggtggtggagggcgtggccggcgaggaggaccaccacgacgagcaggaggagcacggcgaggagaacgccgaggccgagggccagcacgacgagcacgacgaggacggcagcgacatggagctggacctgctggccgccgccgagaccgagagcgacagcgagagcaaccacagcaaccaggacaacgccagcggcagaagaagcgtggtgaccgccgccaccgccggcagcgaggccggcgccagcagcgtgcccgccttcttcagcgaggacgacagccagagcaacgacagcagcgacagcgacagcagcagcagccagagcgacgacatcgagcaggagaccttcatgctggacgagcccctggagagaaccaccaacagcagccacgccaacggcgccgcccaggcccccagaagcatgcagtgggccgtgagaaacacccagcaccagagagccgccagcaccgcccccagcagcaccagcacccccgccgccagcagcgccggcctgatctacatcgaccccagcaacctgagaagaagcggcaccatcagcaccagcgccgccgccgccgccgccgccctggaggccagcaacgccagcagctacctgaccagcgccagcagcctggccagagcctacagcatcgtgatcagacagatcagcgacctgatgggcctgatccccaagtacaaccacctggtgtacagccagatccccgccgccgtgaagctgacctaccaggacgccgtgaacctgcagaactacgtggaggagaagctgatccccacctggaactggatggtgagcatcatggacagcaccgaggcccagctgagatacggcagcgccctggccagcgccggcgaccccggccaccccaaccaccccctgcacgccagccagaacagcgccagaagagagagaatgaccgccagagaggaggccagcctgagaaccctggagggcagaagaagagccaccctgctgagcgccagacagggcatgatgagcgccagaggcgacttcctgaactacgccctgagcctgatgagaagccacaacgacgagcacagcgacgtgctgcccgtgctggacgtgtgcagcctgaagcacgtggcctacgtgttccaggccctgatctactggatcaaggccatgaaccagcagaccaccctggacaccccccagctggagagaaagagaaccagagagctgctggagctgggcatcgacaacgaggacagcgagcacgagaacgacgacgacaccaaccagagcgccaccctgaacgacaaggacgacgacagcctgcccgccgagaccggccagaaccaccccttcttcagaagaagcgacagcatgaccttcctgggctgcatcccccccaaccccttcgaggtgcccctggccgaggccatccccctggccgaccagccccacctgctgcagcccaacgccagaaaggaggacctgttcggcagacccagccagggcctgtacagcagcagcgccagcagcggcaagtgcctgatggaggtgaccgtggacagaaactgcctggaggtgctgcccaccaagatgagctacgccgccaacctgaagaacgtgatgaacatgcagaacagacagaagaaggagggcgaggagcagcccgtgctgcccgaggagaccgagagcagcaagcccggccccagcgcccacgacctggccgcccagctgaagagcagcctgctggccgagatcggcctgaccgagagcgagggcccccccctgaccagcttcagaccccagtgcagcttcatgggcatggtgatcagccacgacatgctgctgggcagatggagactgagcctggagctgttcggcagagtgttcatggaggacgtgggcgccgagcccggcagcatcctgaccgagctgggcggcttcgaggtgaaggagagcaagttcagaagagagatggagaagctgagaaaccagcagagcagagacctgagcctggaggtggacagagacagagacctgctgatccagcagaccatgagacagctgaacaaccacttcggcagaagatgcgccaccacccccatggccgtgcacagagtgaaggtgaccttcaaggacgagcccggcgagggcagcggcgtggccagaagcttctacaccgccatcgcccaggccttcctgagcaacgagaagctgcccaacctggagtgcatccagaacgccaacaagggcacccacaccagcctgatgcagagactgagaaacagaggcgagagagacagagagagagagagagagagagagatgagaagaagcagcggcctgagagccggcagcagaagagacagagacagagacttcagaagacagctgagcatcgacaccagacccttcagacccgccagcgagggcaaccccagcgacgaccccgagcccctgcccgcccacagacaggccctgggcgagagactgtaccccagagtgcaggccatgcagcccgccttcgccagcaagatcaccggcatgctgctggagctgagccccgcccagctgctgctgctgctggccagcgaggacagcctgagagccagagtggacgaggccatggagctgatcatcgcccacggcagagagaacggcgccgacagcatcctggacctgggcctggtggacagcagcgagaaggtgcaggagaacagaaagagacacggcagcagcagaagcgtggtggacatggacctggacgacaccgacgacggcgacgacaacgcccccctgttctaccagcccggcaagagaggcttctacacccccagacccggcaagaacaccgaggccagactgaactgcttcagaaacatcggcagaatcctgggcctgtgcctgctgcagaacgagctgtgccccatcaccctgaacagacacgtgatcaaggtgctgctgggcagaaaggtgaactggcacgacttcgccttcttcgaccccgtgatgtacgagagcctgagacagctgatcctggccagccagagcagcgacgccgacgccgtgttcagcgccatggacctggccttcgccatcgacctgtgcaaggaggagggcggcggccaggtggagctgatccccaacggcgtgaacatccccgtgaccccccagaacgtgtacgagtacgtgagaaagtacgccgagcacagaatgctggtggtggccgagcagcccctgcacgccatgagaaagggcctgctggacgtgctgcccaagaacagcctggaggacctgaccgccgaggacttcagactgctggtgaacggctgcggcgaggtgaacgtgcagatgctgatcagcttcaccagcttcaacgacgagagcggcgagaacgccgagaagctgctgcagttcaagagatggttctggagcatcgtggagaagatgagcatgaccgagagacaggacctggtgtacttctggaccagcagccccagcctgcccgccagcgaggagggcttccagcccatgcccagcatcaccatcagaccccccgacgaccagcacctgcccaccgccaacacctgcatcagcagactgtacgtgcccctgtacagcagcaagcagatcctgaagcagaagctgctgctggccatcaagaccaagaacttcggcttcgtgtag

SEQ ID NO: 102875 - DNA, 8397 bp, Artificial Sequence
  derived and/or modified sequence
atgacctctattcacttcgtggtccacccactgcccggaacagaggaccaactgaatgaccgccttcgcgaagtctcagagaaactcaacaaatacaacctcaacagccatccccccctgaacgtgctcgagcaggctacgataaaacagtgcgttgtagggcctaaccatgctgccttcctgctcgaagacggccgtgtgtgcaggataggtttcagtgtccagccagaccggctagaacttggaaagcctgacaacaacgatgggtccaaacttaatagcaattcaggggcagggcgaacaagccgcccaggcaggacctccgactccccttggttcctaagcggctccgagaccttgggtaggctggccggcaacaccctcggatctaggtggtcgtccggggttggaggcagcggtggcgggtccagcgggagaagctcagccggggcccgggactcacgacggcagacacgcgtgattcggaccggcagagacagggggtctgggctgttggggtcccaaccccagcccgtgatcccagcctcagtcatccccgaagagttgattagccaggcccaggtggtgttacaaggtaagagtcgctcggtcatcatccgggaactccagaggacaaacctggatgtgaatctcgccgtcaacaatctgttgtcaagggacgacgaggatggtgacgacggggatgacactgccagtgagtcctaccttccaggagaagatcttatgtcgctgctagacgccgacatccatagtgcccacccctcagtcattatagatgccgatgcaatgttctcagaggatataagttactttggatatccgtcgttccgccggagtagcctttcgaggctaggaagttctcgggttctgcttttacccctagaaagagatagcgagttactgagagagcgggaaagcgtcttgagactgcgggagcgaagatggctcgacggcgctagttttgacaacgaaagaggttctacaagtaaagaaggggagcccaaccttgataagaagaacacacctgtgcagtccccggtatctctcggcgaggacttgcagtggtggccagataaggatgggactaaatttatctgcataggggcattgtactccgaattgttggccgtgtcctctaaaggtgagttataccaatggaaatggagtgagtccgagccatacagaaacgcccaaaatccttccttgcaccacccacgcgcaaccttccttggattgaccaatgaaaagatcgtcttgctctcagccaattctatccgcgctaccgtcgcaacagagaataacaaggtggccacctgggtggacgagaccctcagcagcgtggcgtccaagctggagcataccgcgcagacatacagcgagcttcaaggtgaacgcattgttagcctacattgttgcgctttatacacgtgcgctcagctggaaaactcgctgtattggtggggcgtcgtacctttctcgcaaaggaagaagatgctcgaaaaggcacgcgctaaaaacaagaaacccaagtccagtgctgggatctctagtatgcccaacatcacagtggggacacaagtatgcctgcggaataatcctctgtaccacgccggcgcagtggcattcagcatttcagctggcataccaaaggttggagtgctgatggagagtgtatggaatatgaatgattcttgcaggtttcagctgagatccccagagtctctgaagaatatggaaaaggcgagcaagacaacagaggcaaaacctgaatctaagcaggagcctgtgaagaccgagatgggacctcccccatcaccagcatcaacttgttctgacgcatcctccatcgccagctcggccagtatgccatataagaggagaagatccacgccagcccccaaggaagaggagaaggttaatgaggagcagtggtctctccgcgaagtggtgttcgtcgaggatgtgaagaacgtgccggtgggtaaagtactgaaggtcgacggtgcctatgttgccgttaagtttcctgggacatctagtaataccaattgtcagaatagctcaggacctgatgcagatccatctagcctgctgcaggactgtcgtctcttacgaatcgatgagctgcaggtggttaaaacaggcggcaccccaaaggtccctgactgtttccagcgaacccccaagaagttgtgtatccctgagaagaccgaaattttggcggtgaatgttgattccaagggcgtgcacgccgttctgaaaaccgggaactgggtgcggtattgtatttttgacctagccacaggaaaggccgaacaggaaaacaatttccccacatcttctattgccttcttaggccaaaacgagcggaacgttgccattttcacagcaggccaggaatcacccatcatattgcgcgatggcaatggcacaatctatcccatggccaaggattgtatgggcgggatccgtgatccagattggctcgatctgccacctatcagtagcctgggcatgggggtccattcccttattaatctgcccgcgaactctaccatcaagaagaaggctgccgttataattatggctgttgaaaagcagaccctgatgcagcatattctgaggtgtgactatgaggcctgtcggcagtatttgatgaacttagagcaagcagtagttctcgaacagaacctccagatgctgcagaccttcatatcccaccgttgcgatggcaatcgaaatattctgcatgcctgcgtgagcgtgtgttttccaacctcaaacaaggaaaccaaagaagaggaggaggccgagaggtccgagcgaaacacgttcgcagagagattgtcggccgtcgaagccatagctaatgcaatcagcgttgtctccagtaatggccctgggaatcgcgccgggtccagcagcagcagaagtttgcgacttagagaaatgatgaggcgttcattacgggctgccggtcttggacgccacgaggcgggcgcatcgagcagtgaccaccaggaccctgtttcgcctccgatagcgccaccatcgtgggtacctgaccctcccgccatggaccccgacggtgatatcgacttcatacttgctcctgctgtcggctccctgaccaccgccgcgacaggtactggccagggccctagcactagcaccattcctgggccttctactgaacctagcgtcgttgagtctaaagatcgcaaggccaacgctcatttcatattgaagcttctttgcgacagcgtcgtgttgcagccatatctaagagaacttctctcagccaaagatgctaggggtatgaccccatttatgagcgccgtttccggacgggcttatcctgctgcgattaccatactagaaactgcgcagaaaatcgcaaaggcagaaatctcttcctcagaaaaggaagaggacgtgttcatgggaatggtttgtcccagtggcaccaacccagatgactcccctctttacgtcctttgctgcaatgatacctgttcattcacctggacaggcgccgagcacattaatcaggacatcttcgaatgccggacctgcggcttgctggagtcactttgttgttgcactgagtgtgcccgcgtgtgccacaagggtcacgactgtaaactcaaacggacatcccccacagcctactgcgattgctgggaaaagtgtaaatgtaagactctgatagccggacagaagtcggcccgcctcgacctgctttatcgacttctcaccgctaccaacctggtgactctccccaactctagaggtgaacacctgctgctgttcctggttcaaaccgtggctcgtcaaaccgtcgaacactgccagtacaggccacctaggatcagagaagaccgtaataggaaaacggcctccccggaagactctgatatgcctgaccacgatttagagccgccaaggttcgctcagctcgcattagagcgggtcctacaggattggaacgccctgaaaagcatgatcatgtttggcagccaggagaacaaggatcccctttccgcatccagtcgtatcggccacctgctgcccgaggagcaggtgtatctaaatcaacagtccggaactatcagactggactgcttcactcactgcttaattgtcaagtgtaccgctgatattttgttactggatactctcctaggcaccctcgtcaaagaattgcagaataagtacacacctggcagacgggaggaggcgattgctgtcacaatgagattcttacgctccgtcgcccgggtcttcgtcatactgagtgtggagatggcctcctccaaaaaaaaaaataactttatccctcaacccattggtaagtgcaaacgagtgtttcaagccttgttgccctatgccgtggaggagctttgtaatgtcgcagagagtttgattgtgcccgtccgcatgggtatcgccagacctaccgccccctttacccttgcctctacaagcattgatgcaatgcaggggagtgaggaactattcagcgtggagcccctccccccccgcccatcatcagatcagtcttcctcttcctcccaatcccagtcttcttatatcatccgtaacccgcagcagcgacggatctcccaaagccagcccgtacgcggcagggacgaggagcaagatgacattgtctcggccgacgtggaagaagtcgaagttgtcgagggagttgctggggaagaggatcaccacgacgagcaagaagaacacggcgaggagaacgccgaggcagaaggacagcacgatgagcacgacgaggacggctcggacatggaactcgacttgctggctgctgccgagacagagtctgatagcgagagcaaccactccaaccaggacaatgcctctgggagacggtccgtagtgactgccgcaaccgctggaagcgaggccggcgcatcgtctgtccccgctttcttctcagaggacgactcacagtccaatgatagtagcgactcagattccagctccagccagtctgacgacattgagcaggagaccttcatgttagatgagcccttggaacgaaccactaacagttctcacgccaacggcgccgcacaggcccccagatctatgcagtgggccgtgcggaacacacagcatcaaagggcagcttcgaccgcgccttcgtctactagtaccccagcggctagtagcgccggcctgatttatatcgatcccagcaatctgaggagatccggcaccattagcacaagcgccgccgccgcggctgccgctctggaggccagcaatgcgtcctcttatttaacgtctgcatctagcctcgccagagcatacagtatcgtcattcgacaaattagtgatttgatgggactgattcccaaatataaccatcttgtctacagtcagattccagctgctgtgaagcttacttaccaggacgccgtgaatctgcaaaactatgtggaagagaaattaatccccacttggaactggatggtctcaataatggacagcaccgaagcgcaactgcggtatggcagtgccctggcctccgctggggatcccggccacccaaaccacccactccatgcaagtcaaaatagtgcccgaagggaacgaatgactgcaagagaagaggcttctctgaggactctggaaggacgcaggagagccacccttcttagtgccaggcaagggatgatgagcgcacggggtgatttcttaaattacgcactttcgctgatgcgaagccacaatgacgaacactctgatgtattgcctgtcctggacgtctgcagtcttaagcatgtggcttatgtgttccaggccctaatatactggataaaggccatgaatcagcaaactacgctggacacaccacagcttgaaagaaagagaactcgcgaactcctcgaactgggaattgacaacgaggatagtgaacatgagaatgatgacgacacaaatcaatctgccactctgaatgataaggacgacgactccctccctgctgaaaccggccaaaaccatccgttctttcgacggtccgattccatgaccttcctcggctgcatcccccctaacccattcgaggtgcctctcgctgaggctattccactggcggaccagccacacctgctacagcccaatgcacgtaaggaagatctctttgggaggccaagccagggtttatactctagcagtgcatcatccggcaagtgcttgatggaggtcaccgtggatcgcaattgcctggaggtactgccaacaaaaatgtcttatgctgctaacctgaagaatgtaatgaacatgcagaacaggcagaaaaaagagggcgaggaacagcctgtgctccccgaagaaacagaatcctcaaagcctggtcccagcgcacacgacctggcagctcagctcaagtcttctcttcttgcagagattgggctgaccgaatccgaaggaccacccctgaccagcttccggcctcagtgtagctttatgggcatggtcattagtcatgatatgctcctggggaggtggagactgagtctggagctgtttgggcgtgtgtttatggaggatgtaggagctgagcctggctcaatcctgacggagctgggtgggttcgaggtgaaggagtcaaagtttcggagggagatggagaagctaagaaaccagcaaagtcgggatctttcccttgaggtagacagagatagagatctcctgattcagcaaactatgaggcagttgaacaaccattttggccgcagatgtgccacaaccccaatggctgtgcatagagtaaaggtcacgtttaaggacgaacctggtgagggttctggcgtggcaaggagtttctacaccgccatcgctcaggccttccttagcaatgagaagctgccaaatctagagtgtattcagaacgctaataagggtacacacaccagtttgatgcagagactgcggaatcgcggcgagcgagaccgggagcgcgagcgggagagagagatgcgcagatccagcggcctgcgggctggctcccgccgcgatcgggacagggactttcggaggcagctctcaatcgacacacggccattcagacccgctagtgaaggcaacccctccgacgatccagagcccctcccagcacaccggcaggccttgggggagcgcctttatcccagagtgcaggctatgcagcccgcttttgcatccaagatcaccggtatgctgctggaactgagtcccgcacagctgctgctcctgctcgcttctgaggactccctgcgcgcccgggtggacgaggccatggaattaatcatcgcccatggcagggagaatggggctgactctatcctggatttgggcctggtcgactcctccgagaaagtgcaggagaaccgaaaacggcacggctcatcgcgcagcgtggtcgacatggacctggacgacacagatgatggggacgacaatgcaccattgttttaccaacccggtaagcgtggcttctacacgccaaggccggggaaaaacactgaggcaaggttgaattgttttaggaacatcggcagaatcctggggctgtgtctcctgcaaaatgagttgtgtccgatcaccctcaacagacatgttattaaggtgctgctgggaagaaaggtcaactggcatgactttgcgttctttgaccccgttatgtatgagtcgttgcggcagctaatcctggcttctcagagcagcgacgctgacgctgtcttctctgccatggatctggcgttcgcgatcgacctgtgtaaggaggaaggtggtggacaagtggagctcattccgaatggggttaatatccctgtcacaccacagaatgtctacgagtacgtgagaaaatacgctgaacatagaatgctcgtcgtcgctgagcagcctcttcacgctatgcgaaagggcctgttagatgttctccccaaaaattcactcgaggatctgactgctgaggactttagacttctagtcaacggctgtggcgaggtgaatgtgcagatgctgattagctttacatctttcaatgacgagagtggagagaatgccgaaaagctcctgcagttcaaaagatggttctggagcatagtggagaaaatgtccatgacggaaaggcaggatttggtctatttttggacctcctccccgagtctgccagcctctgaggagggcttccaaccaatgcctagcatcactatcaggccacctgacgatcagcatctgcctacagcgaatacttgcattagccgcctgtatgtgcctctgtactctagcaaacaaatattgaagcagaagctgctccttgccatcaagaccaaaaattttggcttcgtttag

SEQ ID NO: 102876 - DNA, 8397 bp, Artificial Sequence
  derived and/or modified sequence
atgaccagcatccactttgtggtgcaccccctgcccggcacagaggaccagctgaatgaccggctgcgggaggtgtctgagaagctgaacaagtacaacctgaacagccacccccccctgaatgtgctggagcaggccaccatcaagcagtgtgtggtgggccccaaccacgccgccttcctgctggaggatggccgggtgtgccgcatcggcttctctgtgcagcctgaccggctggagctgggcaagccagacaacaatgatggcagcaagctgaacagcaacagcggggccggccgcaccagccggcccggccgcaccagtgacagcccctggttcctgagcggcagcgagaccctgggccgcctggccggcaacaccctgggcagccgctggagcagcggcgtgggcggcagcggcggcggcagcagcggccgcagcagcgctggggcccgggacagccggcggcagaccagggtcatcagaacaggccgggaccggggcagcggcctgctgggcagccagccccagcccgtcatcccagccagcgtcatccctgaggagctgatcagccaggcccaggtggtgctgcagggcaagagccgcagcgtcatcatccgggagctgcagaggaccaacctggatgtgaacctggccgtgaacaacctgctgagcagagatgatgaagatggagatgatggagatgacacagccagcgagagctacctgcccggggaggacctgatgagcctgctggatgctgacatccacagcgcccaccccagcgtcatcattgatgctgatgccatgttttctgaggacatctcctacttcggctaccccagcttccgccgcagcagcctgagccggctgggcagcagccgggtgctgctgctgcccctggagcgggacagcgagctgctgcgggagcgggagagcgtgctgcggctgcgggagcggcgctggctggatggagccagctttgacaatgaaagaggcagcaccagcaaggagggggagcccaacctggacaagaagaacacccctgtgcagagccctgtgtccctgggggaggacctgcagtggtggccagacaaggatggcaccaagttcatctgcatcggggccctgtacagcgagctgctggccgtgagcagcaaaggagagctgtaccagtggaagtggagcgagagcgagccctacagaaatgcccagaaccccagcctgcaccacccccgggccaccttcctgggcctgaccaatgagaagatcgtgctgctgagcgccaacagcatccgggccaccgtggccacagagaacaacaaggtggccacctgggtggatgagaccctgagctctgtggccagcaagctggagcacacagcccagacctacagcgagctgcagggcgagagaattgtgtccctgcactgctgtgccctgtacacctgtgcccagctggagaacagcctgtactggtggggcgtggtgcccttcagccagaggaagaagatgctggagaaggcccgggccaagaacaagaagcccaagagcagcgctggcatcagctccatgcccaacatcaccgtgggcacccaggtgtgcctgaggaacaaccccctgtaccacgccggggctgtggccttcagcatctctgctggcatccccaaggtgggcgtgctgatggagagcgtgtggaacatgaatgacagctgccgcttccagctgcggagccctgagagcctgaagaacatggagaaggccagcaagaccacagaggccaagccagagagcaagcaggagcctgtgaagacagagatgggccccccacccagccctgccagcacctgcagtgatgccagcagcatcgccagcagcgcctccatgccctacaagagaagaagaagcaccccagcccccaaggaggaggagaaggtgaatgaggagcagtggagcctgcgggaggtggtgtttgtggaggatgtgaagaatgtgcctgtgggcaaggtgctgaaggtggatggagcctacgtggccgtgaagtttcctggcaccagcagcaacaccaactgccagaacagcagcggcccagatgctgaccccagcagcctgctgcaggactgccgcctgctgagaattgatgagctgcaggtggtgaagacaggaggcacccccaaggtgcctgactgcttccagaggacccccaagaagctgtgcatccctgagaagacagagatcctggccgtgaatgtggacagcaagggcgtgcatgctgtgctgaagacaggcaactgggtgcgctactgcatctttgacctggccaccgggaaggccgagcaggagaacaacttccccaccagcagcatcgccttcctgggccagaatgaaagaaatgtggccatcttcaccgctggccaggagagccccatcatcctgagagatggaaatggcaccatctaccccatggccaaggactgcatgggcggcatccgggaccctgactggctggacctgccccccatcagcagcctgggcatgggcgtgcacagcctcatcaacctgcctgccaacagcaccatcaagaagaaggctgctgtgatcatcatggctgtggagaagcagaccctgatgcagcacatcctgcgctgtgactatgaggcctgccggcagtacctgatgaacctggagcaggccgtggtgctggagcagaacctgcagatgctgcagaccttcatcagccaccgctgtgatggcaacagaaacatcctgcacgcctgtgtgtctgtgtgcttccccaccagcaacaaggagaccaaggaggaggaggaggccgagaggagtgaaagaaacacctttgctgagcggctgtctgctgtggaggccatcgccaatgccatctctgtggtgagcagcaatggacctggcaacagagctggcagcagcagcagccgcagcctgcggctgcgggagatgatgagaagaagcctgcgggctgctggcctgggcagacatgaggccggggccagcagcagtgaccaccaggaccctgtgtccccacccatcgcccctccttcctgggtgcctgaccccccagccatggaccctgatggagacatcgacttcatcctggccccagctgtgggcagcctgaccacagctgccactggaacaggccagggccccagcaccagcaccatccctggccccagcacagagcccagcgtggtggagagcaaggacaggaaggccaatgcccacttcatcctgaagctgctgtgtgacagcgtggtgctgcagccctacctgcgggagctgctgagcgccaaggatgcccggggcatgacccccttcatgtctgctgtgtctggccgggcctacccagctgccatcaccatcctggagacagcccagaagatcgccaaggccgagatcagcagcagcgagaaggaggaggatgtgttcatgggcatggtgtgccccagcggcaccaacccagatgacagccccctgtatgtgctgtgctgcaatgacacctgcagcttcacctggacaggagctgagcacatcaaccaggacatctttgaatgtaggacctgtggcctgctggagagcctgtgctgctgcacagaatgtgcccgggtgtgccacaagggccatgactgcaagctgaagaggaccagccccacagcctactgtgactgctgggagaagtgcaagtgcaagaccctgattgctggccagaagagcgcccggctggacctgctgtaccgcctgctgacagccaccaacctggtgaccctgcccaacagcagaggagagcacctgctgctcttcctggtgcagacagtggcccggcagacagtggagcactgccagtacagaccaccccgcatccgggaggacaggaacaggaagacagccagccctgaggacagcgacatgccagaccatgacctggagcccccaagatttgcccagctggccctggagcgggtgctgcaggactggaatgccctgaagtccatgatcatgtttggcagccaggagaacaaggaccccctgagcgccagcagccgcatcggccacctgctgcctgaggagcaggtgtacctgaaccagcagagcggcaccatccggctggactgcttcacccactgcctgattgtgaagtgcacagctgacatcctgctgctggacaccctgctgggcaccctggtgaaggagctgcagaacaagtacaccccaggaagaagagaggaggccatcgctgtgaccatgaggttcctgcggtctgtggcccgggtgtttgtgatcctgtctgtggagatggccagcagcaagaagaagaacaacttcatcccccagcccatcggcaagtgcaagagggtcttccaggccctgctgccctatgctgtggaggagctgtgcaatgtggccgagagcctgattgtgcctgtgaggatgggcatcgcccggcccacagcccccttcaccctggccagcaccagcattgatgccatgcagggcagcgaggagctgttctctgtggagcccctgcccccccggcccagcagtgaccagagcagcagcagcagccagagccagagcagctacatcatccggaacccccagcagaggcgcatcagccagagccagcctgtgcggggcagagatgaggagcaggatgacatcgtgtctgcagatgtggaggaggtggaggtggtggagggcgtggccggggaggaggaccaccatgatgagcaggaggagcacggggaggagaatgctgaggccgagggccagcatgatgaacatgatgaagatggcagtgacatggagctggacctgctggccgctgctgagacagaaagtgacagcgagagcaaccacagcaaccaggacaatgccagcggcagaagatctgtggtgacagctgccacagctggcagcgaggccggggccagctctgtgcctgccttcttctctgaagatgacagccagagcaatgacagcagtgacagcgacagcagcagcagccagagtgatgacatcgagcaggagaccttcatgctggatgagcccctggagaggaccaccaacagcagccacgccaatggagctgcccaggcccccaggtccatgcagtgggccgtgaggaacacccagcaccagagagctgccagcacagcccccagcagcaccagcaccccagctgccagcagcgctggcctcatctacatcgaccccagcaacctgcggcgcagcggcaccatcagcaccagcgctgctgctgctgctgctgccctggaggccagcaatgccagcagctacctgaccagcgccagcagcctggcccgggcctacagcatcgtcatccggcagatcagtgacctgatgggcctcatccccaagtacaaccacctggtgtacagccagatcccagctgctgtgaagctgacctaccaggatgctgtgaacctgcagaactacgtggaggagaagctgatccccacctggaactggatggtgtccatcatggacagcacagaggcccagctgcgctatggcagcgccctggccagcgctggggaccccggccaccccaaccaccccctgcacgccagccagaacagcgcccggcgggagaggatgacagcccgggaggaggccagcctgcggaccctggagggcagaagaagagccaccctgctgagcgcccggcagggcatgatgtctgcccggggggacttcctgaactatgccctgagcctgatgaggagccacaatgatgagcacagtgatgtgctgcctgtgctggatgtgtgcagcctgaagcacgtggcctacgtgttccaggccctgatctactggatcaaggccatgaaccagcagaccaccctggacaccccccagctggagaggaagaggacccgggagctgctggagctgggcatcgacaatgaagacagcgagcatgaaaatgatgatgacaccaaccagagcgccaccctgaatgacaaggatgatgacagcctgcctgctgagaccggccagaaccaccccttcttccgccgcagtgacagcatgaccttcctgggctgcatcccccccaacccctttgaggtgcccctggccgaggccatccccctggccgaccagccccacctgctgcagcccaatgccaggaaggaggacctgtttggccggcccagccagggcctgtacagcagcagcgccagcagcggcaagtgcctgatggaggtgacagtggacaggaactgcctggaggtgctgcccaccaagatgtcctatgctgccaacctgaagaatgtgatgaacatgcagaaccggcagaagaaggagggggaggagcagcctgtgctgcctgaggagacagagagcagcaagccaggccccagcgcccatgacctggccgcccagctgaagagcagcctgctggccgagatcggcctgacagaaagtgagggcccccccctgaccagcttccggccccagtgcagcttcatgggcatggtgatcagccatgacatgctgctgggccgctggaggctgagcctggagctgtttggccgggtcttcatggaggatgtgggcgctgagcccggcagcatcctgacagagctgggcggctttgaggtgaaggagagcaagttccggcgggagatggagaagctgaggaaccagcagagccgggacctgagcctggaggtggaccgggaccgggacctgctgatccagcagaccatgaggcagctgaacaaccactttggaagaagatgtgccaccacccccatggctgtgcaccgggtgaaggtgaccttcaaggatgagcctggagagggcagcggcgtggcccggagcttctacacagccatcgcccaggccttcctgagcaatgagaagctgcccaacctggagtgcatccagaatgccaacaagggcacccacaccagcctgatgcagaggctgaggaacagaggagagcgggaccgggagcgggagcgggagcgggagatgagaagaagcagcggcctgcgggccggcagcagaagagaccgggaccgggacttccggcggcagctgagcattgacacccggcccttccggcctgccagcgagggcaaccccagtgatgatcctgagcccctgcctgcccaccggcaggccctgggggagcggctgtacccccgggtgcaggccatgcagcctgcctttgccagcaagatcaccggcatgctgctggagctgagccctgcccagctgctgctgctgctggccagcgaggacagcctgcgggcccgggtggatgaggccatggagctgatcatcgcccacggcagagaaaatggagctgacagcatcctggacctgggcctggtggacagcagcgagaaggtgcaggagaacaggaagagacatggcagcagccgctctgtggtggacatggacctggatgacacagatgatggagatgacaatgcccccctcttctaccagcccgggaagaggggcttctacacccccaggcctgggaagaacacagaggcccggctgaactgcttcagaaatattggccgcatcctgggcctgtgcctgctgcagaatgagctgtgccccatcaccctgaacagacatgtgatcaaggtgctgctgggcaggaaggtgaactggcatgactttgccttctttgatcctgtgatgtatgagagcctgcggcagctgatcctggccagccagagcagtgatgctgatgctgtgttttctgccatggacctggcctttgccatcgacctgtgcaaggaggagggcggcggccaggtggagctgatccccaatggagtgaacatccctgtgaccccccagaatgtgtatgaatatgtgaggaaatatgcagagcacaggatgctggtggtggccgagcagcccctgcacgccatgaggaagggcctgctggatgtgctgcccaagaacagcctggaggacctgacagctgaggacttccggctgctggtgaatggctgtggggaggtgaatgtgcagatgctgatctccttcaccagcttcaatgatgaaagtggagaaaatgctgagaagctgctgcagttcaagcgctggttctggagcatcgtggagaagatgtccatgacagagcggcaggacctggtgtacttctggaccagcagccccagcctgcctgccagcgaggagggcttccagcccatgcccagcatcaccatccggcccccagatgaccagcacctgcccacagccaacacctgcatcagccggctgtatgtgcccctgtacagcagcaagcagatcctgaagcagaagctgctgctggccatcaagaccaagaactttggatttgtgtag

SEQ ID NO: 102877 - DNA, 8397 bp, Artificial Sequence
  derived and/or modified sequence
atgaccagcatccacttcgtggtgcaccccctgcccggcaccgaggatcagctgaatgaccggctccgggaggtgtccgaaaagttgaataagtacaaccttaacagtcaccccccgctgaatgtcctggagcaagccacaatcaaacagtgtgtcgtgggaccaaatcacgccgctttcctactcgaagacggacgtgtttgtagaattgggtttagcgtccagcccgacagactggagctgggcaagccagataacaatgacggaagtaagcttaactctaattccggcgccgggagaacatcgagaccgggtcgaacaagcgactctccctggttcctgtccgggtctgaaacgcttgggcgcctcgctggaaataccctgggctcacgttggtcctctggggttggcgggagcggagggggaagttctggaagatcttctgcaggtgcccgggattccaggaggcagacacgcgtgattagaaccggacgggatcggggctcaggccttctaggatcccagcctcagccggtaatccccgcttccgtgatccctgaggagctgatctctcaagcccaggtggttcttcagggcaagagtagatccgtcattatccgtgaactacagcgcacaaatctggacgtcaatttggctgtcaataacctgctgtctagagacgacgaagacggcgatgacggggacgataccgcgtctgaaagctatctccctggcgaagatctgatgtccctgctggacgccgatatccatagcgcccacccaagtgtgataatagacgcagatgccatgttctcagaggacatatcttactttggatatccctcctttcggcgaagcagcctgagccgactgggctcttcaagggtgctgctgctgcctttggagcgcgattcagagctgcttcgagagcgcgaatctgtcctgcggctgcgggagaggaggtggctcgacggggcaagttttgataacgagcggggtagcacatccaaggaaggggagcccaatctagataagaaaaacacacccgtgcagagcccagtctctttgggagaggacctgcagtggtggcctgacaaagatggtacaaagttcatctgcattggggccctgtactctgagctacttgcagtcagctcaaagggcgaactctaccaatggaagtggagtgaaagcgagccttaccgaaatgcacagaacccaagcctgcatcaccccagagccacttttcttggactgaccaatgaaaaaatcgtcttgttatccgccaactcaattcgcgccacggtcgcgacagaaaataacaaagtggcaacttgggtggacgaaaccctcagctctgtcgctagcaaacttgagcacacagctcaaacatactcagagctacaaggcgagaggatcgtgtcccttcactgttgtgcgttgtacacatgtgcgcaattagagaacagcctctactggtggggtgtggtgcctttcagccagcggaagaaaatgctcgagaaggcacgcgcaaaaaacaaaaagcccaagagctcagcaggcatcagttctatgcctaatattacggtggggacacaggtgtgtttacgaaataatccattgtatcatgccggcgctgtggcgttcagcatttctgccggaatacctaaggtcggagtgctcatggagtccgtgtggaatatgaacgattcttgccgctttcagctgaggagccccgagtcccttaaaaacatggagaaagcttctaagaccactgaagcgaagcccgaatccaagcaggagccggtgaagacggagatggggccacctccttcacccgcgtctacgtgttccgacgcctctagcattgcatccagcgcctcaatgccgtataaacggcgcaggtcgaccccagcgcccaaagaggaggagaaagtcaacgaggaacagtggtcgttacgcgaggttgtgttcgtcgaagatgtgaagaacgtaccagtaggtaaggtgcttaaggtcgatggagcgtacgttgctgtcaaattccccggaactagttctaatacaaattgccagaacagttcagggcctgatgctgatccttccagtctgctccaggattgcaggctattgaggatcgatgaattacaggtggtgaaaactggaggcacacctaaggtgcctgactgtttccagagaacaccaaagaagctctgcatcccggaaaagaccgaaatcctggccgtaaacgtcgacagcaaaggcgtccacgccgtgctcaagaccggaaactgggtacgctattgcattttcgacttggccaccgggaaggccgaacaggaaaataactttccgacctctagcatcgcgttccttggacagaacgaacgcaacgttgctatcttcaccgctgggcaagaaagccctatcatcctgagggatggaaatggcacgatctatcctatggcgaaggattgcatgggtggtattcgggaccctgactggctcgacctccctcctatcagctcgctcggtatgggtgtccacagcctgatcaacttgcccgccaactccacaattaagaaaaaagctgccgttattatcatggcagtagaaaaacagaccctcatgcagcatatactccgctgcgactacgaggcctgcaggcagtacctgatgaaccttgagcaagctgtagtgttggagcagaacctgcaaatgcttcagacctttattagccaccgttgcgacgggaacaggaatatcttgcacgcttgtgtgagtgtttgcttcccaacctccaacaaggagaccaaagaggaagaagaggctgagcgtagcgagcgcaacacattcgcggaaaggttgtctgccgtggaggccatcgctaacgccataagtgtggtgtccagcaacggaccagggaacagagctggatccagcagcagcagatctttacggttgagagaaatgatgagacgtagtctgcgggccgcaggcctgggacgacatgaggctggtgcttctagcagtgatcaccaggaccccgtgagcccccctatcgcccccccttcctgggtcccagatcctcccgccatggatccagatggggacatagatttcatcctcgccccagccgtggggagtctcaccacagccgctaccggaaccgggcagggtcctagtacatccactattcctggcccatcaacagaaccgtcagttgtcgaatcgaaagaccgaaaagccaacgctcacttcatcctgaagttgctctgtgattcagtcgttctccagccgtatctccgtgagcttctgagtgccaaggatgctagaggtatgacgcccttcatgtcagctgtgtcggggcgagcttacccggccgccataaccattctggaaacagcccaaaaaatcgccaaggccgagatcagcagcagtgaaaaagaggaggacgtattcatgggaatggtatgcccatcagggaccaaccccgacgactcccctctgtatgtgttgtgttgtaatgacacatgtagcttcacttggacaggagccgaacacatcaaccaggacatcttcgagtgcaggacttgcggcttgctcgagtcgctatgttgctgtaccgaatgtgcccgcgtgtgtcacaagggacacgactgcaagctgaagcggaccagcccaaccgcctactgtgactgttgggaaaaatgcaagtgtaaaacgctgattgcagggcagaagtcagctcgactcgatctcctctatcgcctgctaaccgctaccaacctggttaccctacccaattcacgaggagagcacctcctcttgtttctggttcagacggtggcacggcagactgtggagcattgccagtacaggccgccacgtatacgtgaggatagaaaccgcaagacagcctccccagaggattctgatatgcccgaccatgacctcgagcctcctagatttgcccagctggcgctcgagagagtgttgcaagattggaatgccctcaagtctatgatcatgtttggctcacaagagaacaaagatccactcagcgccagctcaagaattggccacttactccctgaggaacaggtctatttaaaccagcagagcggtaccattagactggattgcttcacacactgtctaatcgttaagtgtaccgccgacattctgctactggatacactgctcgggaccctggttaaggagctgcagaacaagtacactccagggcgacgcgaggaagctatcgccgttaccatgcggtttttaagatcagtggctcgcgtattcgtgatcctctccgtggagatggcctcaagtaaaaagaaaaataattttatacctcagccaattggcaaatgtaagcgcgtattccaggccctgctgccgtacgcagtcgaggaactgtgcaatgttgctgagtctctgatcgtccccgtgagaatgggaatcgcacggccaactgccccttttacgctggcttctacctccatcgacgcaatgcaaggatctgaagagttgtttagtgttgaacccttgccccccagaccatcatccgaccagtcctcaagttctagtcagtcacaatctagctacataatccgcaatcctcaacagaggagaatatcccaatctcagcccgtgcgaggaagagatgaagagcaggacgatatagttagcgcagacgtcgaggaagttgaagtggtggagggagtggccggggaggaagaccatcatgatgaacaggaggagcacggagaggagaacgccgaagcagagggacagcatgacgagcatgatgaagatgggagtgacatggaacttgatttactggctgccgctgaaactgaaagtgactccgaaagcaatcatagcaatcaggataacgcctctggcaggcgctctgtggtgaccgctgccacagcaggttccgaagcaggtgcgtcctcagtgcccgccttctttagtgaggacgactctcagagcaacgatagcagcgattccgactcttcctcctcccagtctgacgatattgagcaagagaccttcatgttggacgagcccctggaacgcacaacaaactcttctcacgcaaacggtgcagctcaggcacctagatccatgcagtgggccgtccgcaatacccaacaccaacgagcggcctctaccgcgccgtcatcaactagtacacccgcagcttccagcgccggcttgatttatattgatccttcgaaccttcgccggtcgggtacaatatccacgtccgcagctgcggcggcagcagcactggaggctagcaacgcaagttcctacttgacatctgcatcctcccttgcccgtgcgtacagtattgtgatcagacagatctctgacctgatgggcttaatcccaaaatacaatcatctggtttacagtcagatcccagctgccgttaagctgacctatcaagatgccgtaaacctgcagaactatgtggaggaaaaactgatccccacttggaattggatggtttccatcatggacagtaccgaagcacagctccgttacggcagcgccctcgcctcagctggagatcctggtcaccccaaccaccctttacacgcgagccagaactcagcgcggcgtgagaggatgaccgccagggaagaggcgtctctacgcacgctggagggacgcagaagggccacactactttccgcccgacagggcatgatgtctgcccggggagactttttgaattatgctctctcattgatgagaagtcataatgatgaacactccgatgtgctgcctgtacttgatgtctgttctttgaagcatgtcgcttatgtgttccaggcattgatctattggatcaaagcaatgaaccagcagacaactctggataccccgcagctcgagcgaaaacgaacgcgtgaactgttagaattaggcattgacaacgaagattctgagcatgagaacgacgacgatacaaatcagtcagctactctcaacgacaaagacgatgactcccttcctgccgagacggggcagaaccaccccttctttaggcggagtgattcgatgacctttctcggatgcattcctcctaatccttttgaggttcccctcgccgaggccattccactggccgatcagcctcacctgctgcaacccaatgctagaaaagaagacttgttcgggcgcccttcccagggattgtactcatcctctgccagtagcggcaagtgcttaatggaggtgacagtggatcgaaattgcttagaagtcctccctacaaaaatgagctacgctgcaaacctcaagaacgtgatgaacatgcaaaaccgacaaaaaaaggaaggggaggagcagcccgttctcccagaggagaccgagtccagtaagccaggcccctctgctcatgatctggcagctcaactgaagtcttcgctgctggccgagatcggcctgactgaatccgagggaccaccactcactagtttccgcccccagtgctcctttatgggcatggtgatcagccatgacatgctgctgggtaggtggcgtttaagtttagaactctttggacgtgttttcatggaagacgtgggggccgaacctggctctattttaactgagcttggcggcttcgaggtcaaggagtcaaaatttagaagggagatggaaaaactgagaaaccagcaatctcgagacctcagtctggaagtcgaccgcgacagggatctcctcatccagcagactatgcgacagctcaacaaccacttcgggcggcgctgtgctacaactcccatggcagtccacagagtcaaggttacattcaaagatgagcccggtgagggaagtggggtggcaagaagtttttatacagcgatcgcccaggccttccttagtaacgagaagctgcccaacctcgaatgcatccagaatgccaataaaggcacacataccagcctaatgcaacggctcagaaaccgtggcgagcgcgatagagagagagaaagagagcgcgagatgcggcggagctccggcttacgggcaggctctaggcgagacagagatagggacttccgacgtcagttgagtatagacaccagaccctttaggccagcttctgagggtaatcccagcgacgatccggaacctctgcccgctcatcgtcaggctctgggggagcgactgtatccccgtgtgcaagcaatgcaacccgctttcgcatccaagatcacaggtatgctgctggagctctcacccgctcaattattgctgctccttgccagtgaagacagcttgcgggcccgcgttgacgaggcaatggaactgattattgctcatggacgtgagaatggcgctgatagcattctggatctcggtctggtggatagcagcgagaaagtgcaggagaatcgaaagcggcatgggtcctcccgctctgtggtggacatggacctcgacgacacagacgacggggacgataatgcccccctgttctaccagccaggtaaaagaggtttctacactcctagacccggcaaaaataccgaggcaaggctcaactgttttcgtaatattgggaggattctgggcctttgcctcctgcagaatgagctgtgtcccatcactcttaataggcatgtgatcaaggtacttttgggacgtaaggtgaattggcacgatttcgccttctttgacccagtgatgtacgaaagtttgcgccagctcatactggcaagccaaagtagcgatgctgacgcagtgttttctgccatggacttggccttcgccatagatctgtgcaaagaagaggggggtggacaagtagaactaatcccaaatggagtgaatattcctgttactccacagaatgtctatgaatacgtgagaaagtacgccgaacacaggatgttggtggtagcagaacagcccctccacgctatgcgaaagggcttgctcgatgtcttacccaaaaactcattggaagacctgactgcggaggactttcgtcttctcgtgaatgggtgtggtgaagtgaacgtgcagatgctgatcagttttacttcttttaatgacgaatctggagagaatgccgaaaaactattgcaattcaagcgttggttctggtcaatcgtggagaagatgtccatgacagagagacaggatttagtgtatttttggacgtcttctcccagcctgcctgccagcgaggaggggtttcaaccaatgccctccattactattagacccccagacgaccagcacctgcctactgcaaatacctgtatctctcggctgtatgttcctttatatagctccaagcagatcctgaagcaaaaacttctgctggcaataaagaccaagaatttcggctttgtttag

SEQ ID NO: 102878 - DNA, 8397 bp, Artificial Sequence
  derived and/or modified sequence
atgacgagcatccactttgtcgtgcaccccctgccgggaactgaagaccaattgaacgatcgtctgcgggaagtcagcgagaaactcaacaagtataatctcaatagccatcctcctcttaatgtgctcgagcaagctacaattaagcagtgcgttgtggggccaaaccacgcagcctttcttcttgaagacgggcgagtgtgccgcatcggattttcagtccagcctgacaggcttgagctgggaaaacctgacaacaacgatggatccaaattaaactccaacagtggtgcagggaggaccagtcgcccaggtcgcacttctgacagcccatggtttctgagtgggtccgagacattaggtcggctcgccggaaataccctgggcagccgctggtcctctggggtcggagggtctggtggcggatcgagcggtagatccagcgcaggcgctcgtgacagcagaaggcagactcgagttattcggaccggccgtgatagaggttcggggctactgggttcccagcctcaacctgtgatcccagcttccgtgatcccagaagagctcattagccaggcccaagtggtgctgcagggcaagtcccggtccgtgattatccgagagctccagcggactaaccttgacgtaaacctggccgtcaacaacctgctgagcagggatgatgaggacggcgacgacggcgacgatacagcatccgagtcatacctcccaggagaggacttaatgagtctcctggatgcagacatccattctgcccacccttcagttatcattgacgctgatgctatgtttagcgaggatatttcctattttgggtatccttcctttaggcgcagcagcctttcccgtctagggtctagtagggtgctactcctccctcttgaacgagactctgagctgctgagggagagagaatcggtcttgaggctgagggaacggaggtggctggatggggcttcctttgacaacgagagggggtctactagcaaagaaggtgagcctaacctggacaaaaagaacacacccgtgcagtccccagtgtccctgggggaggacctgcagtggtggcccgataaggatgggacaaaattcatctgcattggggctctgtactctgagcttttggcagtgtcctctaaaggcgagttataccagtggaagtggtcggaatccgaaccttacaggaacgcccagaaccctagcttgcaccacccaagagcaacttttctgggactgaccaacgagaagatcgtcctcctgtctgcaaatagcattagggctacagtggctactgagaacaataaagtggccacctgggtcgatgaaacattgagcagtgtggcgtctaagttagagcatacagcgcaaacgtacagtgaactgcagggcgaacgcatcgtgtctctccattgttgtgccctgtacacgtgcgcccagctggagaactcactttattggtggggcgttgttccttttagccagcgtaaaaagatgttagaaaaggcccgagctaaaaataagaagcccaaatcctccgctgggatcagttcaatgcctaacattacagtcggaactcaagtgtgtttacggaataatccactgtaccacgctggtgcggttgccttcagcatttccgccggtatcccaaaagtcggcgtcctaatggagagcgtgtggaacatgaatgattcctgtagattccagctccggtcaccagaatccctgaagaacatggaaaaggccagtaaaaccaccgaagcaaagcctgagtctaaacaagagcctgttaagaccgaaatggggcctccgccttcacccgcatccacgtgcagcgacgcttccagtatcgcatcttccgctagtatgccatacaaacgtaggcggtcgacaccagccccaaaggaagaggaaaaggtcaacgaagagcaatggagtctccgcgaagtggtttttgtcgaggacgtgaaaaacgtgcctgttggtaaggtgctgaaggtggatggagcttatgtcgccgtgaagttcccaggaacaagttccaatacaaattgtcagaactcttcaggtcccgacgcagatccctcgagtcttctccaggattgtagactcctccggatagacgaactgcaagtcgtaaaaactggcggtacccctaaggtgcctgattgttttcagcggacccctaaaaagctgtgcatacctgagaagaccgagatcctggcggtgaatgtcgattctaagggcgtccacgccgtgcttaagacaggcaactgggtgcgctactgtatctttgatcttgcgaccgggaaagcggagcaggagaataatttccccacttctagcatcgctttcctcggccagaacgagcgcaatgtggcaatattcacagccggacaggaaagcccgattatcctgcgtgacggaaacggtacaatctatccgatggccaaggactgcatgggtggcattagggatcctgactggctcgatctgcccccaatctctagcttgggcatgggagtgcatagtttgattaatttgcccgcaaatagtaccataaaaaagaaggcagcagtgatcataatggccgtggagaaacagacactgatgcagcatattctaagatgcgactacgaagcatgccggcaatatctgatgaatctggaacaggcagtcgtgctcgagcaaaacctgcagatgctgcagacttttatttcccacaggtgcgatgggaaccgcaacatattgcacgcctgtgtgtcagtttgttttcctacctctaataaggagacaaaagaagaggaggaggcagaacgcagcgagcggaacacgtttgcagaaagactttccgccgtggaggcgatcgctaacgctatcagtgtcgtgtcatccaatggacccggaaatcgcgcagggagcagcagttctcggagccttagacttcgtgagatgatgagacgctcccttcgcgctgctgggctgggaaggcacgaggcaggggcatcctcatcagatcatcaagatcccgtcagccctccaattgcacccccttcctgggtccccgaccccccagccatggacccagatggggatattgactttatactggctccagctgtcggaagcttaacgacggctgccactggcacagggcaaggaccaagtacctcgaccattcctggcccaagtaccgagccatcagtcgtggagtctaaggatcgtaaggctaatgcacacttcatacttaaactcttatgtgatagcgtcgtgctgcaaccctacctacgggagttgctgagcgccaaggacgctcgtgggatgactccttttatgagcgccgtgagcggcagagcctatccagcggctatcacaatactagaaacagctcagaagattgctaaagctgaaatcagttcttcagaaaaggaagaggatgtctttatgggcatggtttgcccatcagggaccaatcctgatgactctcccctgtatgtgttgtgctgcaatgacacctgttcttttacctggacaggggcagaacatatcaaccaggacatttttgaatgtaggacatgtggcctgctggagagcctttgttgttgtacggaatgcgcccgagtgtgccacaaagggcacgattgcaaactgaaacggacttcaccaaccgcttattgcgattgctgggagaaatgtaagtgcaagaccctgattgctggtcagaagtctgccaggctggatttactgtatagattattaacagcgaccaatttggtgaccctgcctaactcccgcggtgaacacttgctgctgtttctggtccagactgtggccaggcaaacagtcgagcactgccagtatagacccccaaggatccgtgaggatcgaaacagaaagaccgccagccctgaagacagcgatatgcccgaccatgacctggagccaccaaggttcgcccaacttgccttggaaagagtgcttcaggactggaatgccctgaaaagcatgatcatgtttggatctcaggagaacaaagatccgctgagtgcctccagtaggataggtcacctcctaccagaagaacaggtttacctgaaccagcagtctggtaccatcagacttgactgcttcacccactgccttattgtcaagtgtaccgccgatatcctgctgttagatactctgcttggcaccttggtcaaagagttgcaaaacaaatatactcccggaagacgggaagaagccatagctgtcaccatgcggttcctccggagtgtggcccgtgtttttgtaattctttcggtggagatggcgtcaagcaagaaaaagaataacttcataccacagcctatcggtaagtgcaagagagtctttcaggcgctgctgccttatgccgtagaggagctatgcaacgtggcagagagcctcatcgtgcccgttcggatggggatcgcacgtccaaccgcccctttcactctagcgtcgactagcatcgacgcgatgcagggctccgaagagttgttttctgtcgagcctctcccccctagaccatctagcgaccagtcatcatcctcaagtcaaagccagtcaagctacataataagaaacccacagcaaagacggatatcgcagagccagcctgtgagaggaagagatgaagagcaggatgatattgtgtctgcagatgtggaggaagttgaggtggtggaaggcgtggctggagaagaggaccaccatgacgaacaagaagaacatggtgaggagaacgcggaggcggagggccagcacgacgagcacgacgaagatgggtccgacatggaactagatctgctggcagccgctgagactgaatccgactctgagtctaaccattcaaaccaagacaatgccagcgggagacgatctgtggtgaccgctgccacagcgggaagcgaggcgggtgcaagctccgtacccgcatttttctcagaggatgattctcagagcaatgactcctcagactctgactcaagcagcagtcaatcagatgacatagaacaggagaccttcatgttagacgagccattagagagaaccaccaacagctctcatgccaacggcgcagcccaggcacctagaagcatgcagtgggccgtgcgcaacactcagcatcaaagagccgcatcaaccgctcctagcagtactagcacacccgcagcatctagcgcgggtctgatttacattgacccatccaatctcagaagaagtgggaccattagcacatccgcagcagcggctgcagcagccttagaagcgagtaacgcaagcagctacctcacctcagctagctctttggcccgagcatacagcatcgtgatcaggcaaatttctgatttgatggggctgatacctaagtacaatcacctcgtttatagccaaatcccagccgctgtgaaacttacttatcaggacgcggtgaatctgcagaactacgtggaggagaagttgattcctacgtggaactggatggtttcgataatggacagcactgaagctcagctcaggtatggctccgcgctggctagtgccggagatcctggtcatcccaaccacccactgcacgccagccaaaatagcgccaggagggagcggatgaccgcacgtgaggaggcttccttgagaaccttggagggtaggcgccgtgctactctgctcagcgcgaggcagggcatgatgagtgcgaggggcgacttcttgaactacgccctctcactgatgcgctcacacaatgacgagcattccgacgtgttgcccgtgctggacgtttgctctctcaagcatgtcgcttatgtgttccaagcactaatttactggataaaggcaatgaatcagcagacgactcttgatacgcctcagctggaaaggaaacggacccgagaactgctggagctgggcatcgataatgaagactccgaacacgagaacgatgacgatactaatcaatccgcgactttgaacgacaaggatgatgactcactcccggctgaaactggtcagaatcaccccttctttcggagaagcgactctatgactttcctagggtgtatcccgcctaatcccttcgaggttcccctcgccgaagccattccactagccgatcaaccgcacttgctgcagcctaacgccagaaaggaagatctgtttggacggccatctcaaggcctttattcgtccagcgcctcgtcggggaaatgcttgatggaggttacagtggatcgcaactgtctggaggttctcccaacgaagatgtcttatgccgcaaatcttaaaaatgtaatgaacatgcagaatagacaaaagaaggaaggtgaggagcaacctgtgctgccagaggaaacagagtccagtaagcctggaccctcagcgcatgacctggctgcccaattgaaatcctcgctgctggcagaaattggcctcaccgagtctgaggggcctcctctcacgtcattcagaccccagtgtagctttatggggatggtcatcagccacgatatgctcctaggaaggtggcgtctcagcctcgagctcttcgggcgagttttcatggaagatgtcggcgctgaacccggatcaattctgacggagctgggcggattcgaggtgaaggaatccaaatttcggagggaaatggaaaaactccggaatcagcaatctagggatttgtccctggaggtggaccgggatcgggacctcttaatacagcaaacaatgcggcagctaaacaatcatttcgggcgacgctgtgcgactacccctatggctgtgcacagagtcaaagttacttttaaagacgagccaggcgagggttcaggggttgctcgctcattttatactgccattgcacaggctttcctcagcaatgagaagctgcccaatctcgaatgcatccagaatgcaaataaaggcacccacacctctcttatgcagcgcctccgaaatcgcggagagcgcgaccgagaacgggagcgggagcgcgagatgcggagatcttcagggctgcgagctggatctaggcgcgatagagaccgggattttcggagacaattaagtatcgacacgagaccgtttcgaccggcttcagagggaaacccctctgatgacccagaaccgcttcccgctcacagacaggctctgggcgagagactgtacccccgtgtgcaggcaatgcagccagctttcgcctctaagattacgggcatgctgcttgaattgtctccagcccagcttctcctcttgttagcatccgaagattccctccgggcacgagtggatgaggcaatggaattaatcattgcccacggccgtgaaaacggcgcagactccatacttgatctcgggttggttgactcatcagaaaaagtgcaagaaaaccgtaaacggcacggctccagccgcagcgtcgtggatatggacctagatgataccgacgatggggacgataacgcgcctcttttctaccagcccggaaaaagggggttctatacgccacggccaggtaaaaatacggaagctcggctgaactgcttcaggaatatagggaggatcttaggcctgtgcttgttgcaaaacgagctctgccctatcaccttgaacaggcacgtaattaaagtcctgttgggccgtaaggtaaactggcacgatttcgccttttttgatcctgttatgtatgagtccctgcgccagctgatcctcgcctcccagtcctccgacgcagacgctgtgtttagcgctatggacctcgcttttgctatcgacctgtgtaaggaggaagggggaggccaggtggagctgatcccaaatggggtcaatattcccgtcacaccccaaaacgtgtacgagtacgtaagaaagtacgctgaacatagaatgctcgtcgtggcagagcagcccctgcacgcaatgagaaaggggctgctggatgtgctgccgaaaaacagtttagaggacctcacagccgaagatttccgactcctagtcaacggctgtggtgaagttaacgtccaaatgctcatctccttcacatcttttaacgatgaatctggcgagaacgcggagaaactgcttcaatttaaacggtggttttggtctatagtagagaagatgtccatgaccgaacgccaggatctcgtgtatttctggacgtcctctccctcactgcccgcatccgaggaaggattccagccaatgcccagcatcacaataagacccccagatgaccagcatctccccaccgcgaatacgtgtatttcccgcctgtatgttcccctgtatagtagcaagcagattttaaaacagaagttgctgctcgcaatcaaaacaaagaactttggattcgtttac

SEQ ID NO: 102879 - protein, 1005 aa, Artificial Sequence
  derived and/or modified sequence
MEQDTAAVAATVAAADATATIVVIEDEQPGPSTSQEEKNVSSFQLKLAAKAPKSEKEMDPEYEEKMKADRAKRFEFLLKQTELFAHFIQPSAQKSPTSPLNMKLGRPRIKKDEKQSLISAGDYRHRRTEQEEDEELLSESRKTSNVCIRFEVSPSYVKGGPLRDYQIRGLNWLISLYENGVNGILADEMGLGKTLQTIALLGYLKHYRNIPGPHMVLVPKSTLHNWMNEFKRWVPSLRVICFVGDKDARAAFIRDEMMPGEWDVCVTSYEMVIKEKSVFKKFHWRYLVIDEAHRIKNEKSKLSEIVREFKSTNRLLLTGTPLQNNLHELWALLNFLLPDVFNSADDFDSWFDTKNCLGDQKLVERLHAVLKPFLLRRIKTDVEKSLPPKKEIKIYLGLSKMQREWYTKILMKDIDVLNSSGKMDKMRLLNILMQLRKCCNHPYLFDGAEPGPPYTTDEHIVSNSGKMVVLDKLLAKLKEQGSRVLIFSQMTRLLDILEDYCMWRGYEYCRLDGQTPHEEREDKFLEVEFLGQREAIEAFNAPNSSKFIFMLSTRAGGLGINLASADVVILYDSDWNPQVDLQAMDRAHRIGQKKPVRVFRLITDNTVEERIVERAEIKLRLDSIVIQQGRLIDQQSNKLAKEEMLQMIRHGATHVFASKESELTDEDITTILERGEKKTAEMNERLQKMGESSLRNFRMDIEQSLYKFEGEDYREKQKLGMVEWIEPPKRERKANYAVDAYFREALRVSEPKIPKAPRPPKQPNVQDFQFFPPRLFELLEKEILYYRKTIGYKVPRNPDIPNPALAQREEQKKIDGAEPLTPEETEEKEKLLTQGFTNWTKRDFNQFIKANEKYGRDDIDNIAREVEGKSPEEVMEYSAVFWERCNELQDIEKIMAQIERGEARIQRRISIKKALDAKIARYKAPFHQLRIQYGTSKGKNYTEEEDRFLICMLHKMGFDRENVYEELRQCVRNAPQFRFDWFIKSRTAMEFQRRCNTLISLIEKE

SEQ ID NO: 102880 - protein, 1188 aa, Artificial Sequence
  derived and/or modified sequence
MQFETLRQVCNSVLSHFHGVFSSPPNILQNELFGQTLNNARKRSPSVSRDQNRRYDQREEREEYSQYATSDTAMPRSPSDYADRRSQHEPQFYEDSDHLSYRDSNRRSHRHSKEYIVDDEDVESRDEYERQRREEEYQSRYRSDPNLARYPVKPQPYEEQMRIHAEVSRARHERRHSDVSLANADLEDSRISMLRMDRPSRQRSISERRAAMENQRSYSMERTREAQGPSSYAQRTTNHSPPTPRRSPLPIDRPDLRRTDSLRKQHHLDPSSAVRKTKREKMETMLRNDSLSSDQSESVRPPPPKPHKSKKGGKMRQISLSSSEEELASTPEYTSCDDVEIESESVSEKGDSQKGKRKTSEQAVLSDSNTRSERQKEMMYFGGHSLEEDLEWSEPQIKDSGVDTCSSTTLNEEHSHSDKHPVTWQPSKDGDRLIGRILLNKRLKDGSVPRDSGAMLGLKVVGGKMTESGRLCAFITKVKKGSLADTVGHLRPGDEVLEWNGRLLQGATFEEVYNIILESKPEPQVELVVSRPIGDIPRIPDSTHAQLESSSSSFESQKMDRPSISVTSPMSPGMLRDVPQFLSGQLSIKLWFDKVGHQLIVTILGAKDLPSREDGRPRNPYVKIYFLPDRSDKNKRRTKTVKKTLEPKWNQTFIYSPVHRREFRERMLEITLWDQARVREEESEFLGEILIELETALLDDEPHWYKLQTHDVSSLPLPHPSPYMPRRQLHGESPTRRLQRSKRISDSEVSDYDCDDGIGVVSDYRHDGRDLQSSTLSVPEQVMSSNHCSPSGSPHRVDVIGRTRSWSPSVPPPQSRNVEQGLRGTRTMTGHYNTISRMDRHRVMDDHYSPDRDRDCEAADRQPYHRSRSTEQRPLLERTTTRSRSTERPDTNLMRSMPSLMTGRSAPPSPALSRSHPRTGSVQTSPSSTPVAGRRGRQLPQLPPKGTLDRKAGGKKLRSTVQRSTETGLAVEMRNWMTRQASRESTDGSMNSYSSEGNLIFPGVRLASDSQFSDFLDGLGPAQLVGRQTLATPAMGDIQVGMMDKKGQLEVEIIRARGLVVKPGSKTLPAPYVKVYLLDNGVCIAKKKTKVARKTLEPLYQQLLSFEESPQGKVLQIIVWGDYGRMDHKSFMGVAQILLDELELSNMVIGWFKLFPPSSLVDPTLAPLTRRASQSSLESSTGPSYSRS

SEQ ID NO: 102881 - DNA, 3567 bp, Artificial Sequence
  derived and/or modified sequence
atgcaattcgaaacgctgcgacaagtatgtaactctgtgttgagtcacttccatggagtcttcagctcaccccctaacatcctacagaacgagttatttgggcagacactcaataatgctcggaaacgcagtccctccgtttcccgagatcaaaaccggaggtacgaccaacgcgaggaacgagaggagtactcccagtatgcgacgtctgacaccgccatgcccaggagtccatctgattatgctgataggcggtcacaacatgagcctcagttctatgaggacagcgatcacctgtcataccgtgactcgaataggaggagccacaggcattccaaagaatatatcgtcgacgacgaagacgtcgagtctagggacgagtacgaacgccagcggcgtgaggaggagtatcagagtaggtaccgcagcgatccgaaccttgcgcgttatcccgtgaagccacagccatacgaggagcagatgcgaatccatgccgaggtgagccgggcaagacatgagcgtagacactcagacgtgtctctcgccaacgccgatcttgaggattctagaatctctatgttgaggatggaccgtccttcgagacagaggtcaatcagcgagaggagagcagcaatggagaaccaacgcagttactccatggagaggactcgtgaggctcagggaccctctagctacgcccagcgcaccacgaaccactcgccccctactccaagaagaagtcctttaccaatagaccgtcccgatctgcgacgcacagattccctgagaaaacagcaccacctagacccatcctccgccgtgcggaaaaccaaacgtgagaagatggagactatgcttcggaacgactctcttagcagcgaccagagtgaaagtgtaagacccccaccccctaaacctcacaaaagtaagaaggggggcaaaatgcgccagatttccttaagcagctcagaggaggaactggcttctacacctgagtacacatcatgcgatgatgtcgaaattgagagcgaatctgtgagtgaaaaaggtgatagtcagaaagggaaaaggaaaacgtccgaacaggctgtccttagcgactccaatactaggagtgaacgtcagaaagagatgatgtattttggggggcactcccttgaggaggatctggagtggtccgagccccaaatcaaagactccggtgtggatacgtgcagttctactaccctgaatgaggaacactcccattccgataaacatcccgttacctggcaaccaagcaaagacggggacagactgatcggaagaattttgttgaataaacgtttaaaggatgggtcagtgccccgtgactccggagctatgcttgggctcaaggtcgtgggcggcaagatgaccgagtctggtaggctctgcgccttcattacaaaggtcaagaaagggagcctggctgatactgtgggtcacctccgccccggtgatgaagtgctggagtggaacgggcgactgctccaaggcgcaacctttgaagaagtttacaacatcatcctcgagagcaaacctgaaccccaggtcgaactcgtggtgagtcgacctattggagacatacctagaattcccgactctactcacgcccagctggaaagcagctcatccagctttgagagccagaagatggatagaccgtcgattagtgttacatctcccatgtccccgggaatgctgcgagacgttcctcagttccttagcgggcagctttctattaagctgtggtttgacaaagtcggccaccagctgatcgtgacgattctgggagccaaggacctgcccagccgagaagacggcagaccgagaaacccttatgtgaaaatctacttccttcccgaccggtcggacaagaataaaagaagaactaagaccgtgaagaaaaccctcgagcctaaatggaatcaaacttttatatactccccagtccaccgacgcgaattccgagagcggatgctggaaattactctatgggaccaggctagggttcgcgaagaggagtctgagtttttgggggaaattctgattgaacttgaaacagcactactcgatgacgagcctcactggtacaagctgcagactcatgatgtttccagtctgcccttgccccaccctagcccttatatgcccaggcggcagctgcatggggagtcccctacaagaaggctgcagcggagtaagcgcatttcagatagcgaagtcagtgattacgattgcgacgacggcatcggcgtcgtctcggactataggcacgacgggcgggaccttcagagctcaactctcagcgtgccagagcaggtgatgagcagcaaccattgttcccccagcggctcccctcatagagttgatgtcattgggagaacccgttcctggtctcccagcgtcccgccacctcagagtaggaatgtggagcaagggctgcgtgggacacggactatgaccggacattacaacaccatttctcggatggacagacacagagttatggacgatcattacagcccagaccgggatcgggactgcgaggctgcggacagacagccttatcaccggagccggagcaccgaacagcggcccttactagagagaactacaacacggagccggtctacagaaagacctgatacgaacttaatgcggagcatgccttccctgatgactggaaggagtgccccccccagccctgccctgagtcggtcccatccccggacgggatctgtgcagacaagtccctctagcacgcctgtggccggtcgcaggggtcgtcagctcccacagctacctcccaaagggacattggacaggaaggccggaggcaagaagctgagatccaccgtgcagcgctcgaccgagaccgggctcgctgtggaaatgcggaactggatgactcgacaggcctccagagagagcaccgatgggtccatgaactcctactcatccgagggcaatctgatctttcctggcgtgagactggccagtgacagtcagttctccgatttcctggacggattgggccccgcacagctcgtggggagacaaaccctggcgactccagccatgggcgacatccaggtgggcatgatggacaagaaaggccaattggaggtcgaaataattcgggccagaggactggttgtaaaacccgggtcgaaaacgctgcccgctccgtacgtcaaggtgtaccttctggataacggcgtctgtattgctaaaaagaagacaaaggtggctagaaagacactcgaacctctctaccagcagctgctatctttcgaggagtccccacagggtaaggtgttacagatcattgtttggggggattacggccgaatggaccacaaatcattcatgggcgtcgcacagatactgctggacgaactggaactttccaatatggtcattggctggtttaaactttttcctccctcttcccttgttgatcctacactagcccctttaacgagacgggctagtcagagttctctagagagctctacaggcccgtcctatagtaggtcatag

SEQ ID NO: 102882 - DNA, 3567 bp, Artificial Sequence
  derived and/or modified sequence
atgcagtttgagaccctgcggcaggtgtgcaacagcgtgctgagccacttccacggcgtcttcagcagcccccccaacatcctgcagaatgagctgtttggccagaccctgaacaatgccaggaagaggagccccagcgtgtcccgggaccagaacagaagatatgaccagcgggaggagcgggaggagtacagccagtatgccaccagtgacacagccatgcccaggagccccagcgactatgctgaccggcgcagccagcacgagccccagttctatgaggacagcgaccacctgagctacagagacagcaacagaagaagccaccgccacagcaaggagtacatcgtggatgatgaagatgtggagagcagagatgaatatgaaaggcagaggcgggaggaggagtaccagagccgctacagaagtgaccccaacctggcccgctaccctgtgaagccccagccctatgaggagcagatgagaattcatgctgaggtgtcccgggcccggcatgagcggcggcacagtgatgtgtccctggccaatgctgacctggaggacagccgcatctccatgctgaggatggaccggcccagccggcagaggagcatcagcgagcggcgggccgccatggagaaccagaggagctacagcatggagaggacccgggaggcccagggccccagcagctatgcccagaggaccaccaaccacagcccccccaccccaagaagaagccccctgcccatcgacagaccagacctgcggaggacagacagcctgaggaagcagcaccacctggaccccagcagcgctgtgaggaagaccaagcgggagaagatggagaccatgctgagaaatgacagcctgagcagtgaccagagcgagagcgtgcggcccccaccacccaagccccacaagagcaagaagggcggcaagatgaggcagatcagcctgagcagcagcgaggaggagctggccagcaccccagagtacaccagctgtgatgatgtggagattgaaagtgaatctgtgtctgagaagggggacagccagaagggcaagaggaagaccagcgagcaggccgtgctgagtgacagcaacaccaggtctgagcggcagaaggagatgatgtactttggaggccacagcctggaggaggacctggagtggagcgagccccagatcaaggacagcggcgtggacacctgcagcagcaccaccctgaatgaggagcacagccacagcgacaagcaccctgtgacctggcagcccagcaaggatggagacaggctcatcggccgcatcctgctgaacaagaggctgaaggatggctctgtgccccgggacagcggggccatgctgggcctgaaggtggtgggcggcaagatgacagagagcggccgcctgtgtgccttcatcaccaaggtgaagaagggcagcctggccgacacagtgggccacctgcggcctggagatgaggtgctggagtggaatggccgcctgctgcagggcgccacctttgaggaggtgtacaacatcatcctggagagcaagccagagccccaggtggagctggtggtgtcccggcccatcggggacatcccccgcatcccagacagcacccacgcccagctggagagcagcagcagcagctttgagagccagaagatggaccggcccagcatctctgtgaccagccccatgagccctggcatgctgagagatgtgccccagttcctgagcggccagctgagcatcaagctgtggtttgacaaggtgggccaccagctgattgtgaccatcctgggcgccaaggacctgcccagcagagaagatggccggcccaggaacccctacgtgaagatctacttcctgcctgacagaagtgacaagaacaagaggaggaccaagacagtgaagaagaccctggagcccaagtggaaccagaccttcatctacagccctgtgcaccggcgggagttccgggagaggatgctggagatcaccctgtgggaccaggcccgggtgcgggaggaggagagcgagttcctgggggagatcctgattgagctggagacagccctgctggatgatgagccccactggtacaagctgcagacccatgatgtgagcagcctgcccctgccccaccccagcccctacatgccccggcggcagctgcacggggagagccccacccggcggctgcagaggagcaagaggatcagtgacagcgaggtgtctgactatgactgtgatgatggcatcggcgtggtgtctgactacagacatgatggccgggacctgcagagcagcaccctgtctgtgcctgagcaggtgatgagcagcaaccactgcagccccagcggcagcccccaccgggtggatgtgattggccgcaccaggtcctggagccccagcgtgcccccaccccagagcagaaatgtggagcagggcctgcggggcaccaggaccatgacaggccactacaacaccatcagcaggatggacagacaccgggtgatggatgaccactacagcccagaccgggaccgggactgtgaggccgctgaccggcagccctaccacaggagccgcagcacagagcagaggcccctgctggagaggaccaccaccaggagccgcagcacagagaggccagacaccaacctgatgaggtccatgcccagcctgatgacaggccgcagcgccccacccagccctgccctgagccgcagccaccccaggactggatctgtgcagaccagccccagcagcacccctgtggccggccggcggggccggcagctgccccagctgccccccaagggcaccctggacaggaaggccggcggcaagaagctgcggagcacagtgcagaggagcacagaaacaggcctggccgtggagatgaggaactggatgacccggcaggccagccgggagagcacagatggctccatgaacagctacagcagcgagggcaacctgatcttccctggggtgcggctggccagtgacagccagttcagtgacttcctggatggcctgggccctgcccagctggtgggccggcagaccctggccaccccagccatgggagacatccaggtgggcatgatggacaagaagggccagctggaggtggagatcatccgggcccggggcctggtggtgaagccaggcagcaagaccctgcctgccccctacgtgaaggtgtacctgctggacaacggggtgtgcatcgccaagaagaagaccaaggtggccaggaagaccctggagcccctgtaccagcagctgctgagctttgaggagagcccccagggcaaggtgctgcagatcatcgtgtggggagactatggccgcatggaccacaagagcttcatgggcgtggcccagatcctgctggatgagctggagctgagcaacatggtgattggctggttcaagctgttcccccccagcagcctggtggaccccaccctggcccccctgacccggcgggccagccagagcagcctggagagcagcacaggccccagctacagccgctcctag

SEQ ID NO: 102883 - DNA, 3567 bp, Artificial Sequence
  derived and/or modified sequence
atgcagttcgagaccctgcggcaggtgtgcaacagcgtgctgagccacttccacggcgtattctcatccccccccaacattctgcaaaacgaactgttcgggcaaaccctcaacaacgctcggaaacgctcaccgtccgtctcacgcgaccagaaccgcagatatgaccagagggaagagagagaggagtatagtcagtatgccacaagcgacaccgccatgcccagaagtccatccgattacgccgatcgcagaagccagcacgagccccagttttatgaggactctgatcacctcagctatcgtgatagcaaccgcagaagccatagacactctaaagagtatattgtcgacgatgaagacgtggagtctcgcgatgagtatgagcgccaacgcagggaagaggaataccagtcgcgataccgtagcgacccaaatcttgccagatacccggttaaaccacaaccatacgaagagcaaatgcgcatccacgccgaagtttcacgggcccgacacgagaggcgccacagcgacgtgtcactggcgaacgcggatttggaagactcccggatatccatgctgaggatggacaggcccagcaggcagcgaagtatcagtgagaggcgggccgccatggaaaaccaacgatcttactccatggaacgcacgcgggaggcacaggggccctcatcttacgctcagcgaacaaccaatcactcacctcccaccccaagacgaagcccactgcccatcgatagacctgaccttagacgtacagattcattgcggaagcagcaccacttggaccccagctcagcagtgagaaagaccaagcgggagaagatggagacgatgctgcgcaacgattctctgtccagcgaccagagtgagagcgtgcggcctcccccgccgaaaccacacaaatcgaaaaagggcggcaaaatgcgccaaatctctctctcctcctccgaggaggagttggcttccacccctgagtatacgagctgcgatgatgtcgagattgagtccgaatctgtgagtgaaaagggggatagccagaagggtaaaaggaagaccagcgagcaggccgtgttatcagacagcaacaccaggtctgaacgccagaaagagatgatgtatttcggcggccatagtctggaggaagacctggagtggtccgagccgcagattaaagactctggcgtcgatacatgctccagcacaacactgaatgaggagcactcccactctgataagcacccggtgacatggcagcccagtaaggacggcgaccggttgataggcaggatactgttaaataagagactcaaagatggttccgtgccccgggattctggcgccatgcttgggcttaaggtggtaggtggcaaaatgaccgagtctggaaggctgtgcgccttcatcactaaggtcaagaaggggtccctagctgacacggtgggccatttgaggcccggcgatgaagtgctggaatggaacgggcggctcctgcagggagcaacctttgaagaggtctacaacattatacttgagtccaaaccagaaccccaggtcgagctggtcgttagtcgcccaatcggtgacataccaaggatcccagactccacgcacgcacagctcgagtcttcttcctccagcttcgaatcccagaaaatggaccgcccatcaataagcgtgacctctccgatgtcccccgggatgctgcgtgacgtcccccagttcctgagcggacagctcagcatcaagctatggtttgacaaagtgggccatcaactcatcgttaccatactgggcgcgaaggacttgccgtcacgggaggatggccgacccagaaatccttatgttaaaatctacttcttaccggaccgcagcgacaaaaataaaaggagaaccaaaaccgtcaagaaaactttggagcctaagtggaatcagacctttatctatagtcctgttcaccggagagagttccgagagagaatgctcgaaatcacactgtgggaccaagcgagagtgcgtgaagaggaatctgaattcctgggcgaaattttgattgaactagagacggccctcctggatgacgagccgcactggtataaactgcagactcacgatgtgagttccctaccattacctcacccctccccgtacatgccacgtagacagctacacggggagtcccctactagaagattacagaggtcaaaacgcatctccgactctgaagtatctgactatgactgcgacgatgggattggagtagtgagtgactatagacacgatggccgcgatctacaatccagcactctgagcgtcccagagcaggtaatgtcctccaaccattgtagcccttcgggtagtccacatcgagtggatgtcatagggagaacacgcagttggtcccctagtgtgcctcctccgcaatcccgcaatgtcgagcagggcctgcgtgggacgaggacaatgaccggacattataatacaattagccgaatggaccggcatcgcgttatggatgatcattatagccccgaccgtgatagggattgtgaggccgctgacagacaaccctatcacaggtcaagatctacggagcaaaggccactcctggagaggaccacaacacggagtcgttccacagaacggcccgacaccaatctaatgcggtcaatgccttccctaatgaccggtcggtctgcgccaccctctcctgctctgtcccggtctcatcctcgtacaggatccgtgcagactagccctagcagcactccagtagccgggagacgcgggcggcagcttcctcagttaccacctaagggtaccctcgaccgtaaagccggcggaaagaagctgcgaagcacggtgcagagatccactgaaactggtttggccgttgaaatgcggaactggatgaccagacaagcttctcgcgagagcaccgacgggagtatgaatagctactccagcgaaggtaatctgatttttcctggggtgcggctcgcttcagactcgcaattctcagacttcttggacggactcggccccgctcagttggtggggcgccagacactggctacgcctgccatgggcgacatacaggtaggaatgatggacaagaagggacagctggaagttgaaattattcgggcccgtggactggtggttaaacctggatcaaagacactccctgccccatacgttaaagtgtacttgctagacaacggcgtatgcatcgctaagaagaagaccaaggtagcacggaagactctggaacccctctatcaacaattgctgagttttgaagagtcaccgcagggtaaagtgctgcagattatagtgtggggagattatggaaggatggaccataagtcgttcatgggcgtagcccagattctgcttgatgagttggagctgagcaatatggtcatcggatggtttaagctgtttcccccatccagtttggtggacccgacactggctcctctgacccggcgcgcttcccaatcgtctctggaaagctccaccggtccaagctattcccggtcatag

SEQ ID NO: 102884 - DNA, 3567 bp, Artificial Sequence
  derived and/or modified sequence
atgcagtttgaaacactccgtcaggtgtgcaacagtgtcctgagccactttcatggcgtattctcttcccctccaaacatcctgcaaaatgagctctttggccagacactcaacaatgctaggaagcgttcaccctctgtttcaagggaccaaaaccgcaggtatgaccagcgggaggagcgtgaggaatactcacagtacgccacaagtgacactgccatgcccagaagcccctcagattatgctgaccggcgatcccagcacgaaccgcagttctacgaagactctgaccacctttcctaccgcgatagtaaccgaagaagtcatagacactcaaaagaatatattgttgatgatgaggacgtggagagccgagatgaatatgagcgtcaaaggcgcgaggaggaataccaatcgcggtatcgtagcgaccctaacctggccaggtatccagtgaaaccacaaccatatgaagagcagatgaggatacacgccgaggtgtctcgggcacggcacgaacgccgtcactccgatgtctctctcgctaacgctgatttagaggactccaggataagtatgctaaggatggataggcctagccggcagcgtagcatttctgagcgccgagccgctatggagaaccagagatcctactctatggagagaacacgggaagctcaggggccttccagctatgcccagcgtaccaccaaccactccccccctaccccaagacgctctccattgccgattgaccggccagatcttagaaggacggactcactcagaaaacagcatcacctagaccctagctctgccgttcgtaagacaaaacgcgagaaaatggaaacgatgctgcgaaacgactccctgagtagcgaccagtccgagagtgttaggcccccaccacccaagcctcacaagtcaaagaagggaggcaagatgagacagatctcattgagctccagcgaggaagagcttgcttcgacacctgagtacacgtcatgtgatgacgtcgaaatcgaaagcgaatcggtgtcagagaaaggcgactctcaaaaaggcaaacgtaaaaccagtgagcaagcagtgctctctgattcaaatacacgcagtgagcggcagaaagaaatgatgtacttcggcggacactctcttgaggaagatttggaatggtccgaaccccagataaaagatagcggagtggatacatgcagttccaccaccctgaacgaagaacacagtcactcagacaaacaccctgtaacctggcagccatctaaagatggcgataggcttatcggcagaatattgctgaacaaaagactgaaggatgggtccgtgccccgtgatagtggcgctatgctgggccttaaagtcgtcgggggaaagatgaccgagagcgggcgtttgtgcgcctttatcaccaaggtaaagaaggggagcctcgctgacaccgtaggacatctgcgccctggtgacgaagtcctcgaatggaacggcaggctactccaaggtgctaccttcgaggaagtgtataacatcattctagagtccaagcccgaaccacaggtggagttggtcgtgagtagacctatcggtgatatcccaagaatccctgactcaacacatgctcagctggagtcatcctctagctcatttgagtcgcagaaaatggacaggccctcaatttccgtgacatcaccaatgagtcccggaatgttacgggatgtgcctcagtttctcagcgggcaactgagcatcaaactttggttcgacaaagttgggcatcagctcattgtgaccatccttggcgcaaaggacctcccttcaagagaggacgggaggccaagaaatccgtacgtcaagatctattttctaccagaccgaagtgacaagaataaacgcagaaccaagactgtcaaaaagacactggaacccaagtggaaccagacattcatatattcgccagtgcaccgcagagagttcagagagcgcatgctggaaatcactctgtgggaccaagcacgcgttcgggaggaagagagtgagttcttgggagagattctcattgaactggaaacagctctgttggacgatgaacctcactggtacaagctgcaaacacatgatgtttcttcacttccgctgccacatccatccccctacatgcctagaagacagttgcacggagagtcccccactcgacgcctccaacggtccaaaagaatttccgacagtgaagtttccgactacgattgtgacgatggcataggcgtcgtgagcgactatcgacacgacggaagggatcttcagagctccactttgagcgtgcctgagcaggttatgagcagtaatcattgttctccttccggcagccctcaccgggtcgacgtgatcggccgtacacgctcttggagtccaagtgtgccccctcctcagtcccggaatgtggagcagggtcttagaggcactcggacgatgaccgggcactacaacacaatttccaggatggaccggcacagagtcatggatgaccactactccccagatagggaccgcgattgtgaggccgcagatcgtcagccctaccacaggtccagatcgacagaacagcgccctcttctggagcgcaccaccaccaggtctagatcaacagagagaccggatacaaatctgatgaggagcatgccatcactcatgacgggtagaagcgcccctccaagtcccgcattatctcggtcacacccccgaacaggttctgttcagacctcaccctcatccacacccgtcgccggtagacgtggaaggcagcttccacagctgccaccaaagggcacccttgaccggaaagctggcggaaaaaagttacgcagcactgtgcagcgcagtacagaaaccggattggcggtcgaaatgagaaattggatgacccggcaggcctctcgcgagtccactgatgggagtatgaacagctatagctccgaaggaaatttaattttccctggtgtgaggctggctagcgacagccaattttctgacttcctagacgggctgggtccagcccagctggtgggtaggcagacgctggcaacacctgccatgggagatattcaagtgggcatgatggacaaaaagggacagctggaagtggagatcattagagccagaggcctggtggtgaaacctggctctaagacattacccgctccttatgtgaaagtctatcttttggacaacggtgtgtgcatcgccaaaaaaaagactaaggttgctcggaagaccctcgagccgctgtaccagcagctgctgtcttttgaagaatcaccgcagggtaaagtattgcaaattatagtttggggtgactacggccgaatggaccataagtcttttatgggtgtggctcagattctcctggacgagttagagttgtcgaacatggtgattggctggtttaagctgttccccccatccagtcttgtcgaccctacccttgccccattaaccaggagggcctctcagtcttcacttgaaagcagtacagggccatcctacagtaggtcatag

SEQ ID NO: 102885 - DNA, 3854 bp, Artificial Sequence
  derived and/or modified sequence
agaattcttgctacagtcaggagaaagccgaaagctgcacgggtactgaatcttctacgactgaattagaagaataatgactgtacaattaactatcaacctctgttcatttaagcacagtttttacagagctcaggagaaatatggaacttgattggcgtgtttttatttgatggtgtcagcaaatagatgattttaaagacaggtggtagggaaaaataagagaaggggaaaaaaaaagaaagaaaatgcaatttgagacattgcgccaggtctgcaattctgttttatctcattttcatggggttttttcatccccaccaaatatcttacaaaatgagctttttggacaaacactgaacaatgcaaggaaaagaagcccatctgtgtccagagatcagaatagaagatacgaccaaagggaagaaagagaggaatattcacagtatgctacttcggataccgcaatgcctagatctccatcagattatgctgataggcgatctcaacatgaacctcagttttatgaagactctgatcatttaagttatagggactccaacaggagaagtcataggcattccaaagaatatattgtagatgatgaggatgtggaaagcagagatgaatacgaaaggcaaaggagagaggaagagtaccagtcacgctaccgaagtgatccgaatttggcccgttatccagtaaagccacaaccctatgaagaacaaatgcggatccatgctgaagtgtcccgagcacggcatgagagaaggcatagtgatgtttctttggcaaatgctgatctggaagattccaggatttctatgctaaggatggatcgaccatcaaggcaaagatctatatcagaacgtagagctgccatggaaaatcagcgatcttattcaatggaaagaactcgagaggctcagggaccaagttcttatgcacaaaggaccacaaaccatagtcctcctacccccaggaggagtccactacccatagatagaccagacttgaggcgtactgactcactacggaaacagcaccacttagatcctagctctgctgtaagaaaaacaaaacgggaaaaaatggaaacaatgttaaggaatgattctctcagttcagaccagtcagagtcagtgagacctccaccaccaaagcctcataaatcaaagaaaggcggtaaaatgcgccagatttcgttgagcagttcagaggaggaattggcttccacgcctgaatatacaagttgtgatgatgttgagattgaaagtgagagtgtaagtgaaaaaggggacagtcaaaagggaaaaagaaaaactagtgagcaggcagttttgtcggactctaacaccaggtctgagagacaaaaggaaatgatgtactttggtggccactctttggaagaggatttggaatggtctgaacctcagattaaggactctggggtagatacgtgtagtagcacaacccttaacgaggagcatagccatagtgataagcaccctgtaacctggcaaccatctaaagatggagatcgtttaattggtcgcattttattaaataagcgtctaaaagatggaagtgtacctcgagattcaggagcaatgcttggcttgaaggttgtaggaggaaagatgactgaatcaggtcggctttgtgcatttattactaaagtaaaaaaaggaagtttagctgatactgtaggacatcttagaccaggtgatgaagtattagaatggaatggaagactactgcaaggagccacatttgaggaagtgtacaacatcattctagaatccaaacctgaaccacaagtagaacttgtagtttcaaggcctattggagatataccgcgaatacctgatagcacacatgcacaactggagtccagttctagctcctttgaatctcaaaaaatggatcgtccttctatttctgttacctctcccatgagtcctggaatgttgagggatgtcccacagttcttatcaggacaactttcaataaaactatggtttgacaaggttggtcaccaattaatagttacaattttgggagcaaaagatctcccttccagggaagatgggaggccaaggaatccttatgttaaaatttactttcttccagacagaagtgataaaaacaagagaagaactaaaacagtaaagaaaacattggaacccaaatggaaccaaacattcatttattctccagtccaccgaagagaatttcgggaacgaatgctagagattaccctttgggatcaagctcgtgttcgagaggaagaaagtgaattcttaggcgagattttaattgaattagaaacagcattattagatgatgagccacattggtacaaacttcagacgcatgatgtctcttcattgccacttccccacccttctccatatatgccacgaagacagctccatggagagagcccaacacggaggttgcaaaggtcaaagagaataagtgatagtgaagtctctgactatgactgtgatgatggaattggtgtagtatcagattatcgacatgatggtcgagatcttcaaagctcaacattatcagtgccagaacaagtaatgtcatcaaaccactgttcaccatcagggtctcctcatcgagtagatgttataggaaggactagatcatggtcacccagtgtccctcctccacaaagtcggaatgtggaacaggggcttcgagggacccgcactatgaccggacattataatacaattagccgaatggacagacatcgtgtcatggatgaccattattctccagatagagacagggattgtgaagcagcagatagacagccatatcacagatccagatcaacagaacaacggcctctccttgagcggaccaccacccgctccagatccactgaacgtcctgatacaaacctcatgaggtcgatgccttcattaatgactggaagatctgcccctccttcacctgccttatcgaggtctcatcctcgtactgggtctgtccagacaagcccatcaagtactccagtcgcaggacgaaggggccgacagcttccacagcttccaccaaagggaacgttggatagaaaagcaggaggtaaaaaactaaggagcactgtccaaagaagtacagaaacaggcctggccgtggaaatgaggaactggatgactcgacaggcaagccgagagtctacagatggtagcatgaacagctacagctcagaaggaaatctgattttccctggtgttcgcttggcctctgatagccagttcagtgatttcctggatggccttggccctgctcagctagtgggacgccagactctggcaacacctgcaatgggtgacattcaggtaggaatgatggacaaaaagggacagctggaggtagaaatcatccgggcccgtggccttgttgtaaaaccaggttccaagacactgccagcaccgtatgtaaaagtgtatctattagataacggagtctgcatagccaaaaagaaaacaaaagtggcaagaaaaacgctggaacccctttaccagcagctattatctttcgaagagagtccacaaggaaaagttttacagatcatcgtctggggagattatggccgcatggatcacaaatcttttatgggagtggcccagatacttttagatgaactagagctatccaatatggtgatcggatggttcaaacttttcccaccttcctccctagtagatccaaccttggcccctctgacaagaagagcttcccaatcatctctggaaagttcaactggaccttcttactctcgttcatagcagctgtaaaaaaattgttgtcacagcaaccagcgttac

SEQ ID NO: 102886 - DNA, 3567 bp, Artificial Sequence
  derived and/or modified sequence
atgcagttcgagaccctgagacaggtgtgcaacagcgtgctgagccacttccacggcgtgttcagcagcccccccaacatcctgcagaacgagctgttcggccagaccctgaacaacgccagaaagagaagccccagcgtgagcagagaccagaacagaagatacgaccagagagaggagagagaggagtacagccagtacgccaccagcgacaccgccatgcccagaagccccagcgactacgccgacagaagaagccagcacgagccccagttctacgaggacagcgaccacctgagctacagagacagcaacagaagaagccacagacacagcaaggagtacatcgtggacgacgaggacgtggagagcagagacgagtacgagagacagagaagagaggaggagtaccagagcagatacagaagcgaccccaacctggccagataccccgtgaagccccagccctacgaggagcagatgagaatccacgccgaggtgagcagagccagacacgagagaagacacagcgacgtgagcctggccaacgccgacctggaggacagcagaatcagcatgctgagaatggacagacccagcagacagagaagcatcagcgagagaagagccgccatggagaaccagagaagctacagcatggagagaaccagagaggcccagggccccagcagctacgcccagagaaccaccaaccacagcccccccacccccagaagaagccccctgcccatcgacagacccgacctgagaagaaccgacagcctgagaaagcagcaccacctggaccccagcagcgccgtgagaaagaccaagagagagaagatggagaccatgctgagaaacgacagcctgagcagcgaccagagcgagagcgtgagaccccccccccccaagccccacaagagcaagaagggcggcaagatgagacagatcagcctgagcagcagcgaggaggagctggccagcacccccgagtacaccagctgcgacgacgtggagatcgagagcgagagcgtgagcgagaagggcgacagccagaagggcaagagaaagaccagcgagcaggccgtgctgagcgacagcaacaccagaagcgagagacagaaggagatgatgtacttcggcggccacagcctggaggaggacctggagtggagcgagccccagatcaaggacagcggcgtggacacctgcagcagcaccaccctgaacgaggagcacagccacagcgacaagcaccccgtgacctggcagcccagcaaggacggcgacagactgatcggcagaatcctgctgaacaagagactgaaggacggcagcgtgcccagagacagcggcgccatgctgggcctgaaggtggtgggcggcaagatgaccgagagcggcagactgtgcgccttcatcaccaaggtgaagaagggcagcctggccgacaccgtgggccacctgagacccggcgacgaggtgctggagtggaacggcagactgctgcagggcgccaccttcgaggaggtgtacaacatcatcctggagagcaagcccgagccccaggtggagctggtggtgagcagacccatcggcgacatccccagaatccccgacagcacccacgcccagctggagagcagcagcagcagcttcgagagccagaagatggacagacccagcatcagcgtgaccagccccatgagccccggcatgctgagagacgtgccccagttcctgagcggccagctgagcatcaagctgtggttcgacaaggtgggccaccagctgatcgtgaccatcctgggcgccaaggacctgcccagcagagaggacggcagacccagaaacccctacgtgaagatctacttcctgcccgacagaagcgacaagaacaagagaagaaccaagaccgtgaagaagaccctggagcccaagtggaaccagaccttcatctacagccccgtgcacagaagagagttcagagagagaatgctggagatcaccctgtgggaccaggccagagtgagagaggaggagagcgagttcctgggcgagatcctgatcgagctggagaccgccctgctggacgacgagccccactggtacaagctgcagacccacgacgtgagcagcctgcccctgccccaccccagcccctacatgcccagaagacagctgcacggcgagagccccaccagaagactgcagagaagcaagagaatcagcgacagcgaggtgagcgactacgactgcgacgacggcatcggcgtggtgagcgactacagacacgacggcagagacctgcagagcagcaccctgagcgtgcccgagcaggtgatgagcagcaaccactgcagccccagcggcagcccccacagagtggacgtgatcggcagaaccagaagctggagccccagcgtgccccccccccagagcagaaacgtggagcagggcctgagaggcaccagaaccatgaccggccactacaacaccatcagcagaatggacagacacagagtgatggacgaccactacagccccgacagagacagagactgcgaggccgccgacagacagccctaccacagaagcagaagcaccgagcagagacccctgctggagagaaccaccaccagaagcagaagcaccgagagacccgacaccaacctgatgagaagcatgcccagcctgatgaccggcagaagcgccccccccagccccgccctgagcagaagccaccccagaaccggcagcgtgcagaccagccccagcagcacccccgtggccggcagaagaggcagacagctgccccagctgccccccaagggcaccctggacagaaaggccggcggcaagaagctgagaagcaccgtgcagagaagcaccgagaccggcctggccgtggagatgagaaactggatgaccagacaggccagcagagagagcaccgacggcagcatgaacagctacagcagcgagggcaacctgatcttccccggcgtgagactggccagcgacagccagttcagcgacttcctggacggcctgggccccgcccagctggtgggcagacagaccctggccacccccgccatgggcgacatccaggtgggcatgatggacaagaagggccagctggaggtggagatcatcagagccagaggcctggtggtgaagcccggcagcaagaccctgcccgccccctacgtgaaggtgtacctgctggacaacggcgtgtgcatcgccaagaagaagaccaaggtggccagaaagaccctggagcccctgtaccagcagctgctgagcttcgaggagagcccccagggcaaggtgctgcagatcatcgtgtggggcgactacggcagaatggaccacaagagcttcatgggcgtggcccagatcctgctggacgagctggagctgagcaacatggtgatcggctggttcaagctgttcccccccagcagcctggtggaccccaccctggcccccctgaccagaagagccagccagagcagcctggagagcagcaccggccccagctacagcagaagctag

SEQ ID NO: 102887 - protein, 285 aa, Artificial Sequence
  derived and/or modified sequence
MGRQGLGGASAAGRSMQRSQSRSSLSASFEALAGYFPCMNSLEEEEGEAGGKKLRSTVQRSTETGLAVEMRNWMTRQASRESTDGSMNSYSSEGNLIFPGVRLASDSQFSDFLDGLGPAQLVGRQTLATPAMGDIQVGMMDKKGQLEVEIIRARGLVVKPGSKTLPAPYVKVYLLDNGVCIAKKKTKVARKTLEPLYQQLLSFEESPQGKVLQIIVWGDYGRMDHKSFMGVAQILLDELELSNMVIGWFKLFPPSSLVDPTLAPLTRRASQSSLESSTGPSYSRS

SEQ ID NO: 102888 - DNA, 858 bp, Artificial Sequence
  derived and/or modified sequence
atgggacgccagggtctcggcggggcgtcagccgcaggtaggagcatgcagcgttcccagtccaggagttcactgtcagccagttttgaagctcttgcaggctattttccatgcatgaacagccttgaagaagaggagggagaagcagggggaaagaaactccgaagcaccgtgcagaggtccactgaaactgggctggctgtcgaaatgaggaactggatgacccgccaggcatcacgtgagtcaaccgatggtagcatgaactcttattctagtgaggggaatctcatttttccaggtgtacgattagctagcgactcccagttctctgattttctagatggtctcggcccagctcaactggtgggccgccagaccctggcaacacctgccatgggggatatccaagtggggatgatggataagaagggacagctagaggtggagatcatacgtgctaggggactcgttgtcaaaccaggcagtaagacattaccagcgccctacgtgaaagtctatcttctggacaatggtgtttgcatcgcgaagaaaaagactaaggtggctaggaaaacattggaacccctctaccagcagttactttcctttgaagaatcaccacagggtaaggttctgcagattatagtgtggggagactatggacggatggaccacaaaagctttatgggcgtcgcacagattctcctggacgaactggaactctccaatatggtgatcggctggttcaaactgttcccaccttcgtcactcgtagatcctactcttgcgcctctgacgcgccgggcctctcagagcagccttgagtccagcacagggccgtcctacagtcgctcatag

SEQ ID NO: 102889 - DNA, 858 bp, Artificial Sequence
  derived and/or modified sequence
atgggccggcagggcctgggcggggccagcgctgctggccgctccatgcagaggagccagagccgcagcagcctgagcgccagctttgaggccctggccggctacttcccctgcatgaacagcctggaggaggaggagggggaggccggcggcaagaagctgcggagcacagtgcagaggagcacagagaccggcctggccgtggagatgaggaactggatgacccggcaggccagccgggagagcacagatggctccatgaacagctacagcagcgagggcaacctgatcttccctggggtgcggctggccagtgacagccagttcagtgacttcctggatggcctgggccctgcccagctggtgggccggcagaccctggccaccccagccatgggagacatccaggtgggcatgatggacaagaagggccagctggaggtggagatcatccgggcccggggcctggtggtgaagccaggcagcaagaccctgcctgccccctacgtgaaggtgtacctgctggacaatggagtgtgcatcgccaagaagaagaccaaggtggccaggaagaccctggagcccctgtaccagcagctgctgagctttgaggagagcccccagggcaaggtgctgcagatcatcgtgtggggagactatggccgcatggaccacaagagcttcatgggcgtggcccagatcctgctggatgagctggagctgagcaacatggtgattggctggttcaagctgtttcctcccagcagcctggtggaccccaccctggcccccctgacccggcgggccagccagagcagcctggagagcagcacaggccccagctacagccgctcctag

SEQ ID NO: 102890 - DNA, 858 bp, Artificial Sequence
  derived and/or modified sequence
atgggccggcagggcctgggcggcgccagcgccgccggccggagcatgcaaaggtcccagtcaagatcttccctgagtgcttccttcgaggccttggcaggctattttccctgtatgaactcattagaagaagaagaaggtgaggcaggtgggaagaagttaaggtcaaccgttcaacgctccaccgagacaggtctggctgttgagatgcggaactggatgacccggcaggccagcagagagtctacagatggctctatgaacagttacagtagcgaaggtaacctgattttccctggcgtgcgacttgcgtcagattcccagtttagtgacttcctggatggactggggcccgcacagctagtgggccgccagactttggccacgcccgccatgggagatatacaagtgggaatgatggataagaaaggccaactcgaggtggagatcatacgcgctaggggactcgtggtgaaacctggcagtaagaccttacccgccccttatgtaaaggtctatttactggataatggagtttgcatagccaagaagaagacaaaagtagcgcgcaaaacactggagccactataccagcaactcctgtcctttgaagagagccctcagggcaaagtacttcagatcatagtgtggggagactacggtcgaatggatcataagtccttcatgggcgtggcccagatccttcttgacgagctagagctctcaaacatggttataggttggttcaagctgttccctcccagtagcctggtggacccaacgctcgcccccctgactagacgcgcctcgcagagctcactggagagttctactggtcctagctacagtcgcagctag

SEQ ID NO: 102891 - DNA, 858 bp, Artificial Sequence
  derived and/or modified sequence
atggggcgacaggggctgggtggagccagtgctgctggcaggtcgatgcagaggtcacagtcaaggtccagcctaagtgccagcttcgaggcactggctggatactttccttgcatgaactcattggaggaagaagagggggaagctggcggtaagaagctgagatccaccgtgcagaggtccaccgaaactggcctggcagtggagatgagaaattggatgacccgccaagcctcccgtgaatctactgacggctccatgaattcctacagcagtgaaggcaacctgatattccctggtgtgcgactggcgtcagatagccagttctctgacttccttgacggactgggacccgcacagcttgtaggccgacagactcttgctactcctgctatgggcgatattcaggtggggatgatggacaagaagggccagcttgaggtggaaatcatcagggcccgaggccttgtggttaaacctggaagtaaaaccctgcccgctccctacgtgaaggtctacctgctcgataacggcgtgtgcattgcaaagaaaaaaaccaaagtggctagaaagacactggaacccttataccagcagctcctatcattcgaagaaagcccccaggggaaagtgttgcagatcattgtttggggggattatggaagaatggatcacaagtcgttcatgggggtggctcagattcttctcgacgagttggaacttagcaacatggtgatcggctggttcaaactattcccccctagctcccttgtcgaccctacactggcccctctcacaagaagagcttcacagtcctccctcgagtccagtaccggcccatcttatagccggagctag

SEQ ID NO: 102892 - DNA, 897 bp, Artificial Sequence
  derived and/or modified sequence
atgggccggcagggcttggggggtgccagcgctgcggggcgctccatgcagcgctcccagagccggagtagcctgtctgcctccttcgaggcactggccggctactttccctgcatgaactccctggaggaggaagaaggagaagcaggaggtaaaaaactaaggagcactgtccaaagaagtacagaaacaggcctggccgtggaaatgaggaactggatgactcgacaggcaagccgagagtctacagatggtagcatgaacagctacagctcagaaggaaatctgattttccctggtgttcgcttggcctctgatagccagttcagtgatttcctggatggccttggccctgctcagctagtgggacgccagactctggcaacacctgcaatgggtgacattcaggtaggaatgatggacaaaaagggacagctggaggtagaaatcatccgggcccgtggccttgttgtaaaaccaggttccaagacactgccagcaccgtatgtaaaagtgtatctattagataacggagtctgcatagccaaaaagaaaacaaaagtggcaagaaaaacgctggaacccctttaccagcagctattatctttcgaagagagtccacaaggaaaagttttacagatcatcgtctggggagattatggccgcatggatcacaaatcttttatgggagtggcccagatacttttagatgaactagagctatccaatatggtgatcggatggttcaaacttttcccaccttcctccctagtagatccaaccttggcccctctgacaagaagagcttcccaatcatctctggaaagttcaactggaccttcttactctcgttcatagcagctgtaaaaaaattgttgtcacagcaaccagcgttac

SEQ ID NO: 102893 - DNA, 858 bp, Artificial Sequence
  derived and/or modified sequence
atgggcagacagggcctgggcggcgccagcgccgccggcagaagcatgcagagaagccagagcagaagcagcctgagcgccagcttcgaggccctggccggctacttcccctgcatgaacagcctggaggaggaggagggcgaggccggcggcaagaagctgagaagcaccgtgcagagaagcaccgagaccggcctggccgtggagatgagaaactggatgaccagacaggccagcagagagagcaccgacggcagcatgaacagctacagcagcgagggcaacctgatcttccccggcgtgagactggccagcgacagccagttcagcgacttcctggacggcctgggccccgcccagctggtgggcagacagaccctggccacccccgccatgggcgacatccaggtgggcatgatggacaagaagggccagctggaggtggagatcatcagagccagaggcctggtggtgaagcccggcagcaagaccctgcccgccccctacgtgaaggtgtacctgctggacaacggcgtgtgcatcgccaagaagaagaccaaggtggccagaaagaccctggagcccctgtaccagcagctgctgagcttcgaggagagcccccagggcaaggtgctgcagatcatcgtgtggggcgactacggcagaatggaccacaagagcttcatgggcgtggcccagatcctgctggacgagctggagctgagcaacatggtgatcggctggttcaagctgttcccccccagcagcctggtggaccccaccctggcccccctgaccagaagagccagccagagcagcctggagagcagcaccggccccagctacagcagaagctag

SEQ ID NO: 102894 - protein, 460 aa, Artificial Sequence
  derived and/or modified sequence
MSSMPKPERHAESLLDICHDTNSSPTDLMTVTKNQNIILQSISRSEEFDQDGDCSHSTLVNEEEDPSGGRQDWQPRTEGVEITVTFPRDVSPPQEMSQEDLKEKNLINSSLQEWAQAHAVSHPNEIETVELRKKKLTMRPLVLQKEESSRELCNVNLGFLLPRSCLELNISKSVTREDAPHFLKEQQRKSEEFSTSHMKYSGRSIKVYCGLTSQGQLIAVKQVALDTSNKLAAEKEYRKLQEEVDLLKALKHVNIVAYLGTCLQENTVSIFMEFVPGGSISSIINRFGPLPEMVFCKYTKQILQGVAYLHENCVVHRDIKGNNVMLMPTGIIKLIDFGCARRLAWAGLNGTHSDMLKSMHGTPYWMAPEVINESGYGRKSDIWSIGCTVFEMATGKPPLASMDRMAAMFYIGAHRGLMPPLPDHFSENAADFVRMCLTRDQHERPSALQLLKHSFLERSH

SEQ ID NO: 102895 - DNA, 507 bp, Artificial Sequence
  derived and/or modified sequence
atggagttcgtgcccggcggcagcatcagcagcatcatcaacagattcggccccctgcccgagatggtgttctgcaagtacaccaagcagatcctgcagggcgtggcctacctgcacgagaactgcgtggtgcacagagacatcaagggcaacaacgtgatgctgatgcccaccggcatcatcaagctgatcgacttcggctgcgccagaagactggcctgggccggcctgaacggcacccacagcgacatgctgaagagcatgcacggcaccccctactggatggcccccgaggtgatcaacgagagcggctacggcagaaagagcgacatctggagcatcggctgcaccgtgttcgagatggccaccggcaagccccccctggccagcatggacagaatggccgccatgttctacatcggcgcccacagaggcctgatgccccccctgcccgaccacttcagcgagaacgccgccgacttcgtgagaatgtgcctgaccagatag

SEQ ID NO: 102896 - DNA, 1383 bp, Artificial Sequence
  derived and/or modified sequence
atgagcagcatgcccaagcccgagagacacgccgagagcctgctggacatctgccacgacaccaacagcagccccaccgacctgatgaccgtgaccaagaaccagaacatcatcctgcagagcatcagcagaagcgaggagttcgaccaggacggcgactgcagccacagcaccctggtgaacgaggaggaggaccccagcggcggcagacaggactggcagcccagaaccgagggcgtggagatcaccgtgaccttccccagagacgtgagccccccccaggagatgagccaggaggacctgaaggagaagaacctgatcaacagcagcctgcaggagtgggcccaggcccacgccgtgagccaccccaacgagatcgagaccgtggagctgagaaagaagaagctgaccatgagacccctggtgctgcagaaggaggagagcagcagagagctgtgcaacgtgaacctgggcttcctgctgcccagaagctgcctggagctgaacatcagcaagagcgtgaccagagaggacgccccccacttcctgaaggagcagcagagaaagagcgaggagttcagcaccagccacatgaagtacagcggcagaagcatcaaggtgtactgcggcctgaccagccagggccagctgatcgccgtgaagcaggtggccctggacaccagcaacaagctggccgccgagaaggagtacagaaagctgcaggaggaggtggacctgctgaaggccctgaagcacgtgaacatcgtggcctacctgggcacctgcctgcaggagaacaccgtgagcatcttcatggagttcgtgcccggcggcagcatcagcagcatcatcaacagattcggccccctgcccgagatggtgttctgcaagtacaccaagcagatcctgcagggcgtggcctacctgcacgagaactgcgtggtgcacagagacatcaagggcaacaacgtgatgctgatgcccaccggcatcatcaagctgatcgacttcggctgcgccagaagactggcctgggccggcctgaacggcacccacagcgacatgctgaagagcatgcacggcaccccctactggatggcccccgaggtgatcaacgagagcggctacggcagaaagagcgacatctggagcatcggctgcaccgtgttcgagatggccaccggcaagccccccctggccagcatggacagaatggccgccatgttctacatcggcgcccacagaggcctgatgccccccctgcccgaccacttcagcgagaacgccgccgacttcgtgagaatgtgcctgaccagagaccagcacgagagacccagcgccctgcagctgctgaagcacagcttcctggagagaagccactag

SEQ ID NO: 102897 - DNA, 507 bp, Artificial Sequence
  derived and/or modified sequence
atggaattcgtgccaggaggtagtatctcatcaatcataaatcgcttcgggccgctccccgaaatggtgttttgcaagtatactaagcagatcctgcaaggggtggcttacctgcacgagaactgtgtggtccaccgagacatcaaaggaaacaatgtgatgctcatgcccacagggattatcaaactgattgattttggctgcgcaaggaggttggcttgggcggggctgaacggaacacattcagatatgttgaagtccatgcatgggactccatactggatggccccagaggtcatcaacgaatccgggtacggccgaaagtccgatatctggagcatcggttgcactgtctttgagatggctacaggaaagcctccgcttgcatcaatggaccggatggctgccatgttctacatcggagctcatcgggggctgatgccccccctgccagaccattttagtgagaatgccgccgatttcgtgcggatgtgtctcactcggtag

SEQ ID NO: 102898 - DNA, 1383 bp, Artificial Sequence
  derived and/or modified sequence
atgtcttctatgcctaaacccgagaggcacgccgagagcctacttgatatttgccatgacacaaattccagccccactgacctgatgactgtcaccaaaaatcagaatattattctgcagagtatctctcgcagcgaagagtttgaccaggatggcgactgttcccacagcacgttagttaacgaagaagaggatccgtcaggcggtcgccaggactggcagcccaggactgagggcgtggaaataactgttacatttccaagggacgtctctcctccccaggaaatgtcacaagaggatctgaaggaaaagaacctcatcaacagtagcctgcaggaatgggcacaggcccacgcggtgagtcatccaaatgagatagaaaccgtggagctgcgtaaaaagaaactcacgatgcggccactcgtcttgcagaaagaagaaagtagtcgcgagctttgcaacgtgaacctaggcttcctcctgccgcgatcctgcctggagctgaatatctcgaagtccgtaacccgggaggatgcgccccacttcttaaaagagcagcaacggaagagcgaggaatttagcacctctcacatgaagtattccggccgttctatcaaggtgtactgtgggctaacctcccaggggcaacttatcgccgtgaagcaggtggccctggatacgtccaacaaattggccgcagagaaagaatatcgaaagctgcaggaggaggtggatctgttgaaagccctcaagcatgtgaacatcgtggcctatctgggtacttgtctgcaggagaatactgtgtctatattcatggagttcgttcctggcggctcgatttccagcattataaatcgattcggccccctgcctgaaatggttttctgcaaatacacaaagcagattctacaaggcgtggcttacctgcacgaaaactgtgtggtgcaccgcgatataaagggtaacaatgtgatgctcatgccgacggggatcatcaaactcatcgactttggttgcgcacgcagacttgcatgggctggactcaatgggacgcactccgatatgctcaaaagtatgcacggcacaccatactggatggctccagaggttatcaacgagagtggctatggtcgtaagtccgacatctggagtattggctgtaccgtgttcgaaatggccaccggcaagccaccgttggctagcatggacaggatggcggctatgttctatattggcgcccatcggggtctgatgccgccattgcccgaccactttagcgaaaacgccgcagacttcgtaaggatgtgtctgacacgtgaccaacatgaacgccccagcgccttgcagttgctgaaacactccttcctggagcggagtcactag

SEQ ID NO: 102899 - DNA, 507 bp, Artificial Sequence
  derived and/or modified sequence
atggagtttgtgcctgggggcagcatcagcagcatcatcaaccgcttcggccccctgcctgagatggtgttctgcaagtacaccaagcagatcctgcagggcgtggcctacctgcacgagaactgtgtggtgcaccgggacatcaagggcaacaacgtgatgctgatgcccaccggcatcatcaagctgattgactttggctgtgcccggcggctggcctgggccggcctgaatggcacccacagcgacatgctgaagtccatgcacggcaccccctactggatggcccctgaggtgatcaatgaaagtggctacggcaggaagagtgacatctggagcatcggctgcaccgtgtttgagatggccaccgggaagccacccctggcctccatggacaggatggccgccatgttctacatcggggcccaccggggcctgatgccacccctgcctgaccacttctctgaaaatgctgctgactttgtgaggatgtgcctgaccaggtag

SEQ ID NO: 102900 - DNA, 1383 bp, Artificial Sequence
  derived and/or modified sequence
atgagctccatgcccaagccagagagacatgctgagagcctgctggacatctgccacgacaccaacagcagccccacagacctgatgacagtgaccaagaaccagaacatcatcctgcagagcatcagccgctctgaggagtttgaccaggatggagactgcagccacagcaccctggtgaatgaggaggaggaccccagcggcggccggcaggactggcagcccaggacagaaggagtggagatcaccgtgaccttccccagagatgtgagccccccccaggagatgagccaggaggacctgaaggagaagaacctgatcaacagcagcctgcaggagtgggcccaggcccatgctgtgagccaccccaatgaaattgagaccgtggagctgaggaagaagaagctgaccatgaggcccctggtgctgcagaaggaggagagcagccgggagctgtgcaatgtgaacctgggcttcctgctgcccaggagctgcctggagctgaacatcagcaagtctgtgaccagagaagatgccccccacttcctgaaggagcagcagaggaagtctgaggagttcagcaccagccacatgaagtacagcggccgcagcatcaaggtgtactgcggcctgaccagccagggccagctgattgctgtgaagcaggtggccctggacaccagcaacaagctggccgctgagaaggagtacaggaagctgcaggaggaggtggacctgctgaaggccctgaagcacgtgaacatcgtggcctacctgggcacctgcctgcaggagaacacagtgtccatcttcatggagtttgtgcctgggggcagcatcagcagcatcatcaacagatttggccccctgcctgagatggtgttctgcaagtacaccaagcagatcctgcagggcgtggcctacctgcacgagaactgtgtggtgcaccgggacatcaagggcaacaacgtgatgctgatgcccaccggcatcatcaagctgattgactttggctgtgcccggcggctggcctgggccggcctgaatggcacccacagcgacatgctgaagtccatgcacggcaccccctactggatggcccctgaggtgatcaatgaaagtggctacggcaggaagagtgacatctggagcatcggctgcaccgtgtttgagatggccaccgggaagccacccctggcctccatggacaggatggccgccatgttctacatcggggcccaccggggcctgatgccacccctgcctgaccacttctctgaaaatgctgctgactttgtgaggatgtgcctgacccgggaccagcacgagcggcccagcgccctgcagctgctgaagcacagcttcctggagaggagccactag

SEQ ID NO: 102901 - DNA, 507 bp, Artificial Sequence
  derived and/or modified sequence
atggagttcgtgcccggcggcagcatcagcagcatcatcaaccggtttggacctctccctgagatggtgttttgtaaatatactaagcagatactgcagggcgtagcgtacctgcacgagaactgtgtggtccatagagacatcaaaggcaataacgtgatgctgatgcccaccggcataatcaagcttattgacttcggttgcgctaggcgactcgcctgggccggcctaaatggcactcacagtgacatgctaaagagcatgcacgggacaccgtactggatggctccggaagtaattaatgagtccggttacggaagaaaatctgacatctggtcaatcggctgcacagtgtttgagatggctaccggcaagccacctctcgcaagtatggacaggatggcggccatgttttacatcggggctcacagggggctgatgcccccactccccgatcacttctccgaaaatgcagcagattttgtgaggatgtgcctaacccgctag

SEQ ID NO: 102902 - DNA, 1383 bp, Artificial Sequence
  derived and/or modified sequence
atgagcagcatgcccaagcccgagcggcacgccgagagcctgctggacatatgccacgatactaacagtagccccacagatctgatgaccgtgacaaaaaaccagaacattatcctgcagtcaatttcacgaagtgaggaattcgaccaggatggtgactgtagccacagtacactggttaacgaagaggaggatccatctggaggacgtcaagattggcagcctagaaccgagggcgtggagatcacggttaccttccctcgggatgtgagccctccccaagagatgtctcaggaggacctaaaagagaaaaacctgataaattcctcattgcaagaatgggcccaagcacatgccgtgtcccatcctaacgaaatcgagaccgtggagctccgcaaaaaaaagttgaccatgaggcctttggtgttgcagaaggaggagagctcgcgcgagttgtgtaacgtgaatcttggattcctgctgcctcgtagctgcctggaactgaacatctctaagtccgtgacgcgcgaagacgccccacatttcctcaaggagcaacagagaaaaagtgaagaatttagcaccagtcacatgaagtactctggccgttctatcaaggtgtattgtggcctaacaagccaggggcagctaattgctgtgaagcaagttgccctggatacatcaaataaactggcagccgaaaaggagtaccgcaaactgcaggaagaagtagacctgttgaaagcactgaagcatgtcaatattgtcgcttatctgggcacgtgcctacaggaaaacacagtcagcatcttcatggaatttgtgcctgggggctctatttcttcaattattaaccgatttgggccactgcccgagatggtcttttgcaagtacacgaaacagatactgcagggagtggcttacttgcacgagaactgcgtcgttcatcgcgatattaagggcaataatgtgatgcttatgcccacaggaattatcaagctaatcgatttcggctgtgcccgccgcttggcctgggcaggcctgaacggtacccacagcgatatgctgaaaagcatgcacggtacgccgtactggatggcgcccgaggtgatcaacgaatctggctacggccgtaaaagtgatatctggtctatcggctgcactgttttcgaaatggccactgggaaacctccacttgcaagcatggatcgcatggctgccatgttctatattggcgcgcaccgcggcttgatgcctccgcttccggaccactttagtgagaacgccgccgacttcgtgagaatgtgtctcactcgcgatcagcacgaaagaccatcagccctgcagctgttaaaacatagctttctggagaggagtcactag

SEQ ID NO: 102903 - DNA, 507 bp, Artificial Sequence
  derived and/or modified sequence
atggaatttgtgccaggcggtagtatctcgagtattattaaccgcttcggcccactgcctgaaatggtcttttgtaaatacacaaaacagatacttcagggagttgcttacctgcacgaaaactgcgtcgtacatagagatataaagggtaataatgtgatgctgatgcctacagggattatcaaactgatagactttgggtgcgcgcgaagattggcctgggcagggcttaatggaacacattctgatatgctgaaatccatgcacggcactccctattggatggcgcctgaagtaatcaacgagtctggatatggtcggaagagcgacatttggagcattggctgcaccgtgttcgagatggctacgggtaagccacccctggcttccatggacagaatggcagccatgttttatattggggctcaccggggactgatgccaccactgcccgatcactttagtgagaacgcagcggacttcgtgagaatgtgtctgactaggtag

SEQ ID NO: 102904 - DNA, 1383 bp, Artificial Sequence
  derived and/or modified sequence
atgagctccatgcctaaacccgagcggcatgctgagagccttctggacatctgccacgataccaactcctctccaactgatctcatgacggttacaaagaaccagaatatcatcttgcagagcatctcacgctctgaggagtttgaccaggatggagactgctcccactccaccctggtgaacgaggaggaagatcccagtggtggccgacaggattggcagcctagaactgaaggcgtggagatcactgtgactttcccacgggatgtgagccctccccaggaaatgagccaggaagacctaaaggagaaaaatctgatcaactctagcctgcaggaatgggcacaggcgcacgccgtgtcacacccaaacgaaatcgagacagtggagctgagaaaaaaaaagttgacaatgcgcccactagtgctccagaaggaggaatctagccgggagctttgcaacgtgaacctggggtttctgcttccgaggtcttgcctggagttaaacatatccaagtcagtgacacgtgaggatgctccccatttcttgaaggagcagcagagaaagtcagaggagttttctacttctcacatgaaatactccggccgatctattaaggtctactgcggactgacgagtcagggccagctgatcgccgttaagcaggtcgccctggacacctctaataagctggcagcggaaaaagagtacaggaagctgcaagaggaggtggatcttctgaaagcattgaagcacgtgaatattgtggcttacctgggtacctgtctccaagaaaatacggtgtctatctttatggaattcgtccctggtggctctattagtagtatcatcaacaggttcgggccacttccagagatggtgttctgcaagtatactaagcagatcctccaaggtgtggcatacctgcacgagaattgtgtcgtgcatagagatattaaaggtaataacgtgatgttgatgcctacgggcatcatcaaactgattgattttggatgtgcaaggcgcctggcatgggccggtttgaacgggacccacagcgacatgctcaaatccatgcacggcactccatactggatggcccctgaagtcatcaatgaaagcggctatggacgcaagagcgacatctggagcatcggatgtactgtgtttgaaatggcaacaggtaaacctcccctcgcatccatggataggatggcagctatgttctacattggggctcatcgcggtcttatgcctcccctgcctgaccactttagcgaaaatgcagctgacttcgtccggatgtgcctgacacgtgatcagcacgagaggccttcagcacttcagttgctgaagcatagttttctggaacgaagccactag

SEQ ID NO: 102905 - DNA, 1453 bp, Artificial Sequence
  derived and/or modified sequence
tcaaagaaacagcagcttttggacattttaatgagttctatgccaaaaccagaaagacatgctgagtcattgcttgacatttgtcatgatacaaactcttctccaactgatttgatgacagttaccaaaaatcaaaacatcatcttgcaaagcatcagcagaagtgaggagttcgaccaagatggtgactgcagtcattccacactggttaatgaagaagaagatcccagtggtggtagacaggactggcaacccaggacagaaggtgttgagatcactgtaacttttccaagagatgtcagtcctccccaagaaatgagccaagaagacttaaaagaaaagaatctgataaactcatcgcttcaagaatgggcacaagcacatgcagtttctcatccaaatgaaatagaaacggtggagctcaggaaaaagaagctgaccatgcggcccttagttttgcaaaaagaggaaagttccagggagctctgcaatgtgaacttgggctttttgctaccaagatcttgtttagaactgaacatttccaagtctgtaaccagagaagatgctcctcattttctgaaggagcagcaaagaaaatctgaagagttttcgacctctcatatgaagtacagtggccgaagcatcaaggtatactgtggtctcactagtcaaggacagctaatagctgtaaaacaggtggctttggatacctctaataaattagctgctgaaaaggaataccggaaactacaggaagaagtagatttgctcaaagcactgaaacatgtcaacattgtggcctatttggggacatgcttgcaagagaacactgtgagcattttcatggagtttgttcctggtggctcaatctctagtattataaaccgttttgggccattgcctgagatggtgttctgtaaatatacgaaacaaatacttcaaggtgttgcttatctccatgagaactgtgtggtacatcgcgatatcaaaggaaataatgttatgctcatgccaactggaataataaagctgattgactttggctgtgccaggcgtttggcctgggcaggtttaaatggcacccacagtgacatgcttaagtccatgcatgggactccatattggatggccccagaagtcatcaatgagtctggctatggacggaaatcagatatctggagcattggttgtactgtgtttgagatggctacagggaagcctccactggcttccatggacaggatggccgccatgttttacatcggagcacaccgagggctgatgcctcctttaccagaccacttctcagaaaatgcagcagactttgtgcgcatgtgcctgaccagggaccagcatgagcgaccttctgctctccagctcctgaagcactccttcttggagagaagtcactgaatatacatcaagactttcttcccagttccactgcagatgc

SEQ ID NO: 102906 - DNA, 1200 bp, Artificial Sequence
  derived and/or modified sequence
atgttcgtgttcgtgctgacccccctgatcgagccccacgtgcccctgagacccgccaacaccatcaccaaggtgcccagcgagaagatcctgagagccggcaagatcctgagaaacgccatcctgagcagagccccccacatgatcagagacagaaagtaccacctgaagacctacagacagtgctgcgtgggcaccgagctggtggactggatgatgcagcagaccccctgcgtgcacagcagaacccaggccgtgggcatgtggcaggtgctgctggaggacggcgtgctgaaccacgtggaccaggagcaccacttccaggacaagtacctgttctacagattcctggacgacgagcacgaggacgcccccctgcccaccgaggaggagaagaaggagtgcgacgaggagctgcaggacaccatgctgctgctgagccagatgggccccgacgcccacatgagaatgatcctgagaaagccccccggccagagaaccgtggacgacctggagatcatctacgaggagctgctgcacatcaaggccctgagccacctgagcaccaccgtgaagagagagctggccggcgtgctgatcttcgagagccacgccaagggcggcaccgtgctgttcaaccagggcgaggagggcaccagctggtacatcatcctgaagggcagcgtgaacgtggtgatctacggcaagggcgtggtgtgcaccctgcacgagggcgacgacttcggcaagctggccctggtgaacgacgcccccagagccgccagcatcgtgctgagagaggacaactgccacttcctgagagtggacaaggaggacttcaacagaatcctgagagacgtggaggccaacaccgtgagactgaaggagcacgaccaggacgtgctggtgctggagaaggtgcccgccggcaacagagccagcaaccagggcaacagccagccccagcagaagtacaccgtgatgagcggcacccccgagaagatcctggagcacttcctggagaccatcagactggaggccaccctgaacgaggccaccgacagcgtgctgaacgacttcatcatgatgcactgcgtgttcatgcccaacacccagctgtgccccgccctggtggcccactaccacgcccagcccagcagatacagaaccggcgagaacggcctgtgcccccagcagtag

SEQ ID NO: 102907 - DNA, 1200 bp, Artificial Sequence
  derived and/or modified sequence
atgttcgtgtttgtcctgaccccactgattgaaccccacgtcccactccgccctgccaacactattacgaaggtgccaagtgaaaagatactgagagccggcaaaattttgcgtaacgctatcctgagtcgcgctccccacatgatcagggataggaagtatcatctgaaaacttatcgtcagtgttgcgtaggcactgagcttgtggattggatgatgcaacagactccctgtgtgcactcacggacacaggcagtcgggatgtggcaagtcctgctggaggatggcgtgctcaaccatgtagaccaggaacaccatttccaggataaatatctgttctataggttcctcgatgacgaacacgaggacgcaccgctgcccaccgaagaagagaagaaagagtgcgacgaggaactgcaagatactatgctgttgctttcacagatgggacccgatgctcatatgagaatgatactccgcaaacccccaggccaaagaacagtggatgatctggagatcatatacgaggaattgctccatatcaaagcgctgagccatctctccacaacagttaagagggagctcgcaggtgttctcatattcgagtctcacgccaagggaggtacggtgttatttaatcagggagaggagggcactagctggtacatcattctgaaaggatctgtaaatgtggtgatctacggaaagggcgtcgtctgcacactgcatgagggggatgattttggtaagctggcactggtgaacgacgcccccagggcggcttctatcgtcttgcgggaagataactgccatttcttgcgggtcgacaaggaggactttaacaggattcttagagacgttgaggccaataccgtaagactgaaggagcacgaccaagacgttttggtgctggagaaggttcccgccgggaacagggctagtaaccagggaaacagtcagccgcagcagaagtatactgtcatgagtggaacaccagaaaaaatcctggaacactttcttgaaacgatccgactggaggcaacactaaacgaagccacggatagtgtgctaaatgactttatcatgatgcactgcgtatttatgccaaatacgcagctgtgtcctgctttggtcgcccactaccacgcgcagccaagccgctacagaactggcgagaacggactgtgtccacagcagtag

SEQ ID NO: 102908 - DNA, 1200 bp, Artificial Sequence
  derived and/or modified sequence
atgtttgtgtttgtgctgacccccctcatcgagccccacgtgcccctgcggcctgccaacaccatcaccaaggtgcccagcgagaagatcctgcgggccggcaagatcctgagaaatgccatcctgagccgggccccccacatgatccgggacaggaagtaccacctgaagacctaccggcagtgctgcgtgggcacagagctggtggactggatgatgcagcagaccccctgtgtgcacagcaggacccaggccgtgggcatgtggcaggtgctgctggaggatggagtgctgaaccacgtggaccaggagcaccacttccaggacaagtacctgttctaccgcttcctggatgatgaacatgaagatgcccccctgcccacagaggaggagaagaaggaatgtgatgaggagctgcaggacaccatgctgctgctgagccagatgggcccagatgcccacatgaggatgatcctgaggaagcccccaggccagaggacagtggatgacctggagatcatctatgaggagctgctgcacatcaaggccctgagccacctgagcaccaccgtgaagcgggagctggccggcgtgctgatctttgagagccacgccaagggcggcaccgtgctcttcaaccagggcgaggagggcacctcctggtacatcatcctgaagggctctgtgaatgtggtgatctacggcaagggcgtggtgtgcaccctgcatgaaggagatgactttgggaagctggccctggtgaatgatgccccccgggccgccagcatcgtgctgcgggaggacaactgccacttcctgcgggtggacaaggaggacttcaaccgcatcctgagagatgtggaggccaacacagtgcggctgaaggagcatgaccaggatgtgctggtgctggagaaggtgcctgctggcaacagagccagcaaccagggcaacagccagccccagcagaagtacacagtgatgagcggcaccccagagaagatcctggagcacttcctggagaccatccggctggaggccaccctgaatgaggccacagattctgtgctgaatgacttcatcatgatgcactgtgtgttcatgcccaacacccagctgtgcccagccctggtggcccactaccacgcccagcccagccgctacagaactggagaaaatggcctgtgcccccagcagtag

SEQ ID NO: 102909 - DNA, 1200 bp, Artificial Sequence
  derived and/or modified sequence
atgttcgtgttcgtgctgacccccctgatcgagccccacgtgcccttgaggcccgctaacaccatcaccaaggtgccgagcgagaagattctccgggcaggcaaaattctgcgcaacgccatcctgtcccgcgctccacacatgatcagagacaggaagtaccacctcaagacctatagacagtgttgcgtggggaccgagttggtggactggatgatgcagcaaacaccctgcgtgcactctcggacccaagccgtcgggatgtggcaggtcctgctggaagatggagtgctcaatcatgtggaccaggagcaccactttcaggacaaatatttattctataggtttctggatgacgaacatgaggatgcgccccttcccacagaggaggaaaagaaggaatgtgacgaagagctccaggacactatgctactgctgagccagatgggtcctgacgcacacatgcgcatgatcctccgtaaacctccagggcagcgaacagttgatgaccttgaaataatatatgaagagctacttcacatcaaggccctgtcacatttgtctactacggtcaagcgggagctcgctggcgtactcatcttcgagagccacgccaagggcgggaccgtgctgtttaatcaaggagaggaaggcacgtcttggtatatcatcctgaaggggagcgtgaacgtggtcatctacgggaaaggggttgtgtgtaccttacatgaaggggatgatttcggtaaactggccctcgtgaacgatgcaccacgggctgcgagcattgttctgagagaagataattgtcatttcctccgcgtggacaaggaagacttcaaccgaatcctcagggatgtggaggccaacacagtgaggctgaaagaacacgaccaggatgtgctcgtgctcgagaaagttcctgccggaaaccgagcctccaatcagggtaactcacagccacagcaaaaatacacagtaatgtcagggacaccagaaaagatccttgagcattttttggagactatacgcttggaggcgactctgaatgaggccaccgactctgtcctaaatgacttcatcatgatgcattgtgtgtttatgcccaacactcagctttgtcctgctttagtagcccactaccatgcccagccaagcaggtaccgcaccggagaaaacggcctgtgcccacagcagtag

SEQ ID NO: 102910 - DNA, 1200 bp, Artificial Sequence
  derived and/or modified sequence
atgtttgtttttgtgctgacaccgctaatcgaaccccatgtccccctaaggcccgctaacactatcaccaaggtcccctctgaaaagattctccgcgcaggaaagattctacgcaatgccatattgagtcgggctccgcacatgatcagggaccgcaaatatcacctgaagacctacagacaatgttgtgtggggaccgagcttgttgactggatgatgcagcagaccccttgcgtacatagccgcacacaggcagtcgggatgtggcaggtgcttctcgaagatggggtcctgaaccacgtcgatcaagagcatcatttccaggataaatacttattctaccgatttctggacgacgagcacgaggatgctcctcttcccacagaggaggagaaaaaagaatgcgacgaagaactgcaagatacaatgctattactgtcacagatggggcctgacgcccacatgcggatgattctacggaagccgcctggccagaggaccgtggacgatttagagataatctatgaggagctcctgcatataaaagctctgagtcacctgagtaccaccgtgaaacgggagcttgcaggggtcctgatcttcgaaagtcatgcaaaggggggaactgtcctcttcaaccaaggtgaggagggcacctcttggtacatcatcctcaagggcagcgttaacgtggtgatctacggtaagggggtggtgtgtaccttgcacgaaggggacgattttggcaaactggccctggtgaatgacgccccacgcgcagcgtcaatcgtcctccgagaagacaattgtcactttctgagggttgataaggaagatttcaacaggatcttacgggatgtggaggctaacactgtgagactgaaggaacatgaccaggatgttctggttctcgagaaggtaccagcaggaaacagagcgtccaaccagggaaatagccagccgcaacagaaatacaccgtaatgtccggtaccccagagaagattctagagcactttcttgagaccattagactcgaggcaactctgaatgaggcaactgactccgtgctcaacgatttcatcatgatgcattgcgtatttatgcctaacacccagttatgcccagctttggtggcccactaccatgctcagccttcaaggtatcgaactggcgagaatggcttgtgcccacagcagtag

SEQ ID NO: 102911 - DNA, 1370 bp, Artificial Sequence
  derived and/or modified sequence
aataccgtgacttcatgttgaaggtgccaagaacaacttcagctctccagtctctgaggaaatgtttgtttttgtacttacacctctcattgaacctcacgttcctcttcgtcctgctaacaccattaccaaggtcccttcagagaagatcctcagagctggaaaaattttacgaaatgccattctctctcgagcacctcacatgataagagatagaaaataccacctaaagacatacagacaatgctgtgtgggaactgaactggtggactggatgatgcagcagacaccatgtgttcactcccggactcaagctgttggcatgtggcaagtcctgttagaagatggtgttctcaaccacgtggaccaggagcaccatttccaagacaaatatttattctatcgatttctggatgatgagcacgaggatgcccctttgcctactgaggaggagaagaaggagtgtgatgaggagctccaggacaccatgctgctgctgtcacagatgggccccgacgcccacatgaggatgatccttcgcaaaccacctggccagaggactgtggatgacctagagattatctatgaggagcttcttcatattaaagccttatcccatctttctaccacagtgaaacgagagttagcaggtgttctcatttttgagtctcacgccaaaggagggactgtgttgtttaaccagggggaagaaggtacctcctggtacattattctaaaaggatcagtgaatgtagtcatttacggcaagggtgtggtctgcaccctgcatgaaggagatgacttcggcaagttagcactagtgaatgatgccccacgagctgcctctatcgtcttacgagaagataactgccatttcttaagagtagacaaggaggatttcaaccggatcctaagggacgtggaggcgaatacagtcagacttaaagaacatgaccaagatgtcttggtgctggagaaggtcccagcagggaacagagcttctaatcaaggaaactcacagcctcagcaaaagtatactgtgatgtcaggaacacctgaaaaaattttagagcattttctagaaacaatacgccttgaggcaactttaaatgaagcaacagattctgttttaaatgactttattatgatgcactgtgtttttatgccaaatacccagctttgcccggcactggtggcccactaccacgcacagccttcaaggtacagaacaggagaaaatggattatgccctcaacaataagaggcgagtcatccgcctggttctacagtgggctgccatgtatggagacctcctgcaagaggatgacgtgtctatggccttcctggaggagttttatgtatctgtatca

SEQ ID NO: 102912 - protein, 791 aa, Artificial Sequence
  derived and/or modified sequence
MIRDRKYHLKTYRQCCVGTELVDWMMQQTPCVHSRTQAVGMWQVLLEDGVLNHVDQEHHFQDKYLFYRFLDDEHEDAPLPTEEEKKECDEELQDTMLLLSQMGPDAHMRMILRKPPGQRTVDDLEIIYEELLHIKALSHLSTTVKRELAGVLIFESHAKGGTVLFNQGEEGTSWYIILKGSVNVVIYGKGVVCTLHEGDDFGKLALVNDAPRAASIVLREDNCHFLRVDKEDFNRILRDVEANTVRLKEHDQDVLVLEKVPAGNRASNQGNSQPQQKYTVMSGTPEKILEHFLETIRLEATLNEATDSVLNDFIMMHCVFMPNTQLCPALVAHYHAQPSQGTEQEKMDYALNNKRRVIRLVLQWAAMYGDLLQEDDVSMAFLEEFYVSVSDDARMIAALKEQLPELEKIVKQISEDAKAPQKKHKVLLQQFNTGDERAQKRQPIRGSDEVLFKVYCMDHTYTTIRVPVATSVKEVISAVADKLGSGEGLIIVKMSSGGEKVVLKPNDVSVFTTLTINGRLFACPREQFDSLTPLPEQEGPTVGTVGTFELMSSKDLAYQMTIYDWELFNCVHELELIYHTFGRHNFKKTTANLDLFLRRFNEIQFWVVTEICLCSQLSKRVQLLKKFIKIAAHCKEYKNLNSFFAIVMGLSNVAVSRLALTWEKLPSKFKKFYAEFESLMDPSRNHRAYRLTVAKLEPPLIPFMPLLIKDMTFTHEGNKTFIDNLVNFEKMRMIANTARTVRYYRSQPFNPDAAQANKNHQDVRSYVRQLNVIDNQRTLSQMSHRLEPRRP

SEQ ID NO: 102913 - protein, 840 aa, Artificial Sequence
  derived and/or modified sequence
MAGLLAPPYGVMETGSNNDRIPDKENVPSEKILRAGKILRNAILSRAPHMIRDRKYHLKTYRQCCVGTELVDWMMQQTPCVHSRTQAVGMWQVLLEDGVLNHVDQEHHFQDKYLFYRFLDDEHEDAPLPTEEEKKECDEELQDTMLLLSQMGPDAHMRMILRKPPGQRTVDDLEIIYEELLHIKALSHLSTTVKRELAGVLIFESHAKGGTVLFNQGEEGTSWYIILKGSVNVVIYGKGVVCTLHEGDDFGKLALVNDAPRAASIVLREDNCHFLRVDKEDFNRILRDVEANTVRLKEHDQDVLVLEKVPAGNRASNQGNSQPQQKYTVMSGTPEKILEHFLETIRLEATLNEATDSVLNDFIMMHCVFMPNTQLCPALVAHYHAQPSQGTEQEKMDYALNNKRRVIRLVLQWAAMYGDLLQEDDVSMAFLEEFYVSVSDDARMIAALKEQLPELEKIVKQISEDAKAPQKKHKVLLQQFNTGDERAQKRQPIRGSDEVLFKVYCMDHTYTTIRVPVATSVKEVISAVADKLGSGEGLIIVKMSSGGEKVVLKPNDVSVFTTLTINGRLFACPREQFDSLTPLPEQEGPTVGTVGTFELMSSKDLAYQMTIYDWELFNCVHELELIYHTFGRHNFKKTTANLDLFLRRFNEIQFWVVTEICLCSQLSKRVQLLKKFIKIAAHCKEYKNLNSFFAIVMGLSNVAVSRLALTWEKLPSKFKKFYAEFESLMDPSRNHRAYRLTVAKLEPPLIPFMPLLIKDMTFTHEGNKTFIDNLVNFEKMRMIANTARTVRYYRSQPFNPDAAQANKNHQDVRSYVRQLNVIDNQRTLSQMSHRLEPRRP

SEQ ID NO: 102914 - DNA, 2523 bp, Artificial Sequence
  derived and/or modified sequence
atggccggcctgctggcccccccctacggcgtgatggagaccggcagcaacaacgacagaatccccgacaaggagaacgtgcccagcgagaagatcctgagagccggcaagatcctgagaaacgccatcctgagcagagccccccacatgatcagagacagaaagtaccacctgaagacctacagacagtgctgcgtgggcaccgagctggtggactggatgatgcagcagaccccctgcgtgcacagcagaacccaggccgtgggcatgtggcaggtgctgctggaggacggcgtgctgaaccacgtggaccaggagcaccacttccaggacaagtacctgttctacagattcctggacgacgagcacgaggacgcccccctgcccaccgaggaggagaagaaggagtgcgacgaggagctgcaggacaccatgctgctgctgagccagatgggccccgacgcccacatgagaatgatcctgagaaagccccccggccagagaaccgtggacgacctggagatcatctacgaggagctgctgcacatcaaggccctgagccacctgagcaccaccgtgaagagagagctggccggcgtgctgatcttcgagagccacgccaagggcggcaccgtgctgttcaaccagggcgaggagggcaccagctggtacatcatcctgaagggcagcgtgaacgtggtgatctacggcaagggcgtggtgtgcaccctgcacgagggcgacgacttcggcaagctggccctggtgaacgacgcccccagagccgccagcatcgtgctgagagaggacaactgccacttcctgagagtggacaaggaggacttcaacagaatcctgagagacgtggaggccaacaccgtgagactgaaggagcacgaccaggacgtgctggtgctggagaaggtgcccgccggcaacagagccagcaaccagggcaacagccagccccagcagaagtacaccgtgatgagcggcacccccgagaagatcctggagcacttcctggagaccatcagactggaggccaccctgaacgaggccaccgacagcgtgctgaacgacttcatcatgatgcactgcgtgttcatgcccaacacccagctgtgccccgccctggtggcccactaccacgcccagcccagccagggcaccgagcaggagaagatggactacgccctgaacaacaagagaagagtgatcagactggtgctgcagtgggccgccatgtacggcgacctgctgcaggaggacgacgtgagcatggccttcctggaggagttctacgtgagcgtgagcgacgacgccagaatgatcgccgccctgaaggagcagctgcccgagctggagaagatcgtgaagcagatcagcgaggacgccaaggccccccagaagaagcacaaggtgctgctgcagcagttcaacaccggcgacgagagagcccagaagagacagcccatcagaggcagcgacgaggtgctgttcaaggtgtactgcatggaccacacctacaccaccatcagagtgcccgtggccaccagcgtgaaggaggtgatcagcgccgtggccgacaagctgggcagcggcgagggcctgatcatcgtgaagatgagcagcggcggcgagaaggtggtgctgaagcccaacgacgtgagcgtgttcaccaccctgaccatcaacggcagactgttcgcctgccccagagagcagttcgacagcctgacccccctgcccgagcaggagggccccaccgtgggcaccgtgggcaccttcgagctgatgagcagcaaggacctggcctaccagatgaccatctacgactgggagctgttcaactgcgtgcacgagctggagctgatctaccacaccttcggcagacacaacttcaagaagaccaccgccaacctggacctgttcctgagaagattcaacgagatccagttctgggtggtgaccgagatctgcctgtgcagccagctgagcaagagagtgcagctgctgaagaagttcatcaagatcgccgcccactgcaaggagtacaagaacctgaacagcttcttcgccatcgtgatgggcctgagcaacgtggccgtgagcagactggccctgacctgggagaagctgcccagcaagttcaagaagttctacgccgagttcgagagcctgatggaccccagcagaaaccacagagcctacagactgaccgtggccaagctggagccccccctgatccccttcatgcccctgctgatcaaggacatgaccttcacccacgagggcaacaagaccttcatcgacaacctggtgaacttcgagaagatgagaatgatcgccaacaccgccagaaccgtgagatactacagaagccagcccttcaaccccgacgccgcccaggccaacaagaaccaccaggacgtgagaagctacgtgagacagctgaacgtgatcgacaaccagagaaccctgagccagatgagccacagactggagcccagaagaccctag

SEQ ID NO: 102915 - DNA, 2523 bp, Artificial Sequence
  derived and/or modified sequence
atggcagggttgctggcccccccctacggggttatggagacaggatctaataacgaccgaatacctgataaagaaaatgtgccctctgagaagattttgcgggcgggcaaaattctacggaacgccatcctctccagagcaccacacatgattagagacaggaagtatcaccttaaaacttacaggcagtgctgcgttggtaccgagctggtggattggatgatgcaacagacgccatgcgtccacagcaggacccaggcagtaggtatgtggcaggttctgctcgaggacggagttttgaaccatgtggaccaagaacaccacttccaagataaatatctgttttacagatttctggacgacgagcacgaggatgcccctttaccgacggaagaggagaagaaagagtgcgatgaggagctgcaggatacgatgcttctgttgtctcagatgggtccagacgcgcatatgagaatgattttgcgcaaacctcctggtcagcggaccgttgatgaccttgaaatcatttatgaagagcttctgcacattaaggccctgtcgcatctcagcacgactgtgaagagagagctggcaggagtgctaatcttcgagtctcacgccaaggggggaaccgtgttgtttaaccagggggaggagggaacatcttggtacattatcttgaagggatcggtaaatgtcgtgatttacggcaaaggtgtcgtctgcactctgcatgagggagatgactttggcaagcttgcattggtaaatgatgcacctagggcggcttccatagtgctgcgcgaggataactgccattttctccgggttgataaggaagactttaataggatcctaagagatgtggaagcaaacacagtgcgcctcaaagaacatgaccaggatgtgctcgtgctggaaaaagtgcctgcgggaaacagagcctccaaccagggcaattcacagcctcagcaaaagtataccgtcatgtccggaactccagagaaaattctcgaacactttctggaaactataagacttgaagccactcttaatgaagcgacagacagcgtcttaaacgacttcatcatgatgcactgcgtctttatgcctaatacacagttgtgtcccgctctcgtggcccactaccatgctcagccaagccagggaacagagcaagagaagatggactatgccctgaataataaaagaagagtaatccgactggtcctgcagtgggctgccatgtatggtgacctgctgcaggaagatgacgtgtcaatggccttcctggaagagttctatgtttccgtttccgacgacgccaggatgattgccgcgcttaaagaacagttgcccgagctcgaaaaaatagtcaaacagataagcgaagatgccaaggccccacagaagaagcataaggtactgttgcagcagtttaataccggcgatgagcgcgcccaaaagcggcagcccatcaggggatccgatgaagtgttgttcaaagtatattgcatggaccacacttacaccacgattcgggttccagtggcgactagcgtgaaggaagtgattagcgccgtcgccgacaaactgggaagcggggaaggactgataattgtgaagatgagttctggcggggaaaaggttgtgctgaaacccaatgacgtctcagtgtttaccactctaacgattaacggcaggctcttcgcgtgtccgcgggaacaattcgacagtttaacacccctgcccgaacaggagggccctactgtaggcactgtgggcacatttgagctgatgtcctccaaggacttggcttatcaaatgactatctatgattgggagctgttcaactgcgtccatgagctggagttgatctaccatacctttggacgccacaactttaagaagactacagccaacctggacctgttccttcgccgcttcaacgaaatccagttttgggtggttactgaaatctgcctgtgctcccagctttccaaacgggttcagctcttaaagaagttcatcaaaatcgccgcacattgcaaggaatacaaaaatctgaactcatttttcgccatcgtcatggggctatccaacgttgccgtgtctagactggctctgacctgggagaaactgccctccaagttcaaaaaattttatgcagagttcgagtcactaatggatccctctaggaatcaccgcgcctatcggcttaccgtcgcaaagctggagccacctctgattcccttcatgcccttattaatcaaagatatgacttttacacacgagggtaataaaacgttcattgacaatttggtgaacttcgagaagatgaggatgattgcaaacaccgcacggactgttagatattacaggtctcagccttttaatcccgacgctgctcaagcgaacaaaaatcaccaggatgtcagatcctacgtccgacagctgaacgtgattgacaatcagaggaccctgtcccagatgagtcaccgcctggaacccaggcgcccgtag

SEQ ID NO: 102916 - DNA, 2523 bp, Artificial Sequence
  derived and/or modified sequence
atggccggcctgctggccccaccctatggagtgatggagaccggcagcaacaatgaccgcatcccagacaaggaaaatgtgcccagcgagaagatcctgcgggccggcaagatcctgagaaatgccatcctgagccgggccccccacatgatccgggacaggaagtaccacctgaagacctaccggcagtgctgcgtgggcacagagctggtggactggatgatgcagcagaccccctgtgtgcacagcaggacccaggccgtgggcatgtggcaggtgctgctggaggatggagtgctgaaccacgtggaccaggagcaccacttccaggacaagtacctgttctaccgcttcctggatgatgaacatgaagatgcccccctgcccacagaggaggagaagaaggaatgtgatgaggagctgcaggacaccatgctgctgctgagccagatgggcccagatgcccacatgaggatgatcctgaggaagcccccaggccagaggacagtggatgacctggagatcatctatgaggagctgctgcacatcaaggccctgagccacctgagcaccaccgtgaagcgggagctggccggcgtgctgatctttgagagccacgccaagggcggcaccgtgctcttcaaccagggcgaggagggcacctcctggtacatcatcctgaagggctctgtgaatgtggtgatctacggcaagggcgtggtgtgcaccctgcatgaaggagatgactttgggaagctggccctggtgaatgatgccccccgggccgccagcatcgtgctgcgggaggacaactgccacttcctgcgggtggacaaggaggacttcaaccgcatcctgagagatgtggaggccaacacagtgcggctgaaggagcatgaccaggatgtgctggtgctggagaaggtgcctgctggcaacagagccagcaaccagggcaacagccagccccagcagaagtacacagtgatgagcggcaccccagagaagatcctggagcacttcctggagaccatccggctggaggccaccctgaatgaggccacagattctgtgctgaatgacttcatcatgatgcactgtgtgttcatgcccaacacccagctgtgcccagccctggtggcccactaccacgcccagcccagccagggcacagagcaggagaagatggactatgccctgaacaacaagagaagagtcatccggctggtgctgcagtgggccgccatgtatggagacctgctgcaggaggatgatgtgtccatggccttcctggaggagttctacgtgtctgtgtctgatgatgccaggatgattgctgccctgaaggagcagctgcctgagctggagaagatcgtgaagcagatcagtgaagatgccaaggccccccagaagaagcacaaggtgctgctgcagcagttcaacacaggagatgagcgggcccagaagaggcagcccatccggggcagtgatgaggtgctcttcaaggtgtactgcatggaccacacctacaccaccatccgggtgcctgtggccacctctgtgaaggaggtgatctctgctgtggccgacaagctgggcagcggggagggcctcatcatcgtgaagatgagcagtggaggagagaaggtggtgctgaagcccaatgatgtgtctgtgttcaccaccctgaccatcaatggccgcctgtttgcctgcccccgggagcagtttgacagcctgacccccctgcctgagcaggagggccccaccgtgggcaccgtgggcacctttgagctgatgagcagcaaggacctggcctaccagatgaccatctatgactgggagctgttcaactgtgtgcatgagctggagctgatctaccacaccttcggccgccacaacttcaagaagaccacagccaacctggacctcttcctgcggcgcttcaatgagatccagttctgggtggtgacagagatctgcctgtgcagccagctgagcaagagggtgcagctgctgaagaagttcatcaagattgctgcccactgcaaggagtacaagaacctgaacagcttctttgccatcgtgatgggcctgagcaatgtggccgtgtcccggctggccctgacctgggagaagctgcccagcaagttcaagaagttctatgcagagtttgagagcctgatggaccccagcaggaaccaccgggcctaccgcctgactgtggccaagctggagcccccactcatccccttcatgcccctgctgatcaaggacatgaccttcacccatgagggcaacaagaccttcatcgacaacctggtgaactttgagaagatgaggatgattgccaacacagccaggacagtgcgctactaccgcagccagcccttcaacccagatgctgcccaggccaacaagaaccaccaggatgtgcgctcctatgtgcggcagctgaatgtcatcgacaaccagaggaccctgagccagatgagccaccggctggagccccggcggccctag

SEQ ID NO: 102917 - DNA, 2523 bp, Artificial Sequence
  derived and/or modified sequence
atggccggcctgctggcccccccctacggcgtgatggagaccggctcaaacaatgacagaataccggacaaggaaaacgtcccatcagagaaaatattgagggccggaaagatcctgcgcaacgccatcctgtccagagcaccacatatgatcagagataggaagtaccacctgaagacgtacaggcagtgctgtgtcggcaccgaattagtggactggatgatgcagcagactccctgcgtccacagcaggacacaagctgtggggatgtggcaagttctgttggaagatggggtcctgaaccacgtagatcaagagcatcatttccaggataaatatctcttttatcgctttctggatgatgaacacgaagacgcgcccctgccaaccgaggaagagaagaaagagtgtgacgaagagctgcaagacacaatgctcctgctgagccagatgggcccagatgcccacatgaggatgatcctccggaagcctcccggccaaaggactgtggacgacttggaaatcatctacgaagaacttttacacattaaggccctgagtcatctgtccaccacagtcaagcgggaactggcaggggtgctcatctttgaaagccatgccaaaggcggcaccgtgttgttcaaccagggtgaggaagggacttcatggtatattattctgaaggggtcagtaaatgtggtaatatatggcaaaggcgtcgtctgcacgctgcacgagggtgacgattttggaaagttggccctagtcaacgatgcaccaagagccgcctctatcgtactccgtgaagacaattgtcatttcttgcgcgtggacaaagaggactttaaccggatcctgagagatgtagaagctaacacagtcagactgaaggagcacgaccaggatgtgctggttttggagaaggtgccagcaggcaatagagcttcaaaccagggcaatagtcagccccaacagaagtacaccgtgatgagtggtacaccagagaaaatccttgagcactttctagagacaattcgactggaagccacactgaatgaagctacggacagcgtgttgaacgatttcatcatgatgcactgtgtatttatgccaaatactcagttatgtccagcattagtggcacactatcacgctcagcctagccagggaaccgagcaggaaaagatggactacgcgttgaataataagcgcagagtaatccgcctcgtgctgcaatgggcagccatgtatggtgacctcctgcaagaagatgacgtgtctatggccttcctggaggaattttatgtgtcagtttctgatgacgcccgaatgatcgccgcattaaaagagcaactcccagagctggaaaagatagttaaacaaatttctgaagatgccaaagccccacagaagaagcataaagtgctcctgcagcagttcaatactggagatgaacgggctcagaaacgccagcccatcagaggaagcgatgaagttctgttcaaggtctactgtatggatcacacttatacaacaatccgcgtgcctgtggcaacctcagttaaagaggtaataagtgctgtggctgacaaactcgggtccggtgagggtttaattattgtgaaaatgagctctgggggcgagaaagtggtgctaaagcctaacgacgtgtctgtctttacaactttaacgattaacggccggctgttcgcatgcccccgcgagcaattcgactcactgactccgttgccagagcaggaaggccccaccgtaggaacagttggtacatttgagctcatgtcttcgaaggatctcgcttaccagatgactatttacgattgggagttgtttaattgtgttcatgaactggaacttatctaccatacctttgggcgccataatttcaaaaagactactgccaacctggatctttttttacggcgctttaacgaaattcagttctgggtcgtaacagagatctgtctgtgctctcagctgtcgaagcgcgtgcagcttttgaagaagtttattaaaatcgccgcgcattgtaaggagtataagaatttgaactcttttttcgctatagtcatgggactatcaaacgtcgccgtgagccgacttgcgctgacatgggaaaagctcccctctaaattcaaaaaattctacgcagaattcgagagcctgatggatcctagccggaatcaccgggcctacagactcaccgttgccaaactcgaacctcccctgataccttttatgccactgctgatcaaggacatgaccttcactcacgaggggaataaaacttttattgataaccttgtcaactttgagaaaatgaggatgattgctaataccgcccgcacagtcagatactatcggagtcagccttttaacccagatgctgcacaagctaataagaaccaccaggacgttcgctcctacgttcgacagcttaacgtcattgataatcagcgtacactttcccagatgtctcacaggctggagccaagaaggccatag

SEQ ID NO: 102918 - DNA, 2523 bp, Artificial Sequence
  derived and/or modified sequence
atggccggtctgctcgccccaccatatggggtgatggaaacgggttctaataacgacagaattcctgataaagagaacgtcccgagcgagaaaattctgcgcgctggaaaaattctaagaaacgccattctctcaagggccccacatatgatcagggatcggaaatatcacttaaaaacttaccggcaatgttgtgtggggacagaactagtcgattggatgatgcagcaaacaccttgcgtgcactcacggacgcaagccgtcggcatgtggcaagtactgctagaggacggcgtgttaaatcacgtcgatcaagagcatcacttccaggacaaatacctattctataggtttctggatgacgagcatgaggatgccccactaccaacagaggaggagaagaaggaatgcgacgaggagctgcaagacacgatgttattgttaagccaaatggggccagacgctcacatgcgaatgatacttaggaagccccctgggcaacggacagtggacgatctggaaattatctacgaagaactgttacacatcaaggccttgtcacacctgagtacaaccgtgaaaagggagctcgcgggagtgctgatcttcgagagccatgccaaaggcggaacagtcctttttaatcagggagaggaaggtacctcctggtatatcatcctgaaggggtccgtcaacgtggtgatctacggcaaaggcgtcgtgtgtaccttacatgaaggcgacgatttcgggaagctggcgctggtcaacgacgctccaagggctgcaagcattgttctgagagaagataactgccactttctgagggtcgataaggaggacttcaatcggatcctcagggacgtggaagctaatacagtacgcctcaaggaacatgatcaggacgtcttggttttagaaaaggtgcctgctgggaatcgagcctctaaccagggtaacagtcagccccagcagaagtacacagtgatgtcaggcaccccggaaaaaattttagagcactttctggagactatcagacttgaagccacgctgaacgaggcgacagatagcgtgttaaacgatttcataatgatgcactgtgtgtttatgcctaacacacaattgtgccctgctttggtggcccactaccacgcgcagccgtctcagggaacagaacaagaaaaaatggactacgccctgaataataaacgcagagtcatcagacttgtgctacaatgggccgctatgtatggcgacttgctgcaggaagatgatgtatccatggcctttttggaagaattctacgtatcagtttccgacgatgcacgtatgattgcagccttgaaggaacagttgccggaacttgagaagatagtgaagcagattagcgaggatgctaaagccccacagaaaaaacacaaggtattgctgcagcagttcaatactggcgatgagagggctcaaaaaaggcagcctatcagaggtagtgatgaggtcctgttcaaagtgtattgtatggaccacacatacaccaccattcgagttccagtggcgacatccgtgaaggaggtcatctctgccgtagctgataagctgggttccggcgagggattaattattgtcaagatgagctccggcggagagaaagtggtcctgaagcccaatgatgtgtctgtgtttactaccctcaccattaacggcagactgtttgcatgccctcgtgagcagtttgatagtctgaccccattacctgaacaggagggacccaccgtagggactgtgggaacctttgagttaatgtccagtaaggacctggcataccagatgaccatctatgactgggaactgttcaattgcgtccacgagctggagttaatttaccatacttttggtagacacaactttaagaagacaacggcgaacctcgacttgttcctgcgcaggtttaacgagattcaattctgggtcgtgacagaaatctgtctctgtagccagttaagtaaacgcgtgcaactgctcaaaaaattcatcaagatcgcagcacattgtaaggaatacaagaatctcaacagcttcttcgcaatagtaatgggcctgtcaaatgtggccgtgtctcgacttgctcttacgtgggaaaaattaccgtctaagttcaagaaattttatgctgagtttgagtcactcatggacccatccagaaaccaccgtgcctacagattaactgtcgcgaaattggagccccctcttattccatttatgccactgttgataaaggacatgacgttcactcacgaggggaacaaaacgtttatcgacaatctggtgaatttcgagaagatgaggatgattgcaaatacggctcgaacagtgcgttattatagatcccagccttttaatcccgacgccgctcaggcaaacaagaatcatcaggacgtcaggtcctacgttaggcagttaaatgtgatcgataaccagcgcaccctgagtcagatgagccacaggctggaacctaggagaccttag

SEQ ID NO: 102919 - DNA, 2722 bp, Artificial Sequence
  derived and/or modified sequence
attccatctgttcctcaactcttacaaaagctagccataccatctctctctctagcttctgaagtggtcccttcagagaagatcctcagagctggaaaaattttacgaaatgccattctctctcgagcacctcacatgataagagatagaaaataccacctaaagacatacagacaatgctgtgtgggaactgaactggtggactggatgatgcagcagacaccatgtgttcactcccggactcaagctgttggcatgtggcaagtcctgttagaagatggtgttctcaaccacgtggaccaggagcaccatttccaagacaaatatttattctatcgatttctggatgatgagcacgaggatgcccctttgcctactgaggaggagaagaaggagtgtgatgaggagctccaggacaccatgctgctgctgtcacagatgggccccgacgcccacatgaggatgatccttcgcaaaccacctggccagaggactgtggatgacctagagattatctatgaggagcttcttcatattaaagccttatcccatctttctaccacagtgaaacgagagttagcaggtgttctcatttttgagtctcacgccaaaggagggactgtgttgtttaaccagggggaagaaggtacctcctggtacattattctaaaaggatcagtgaatgtagtcatttacggcaagggtgtggtctgcaccctgcatgaaggagatgacttcggcaagttagcactagtgaatgatgccccacgagctgcctctatcgtcttacgagaagataactgccatttcttaagagtagacaaggaggatttcaaccggatcctaagggacgtggaggcgaatacagtcagacttaaagaacatgaccaagatgtcttggtgctggagaaggtcccagcagggaacagagcttctaatcaaggaaactcacagcctcagcaaaagtatactgtgatgtcaggaacacctgaaaaaattttagagcattttctagaaacaatacgccttgaggcaactttaaatgaagcaacagattctgttttaaatgactttattatgatgcactgtgtttttatgccaaatacccagctttgcccggcactggtggcccactaccacgcacagccttcacaaggtacagaacaggagaaaatggattatgccctcaacaataagaggcgagtcatccgcctggttctacagtgggctgccatgtatggagacctcctgcaagaggatgacgtgtctatggccttcctggaggagttttatgtatctgtatcagatgatgcccggatgattgctgccctcaaggagcaactgccagagttggagaagattgtcaagcaaatctcagaagatgcaaaggcaccacaaaagaagcacaaggttcttttgcaacagttcaatacgggcgatgagagagcccagaagcgccagcctatccgcggctctgatgaagttctgtttaaggtctattgcatggaccacacctacacaaccattcgggtgccagtggccacttcggtgaaggaagtcatcagtgcagttgccgacaagctgggctccggggagggcctgatcatagtcaagatgagttccggaggagaaaaggtggtgctcaaacctaatgatgtttcagtatttacgacgctcaccattaatggacgcctgtttgcttgcccgcgagagcaattcgattcactgactcccttaccagaacaggaaggcccaactgttggaacagtgggaacttttgaactgatgagctccaaagatttagcataccagatgacaatttatgattgggaactcttcaactgcgtgcatgagctggagctaatctatcacacatttggaaggcataattttaaaaagaccacagcaaacttggatttgttcctgaggagatttaatgaaattcagttttgggtcgtcactgagatctgcctttgttctcagctcagcaagcgtgttcagctattaaaaaaatttattaagatagcagcccactgtaaggagtataaaaatctgaattccttttttgccatcgtcatgggactaagtaacgttgctgtgagccgcttggcactaacgtgggagaaactgccaagcaagttcaagaagttctatgcggagtttgaaagtttaatggacccttcaaggaaccacagggcctacaggctgacagtagctaagctggaacctcctctcatccccttcatgcctttgctcattaaagatatgacatttactcatgaggggaacaagacgttcattgacaatctagtaaactttgaaaaaatgcgcatgattgcaaatacggccagaacagtgagatactacaggagccaacccttcaatcctgatgcagctcaagctaataagaaccatcaggatgtccggagttatgtacggcaattaaatgtgattgacaaccagagaactttatcacagatgtcacacagattagagcctcgtcgaccatagacatttcaaatgcccaaagcaacagtttgtctccagtccacaatctttcaaaaatgccatttatgctactactgactgtattgccactagagaattctacaaaacaagcaaaaacacatcctgagacacctcagggctgcattcagcttaccagctacctagcaagagaaggaattatttgacatgcctaaagcttacacactctagctta

SEQ ID NO: 102920 - protein, 1285 aa, Artificial Sequence
  derived and/or modified sequence
MQSNMVRKKNPPLRNVASEGEGQILEPIGTESKVSGKNKEFSADQMSENTDQSDAAELNHKEEHSLHVQDPSSSSKKDLKSAVLSEKAGFNYESPSKGGNFPSFPHDEVTDRNMLAFSSPAAGGVCEPLKSPQRAEADDPQDMACTPSGDSLETKEDQKMSPKATEETGQAQSGQANCQGLSPVSVASKNPQVPSDGGVRLNKSKTDLLVNDNPDPAPLSPELQDFKCNICGYGYYGNDPTDLIKHFRKYHLGLHNRTRQDAELDSKILALHNMVQFSHSKDFQKVNRSVFSGVLQDINSSRPVLLNGTYDVQVTSGGTFIGIGRKTPDCQGNTKYFRCKFCNFTYMGNSSTELEQHFLQTHPNKIKASLPSSEVAKPSEKNSNKSIPALQSSDSGDLGKWQDKITVKAGDDTPVGYSVPIKPLDSSRQNGTEATSYYWCKFCSFSCESSSSLKLLEHYGKQHGAVQSGGLNPELNDKLSRGSVINQNDLAKSSEGETMTKTDKSSSGAKKKDFSSKGAEDNMVTSYNCQFCDFRYSKSHGPDVIVVGPLLRHYQQLHNIHKCTIKHCPFCPRGLCSPEKHLGEITYPFACRKSNCSHCALLLLHLSPGAAGSSRVKHQCHQCSFTTPDVDVLLFHYESVHESQASDVKQEANHLQGSDGQQSVKESKEHSCTKCDFITQVEEEISRHYRRAHSCYKCRQCSFTAADTQSLLEHFNTVHCQEQDITTANGEEDGHAISTIKEEPKIDFRVYNLLTPDSKMGEPVSESVVKREKLEEKDGLKEKVWTESSSDDLRNVTWRGADILRGSPSYTQASLGLLTPVSGTQEQTKTLRDSPNVEAAHLARPIYGLAVETKGFLQGAPAGGEKSGALPQQYPASGENKSKDESQSLLRRRRGSGVFCANCLTTKTSLWRKNANGGYVCNACGLYQKLHSTPRPLNIIKQNNGEQIIRRRTRKRLNPEALQAEQLNKQQRGSNEEQVNGSPLERRSEDHLTESHQREIPLPSLSKYEAQGSLTKSHSAQQPVLVSQTLDIHKRMQPLHIQIKSPQESTGDPGNSSSVSEGKGSSERGSPIEKYMRPAKHPNYSPPGSPIEKYQYPLFGLPFVHNDFQSEADWLRFWSKYKLSVPGNPHYLSHVPGLPNPCQNYVPYPTFNLPPHFSAVGSDNDIPLDLAIKHSRPGPTANGASKEKTKAPPNVKNEGPLNVVKTEKVDRSTQDELSTKCVHCGIVFLDEVMYALHMSCHGDSGPFQCSICQHLCTDKYDFTTHIQRGLHRNNAQVEKNGKPKE

SEQ ID NO: 102921 - DNA, 3858 bp, Artificial Sequence
  derived and/or modified sequence
atgcagagcaacatggtgagaaagaagaacccccccctgagaaacgtggccagcgagggcgagggccagatcctggagcccatcggcaccgagagcaaggtgagcggcaagaacaaggagttcagcgccgaccagatgagcgagaacaccgaccagagcgacgccgccgagctgaaccacaaggaggagcacagcctgcacgtgcaggaccccagcagcagcagcaagaaggacctgaagagcgccgtgctgagcgagaaggccggcttcaactacgagagccccagcaagggcggcaacttccccagcttcccccacgacgaggtgaccgacagaaacatgctggccttcagcagccccgccgccggcggcgtgtgcgagcccctgaagagcccccagagagccgaggccgacgacccccaggacatggcctgcacccccagcggcgacagcctggagaccaaggaggaccagaagatgagccccaaggccaccgaggagaccggccaggcccagagcggccaggccaactgccagggcctgagccccgtgagcgtggccagcaagaacccccaggtgcccagcgacggcggcgtgagactgaacaagagcaagaccgacctgctggtgaacgacaaccccgaccccgcccccctgagccccgagctgcaggacttcaagtgcaacatctgcggctacggctactacggcaacgaccccaccgacctgatcaagcacttcagaaagtaccacctgggcctgcacaacagaaccagacaggacgccgagctggacagcaagatcctggccctgcacaacatggtgcagttcagccacagcaaggacttccagaaggtgaacagaagcgtgttcagcggcgtgctgcaggacatcaacagcagcagacccgtgctgctgaacggcacctacgacgtgcaggtgaccagcggcggcaccttcatcggcatcggcagaaagacccccgactgccagggcaacaccaagtacttcagatgcaagttctgcaacttcacctacatgggcaacagcagcaccgagctggagcagcacttcctgcagacccaccccaacaagatcaaggccagcctgcccagcagcgaggtggccaagcccagcgagaagaacagcaacaagagcatccccgccctgcagagcagcgacagcggcgacctgggcaagtggcaggacaagatcaccgtgaaggccggcgacgacacccccgtgggctacagcgtgcccatcaagcccctggacagcagcagacagaacggcaccgaggccaccagctactactggtgcaagttctgcagcttcagctgcgagagcagcagcagcctgaagctgctggagcactacggcaagcagcacggcgccgtgcagagcggcggcctgaaccccgagctgaacgacaagctgagcagaggcagcgtgatcaaccagaacgacctggccaagagcagcgagggcgagaccatgaccaagaccgacaagagcagcagcggcgccaagaagaaggacttcagcagcaagggcgccgaggacaacatggtgaccagctacaactgccagttctgcgacttcagatacagcaagagccacggccccgacgtgatcgtggtgggccccctgctgagacactaccagcagctgcacaacatccacaagtgcaccatcaagcactgccccttctgccccagaggcctgtgcagccccgagaagcacctgggcgagatcacctaccccttcgcctgcagaaagagcaactgcagccactgcgccctgctgctgctgcacctgagccccggcgccgccggcagcagcagagtgaagcaccagtgccaccagtgcagcttcaccacccccgacgtggacgtgctgctgttccactacgagagcgtgcacgagagccaggccagcgacgtgaagcaggaggccaaccacctgcagggcagcgacggccagcagagcgtgaaggagagcaaggagcacagctgcaccaagtgcgacttcatcacccaggtggaggaggagatcagcagacactacagaagagcccacagctgctacaagtgcagacagtgcagcttcaccgccgccgacacccagagcctgctggagcacttcaacaccgtgcactgccaggagcaggacatcaccaccgccaacggcgaggaggacggccacgccatcagcaccatcaaggaggagcccaagatcgacttcagagtgtacaacctgctgacccccgacagcaagatgggcgagcccgtgagcgagagcgtggtgaagagagagaagctggaggagaaggacggcctgaaggagaaggtgtggaccgagagcagcagcgacgacctgagaaacgtgacctggagaggcgccgacatcctgagaggcagccccagctacacccaggccagcctgggcctgctgacccccgtgagcggcacccaggagcagaccaagaccctgagagacagccccaacgtggaggccgcccacctggccagacccatctacggcctggccgtggagaccaagggcttcctgcagggcgcccccgccggcggcgagaagagcggcgccctgccccagcagtaccccgccagcggcgagaacaagagcaaggacgagagccagagcctgctgagaagaagaagaggcagcggcgtgttctgcgccaactgcctgaccaccaagaccagcctgtggagaaagaacgccaacggcggctacgtgtgcaacgcctgcggcctgtaccagaagctgcacagcacccccagacccctgaacatcatcaagcagaacaacggcgagcagatcatcagaagaagaaccagaaagagactgaaccccgaggccctgcaggccgagcagctgaacaagcagcagagaggcagcaacgaggagcaggtgaacggcagccccctggagagaagaagcgaggaccacctgaccgagagccaccagagagagatccccctgcccagcctgagcaagtacgaggcccagggcagcctgaccaagagccacagcgcccagcagcccgtgctggtgagccagaccctggacatccacaagagaatgcagcccctgcacatccagatcaagagcccccaggagagcaccggcgaccccggcaacagcagcagcgtgagcgagggcaagggcagcagcgagagaggcagccccatcgagaagtacatgagacccgccaagcaccccaactacagcccccccggcagccccatcgagaagtaccagtaccccctgttcggcctgcccttcgtgcacaacgacttccagagcgaggccgactggctgagattctggagcaagtacaagctgagcgtgcccggcaacccccactacctgagccacgtgcccggcctgcccaacccctgccagaactacgtgccctaccccaccttcaacctgcccccccacttcagcgccgtgggcagcgacaacgacatccccctggacctggccatcaagcacagcagacccggccccaccgccaacggcgccagcaaggagaagaccaaggccccccccaacgtgaagaacgagggccccctgaacgtggtgaagaccgagaaggtggacagaagcacccaggacgagctgagcaccaagtgcgtgcactgcggcatcgtgttcctggacgaggtgatgtacgccctgcacatgagctgccacggcgacagcggccccttccagtgcagcatctgccagcacctgtgcaccgacaagtacgacttcaccacccacatccagagaggcctgcacagaaacaacgcccaggtggagaagaacggcaagcccaaggagtag

SEQ ID NO: 102922 - DNA, 3858 bp, Artificial Sequence
  derived and/or modified sequence
atgcagtctaacatggtgcgaaagaagaatcccccattaagaaacgtggcctcagagggtgagggtcagatcttggagcccatcggtaccgagtccaaggtgtcgggcaagaataaggagttttctgctgaccaaatgagcgagaacacagaccagagcgatgccgccgaacttaatcataaggaagagcattctctgcatgtccaggaccctagttccagtagtaagaaagacctcaaaagtgcagtgctaagtgagaaagccggcttcaactatgaatctccatcgaaagggggaaactttccgtctttcccacatgatgaagtgaccgataggaatatgttggcgttttcgagccccgctgctggaggcgtgtgtgaaccccttaagagcccacagagggccgaggcagatgacccccaggatatggcctgcaccccatccggagatagtttggaaactaaggaggaccaaaagatgagcccaaaggcaacagaggagacaggacaagcccagagtggacaagctaattgtcagggcctaagtcccgtgtctgtggctagcaaaaacccacaggtaccttcagatgggggagtccgcctcaacaagtcaaagaccgacctgttagtaaacgataatcctgatcccgccccactgagccctgagttgcaggacttcaagtgcaatatctgcggttacggttattatggcaatgaccctactgacctgataaagcacttccgaaagtatcacctcgggctacacaacaggactcgacaagacgctgaactcgatagtaaaatcctggccttacacaacatggtccagttttctcatagtaaggacttccagaaggtaaataggagcgtgtttagcggcgtgctgcaagacatcaactccagcagaccggtgttgcttaatggaacatacgacgtgcaggtgacttcaggtgggacgtttatcggcatcggccgcaaaacccccgattgccaggggaacaccaaatatttcaggtgtaagttttgtaactttacttacatgggtaacagcagtaccgagctggaacagcacttcctgcagacccatcccaataagatcaaagcctccttaccatcctctgaggttgccaagccttccgagaagaactctaacaaatctatacccgcgttgcaaagtagcgactctggcgatctgggtaagtggcaggacaagattaccgtgaaggccggagatgatactcctgtcggctattctgttcctatcaagcccctcgactccagtaggcagaacggtacagaggccacctcatactactggtgcaaattctgtagtttcagctgtgaaagcagcagctccctaaagttgctggaacactatggaaaacaacatggggccgtccagagcggagggctgaatccggaactcaatgacaaactctctaggggatcagtcattaaccagaatgatctggctaagtcctctgagggcgagacgatgacaaagactgataagtcctcgagcggcgctaagaagaaagacttctccagcaaaggcgcagaagataacatggtgactagctataactgccagttctgcgatttccgatattcaaaaagccatggacccgacgttattgttgtcggaccccttctgcgccactatcagcagcttcacaatatccacaaatgcacaatcaagcattgccccttctgccctagaggtctttgttcccccgaaaaacatctgggtgagatcacctatccctttgcatgtcgaaaatccaattgctctcactgcgctctgctactcttgcacctcagcccaggtgcggcggggagctccagagtgaagcatcagtgtcaccagtgttcctttaccacacctgacgtggatgtgctgttgttccactacgagtctgtgcacgagagtcaagcctccgacgtaaagcaggaagcaaaccatttgcagggcagcgacggccaacagtctgttaaagagagtaaggagcacagctgtactaaatgcgattttatcacccaggtcgaggaagaaatcagtcgacactataggagggcccattcatgttataaatgtagacaatgtagcttcacggccgctgacactcagtcccttttggagcactttaatacggtacattgccaggagcaggacattaccacggccaatggtgaggaggacggccacgctatatccacaattaaggaggaaccaaaaatcgattttagagtgtacaacttgcttacaccagacagtaaaatgggcgaacccgtaagtgaaagtgtcgttaagagagagaaattagaagaaaaagacggcctgaaggagaaagtgtggaccgaatcatccagtgatgacctgcgaaacgtaacttggcggggtgcagacattctgcgggggtcaccgtcatacacgcaggcgagtcttgggcttctgactcctgtgtcgggaactcaagaacaaacaaaaacacttagagacagcccaaacgtcgaggccgctcacctggcccgacccatctatggcttggcagtggagactaagggatttttgcagggagcccccgcaggtggagagaagagtggggctctgcctcagcagtatcccgcctccggagaaaataaatctaaggatgaatcacagtctctgctgcgtaggaggcgtggatccggagtgttttgtgcaaattgcttaactaccaaaacatctctttggaggaagaacgctaatggagggtacgtgtgtaacgcatgtggactgtatcagaaactgcatagcaccccgagacccttgaatatcattaaacagaacaacggagagcagataattaggcggcgcactaggaagcgcctcaatcccgaggcactgcaggcagagcagctgaacaagcaacagcgagggtccaatgaagaacaggttaacgggtctcccctagagcgtcggtccgaagaccatctcactgagtcacatcagcgggaaataccgctcccaagtctcagcaagtacgaggctcagggttcactgacaaaatcccattccgctcaacaacccgtgctcgtgtcccagacactggatattcacaaacgcatgcagccccttcacattcagattaaatccccacaggagtcaaccggcgatccaggcaatagctcaagcgtgtccgaagggaagggaagtagcgaacggggctcaccaatcgagaaatatatgcggcccgcaaagcaccccaactatagcccacccggcagtcccattgaaaaatatcagtaccccctatttggtcttccttttgtgcataatgacttccagagcgaggccgactggctgaggttctggtctaaatacaaactgagcgtccctgggaatccacactatttaagtcatgtcccaggactgccaaatccctgccagaattatgtcccttaccccacctttaatcttcccccccatttctcagctgttgggagcgataatgacatccccctggacttagctatcaagcactctagacccggcccgactgccaacggcgcatctaaggagaaaacgaaagctcctccaaacgtcaagaacgagggccctttaaatgtggtaaagaccgaaaaagtcgatcgctccacacaggatgagctgagtactaaatgcgtgcattgcggcatagtctttctagacgaagtgatgtacgccctgcatatgagctgtcatggcgacagcggacctttccagtgttctatctgtcaacacctgtgcacggacaaatacgatttcactacccatatccagagggggctccaccgtaataacgcacaggtggagaagaatggaaagccgaaggaatag

SEQ ID NO: 102923 - DNA, 3858 bp, Artificial Sequence
  derived and/or modified sequence
atgcagagcaacatggtgaggaagaagaacccccccctgagaaatgtggccagcgagggggagggccagatcctggagcccatcggcacagagagcaaggtgtctgggaagaacaaggagttctctgctgaccagatgtctgagaacacagaccagagtgatgctgctgagctgaaccacaaggaggagcacagcctgcacgtgcaggaccccagcagcagcagcaagaaggacctgaagtctgctgtgctgtctgagaaggccggcttcaactatgagagccccagcaaaggaggcaacttccccagcttcccccatgatgaggtgacagacaggaacatgctggccttcagcagccctgctgctgggggcgtgtgtgagcccctgaagagcccccagagagctgaggctgatgacccccaggacatggcctgcacccccagcggggacagcctggagaccaaggaggaccagaagatgagccccaaggccacagaggagaccggccaggcccagagcggccaggccaactgccagggcctgagccctgtgtctgtggccagcaagaacccccaggtgcccagtgatggcggcgtgcggctgaacaagagcaagacagacctgctggtgaatgacaacccagaccctgcccccctgagccctgagctgcaggacttcaagtgcaacatctgtggctacggctactatggaaatgaccccacagacctgatcaagcacttcaggaagtaccacctgggcctgcacaacagaacccggcaggatgctgagctggacagcaagatcctggccctgcacaacatggtgcagttcagccacagcaaggacttccagaaggtgaacagatctgtgttcagcggcgtgctgcaggacatcaacagcagcaggcctgtgctgctgaatggcacctatgatgtgcaggtgaccagcggcggcaccttcatcggcattggaaggaagaccccagactgccagggcaacaccaagtacttccgctgcaagttctgcaacttcacctacatgggcaacagcagcacagagctggagcagcacttcctgcagacccaccccaacaagatcaaggccagcctgcccagcagcgaggtggccaagcccagcgagaagaacagcaacaagagcatcccagccctgcagagcagtgacagcggggacctgggcaagtggcaggacaagatcaccgtgaaggctggagatgacacccctgtgggctacagcgtgcccatcaagcccctggacagcagccggcagaatggaacagaggccaccagctactactggtgcaagttctgcagcttcagctgtgagagcagcagcagcctgaagctgctggagcactacggcaagcagcacggggctgtgcagagcggcggcctgaaccctgagctgaatgacaagctgagccggggcagcgtcatcaaccagaatgacctggccaagagcagcgagggggagaccatgaccaagacagacaagagcagcagcggggccaagaagaaggacttcagcagcaaaggagctgaggacaacatggtgaccagctacaactgccagttctgtgacttccgctacagcaagagccacggcccagatgtgattgtggtgggccccctgctgcggcactaccagcagctgcacaacatccacaagtgcaccatcaagcactgccccttctgcccccggggcctgtgcagccctgagaagcacctgggggagatcacctacccctttgcctgcaggaagagcaactgcagccactgtgccctgctgctgctgcacctgagccctggagctgctggcagcagccgggtgaagcaccagtgccaccagtgcagcttcaccaccccagatgtggatgtgctgctcttccactatgaatctgtgcatgagagccaggccagtgatgtgaagcaggaggccaaccacctgcagggcagtgatggccagcagagcgtgaaggagagcaaggagcacagctgcaccaagtgtgacttcatcacccaggtggaggaggagatcagccgccactaccgccgggcccacagctgctacaagtgccggcagtgcagcttcaccgctgctgacacccagagcctgctggagcacttcaacacagtgcactgccaggagcaggacatcaccacagccaatggagaggaggatggccacgccatcagcaccatcaaggaggagcccaagattgacttccgggtgtacaacctgctgaccccagacagcaagatgggagagcctgtgtctgagagcgtggtgaagcgggagaagctggaggagaaggatggcctgaaggagaaggtgtggacagagagcagcagtgatgacctgagaaatgtgacctggagaggagctgacatcctgcggggcagccccagctacacccaggccagcctgggcctgctgacccctgtgtctggcacccaggagcagaccaagaccctgcgggacagccccaacgtggaggccgcccacctggcccggcccatctacggcctggccgtggagaccaagggcttcctgcagggcgccccagctggaggagagaagagcggggccctgccccagcagtacccagccagcggggagaacaagagcaaggatgagagccagagcctgctgcggaggagaagaggcagcggggtcttctgtgccaactgcctgaccaccaagaccagcctgtggaggaagaatgccaacggcggctacgtgtgcaatgcctgtggcctgtaccagaagctgcacagcaccccccggcccctgaacatcatcaagcagaacaacggggagcagatcatcagaagaaggaccaggaagaggctgaaccctgaggccctgcaggccgagcagctgaacaagcagcagaggggcagcaatgaggagcaggtgaatggcagccccctggagcggcgctctgaggaccacctgacagagagccaccagcgggagatccccctgcccagcctgagcaaatatgaggcccagggcagcctgaccaagagccacagcgcccagcagcctgtgctggtgtcccagaccctggacatccacaagaggatgcagcccctgcacatccagatcaagagcccccaggagagcactggagaccccggcaacagcagctctgtgtctgagggcaagggcagcagcgagcggggcagccccatcgagaagtacatgaggcctgccaagcaccccaactacagccccccaggcagccccatcgagaagtaccagtaccccctgtttggcctgccctttgtgcacaatgacttccagagcgaggccgactggctgcgcttctggagcaagtacaagctgtctgtgcccggcaacccccactacctgagccacgtgcccggcctgcccaacccctgccagaactacgtgccctaccccaccttcaacctgcccccccacttctctgctgtgggcagtgacaatgacatccccctggacctggccatcaagcacagcaggcctggccccacagccaacggggccagcaaggagaagaccaaggccccacccaacgtgaagaatgaaggccccctgaatgtggtgaagacagagaaggtggacaggagcacccaggatgagctgagcaccaagtgtgtgcactgcggcatcgtgttcctggatgaggtgatgtatgccctgcacatgagctgccacggggacagcggccccttccagtgcagcatctgccagcacctgtgcacagacaagtatgacttcaccacccacatccagaggggcctgcacaggaacaatgcccaggtggagaagaatggcaagcccaaggagtag

SEQ ID NO: 102924 - DNA, 3858 bp, Artificial Sequence
  derived and/or modified sequence
atgcagagcaacatggtgcggaagaagaacccccccctgcggaacgtcgccagcgaaggcgagggccagattttggaacctatcggaacagaatccaaggtgagcggcaaaaataaagaatttagcgcggatcagatgagcgagaataccgatcaatccgatgccgccgaattgaatcacaaagaggagcattctttgcacgtgcaggatccctcctcctcctctaagaaggatctgaaatctgccgttctcagcgagaaagctggtttcaattacgagtccccctcaaaggggggtaacttcccttctttccctcacgacgaagtgaccgaccggaacatgctggctttctcctccccagccgccggaggcgtgtgcgagcccctgaagtcaccgcagagggctgaggccgacgatcctcaggatatggcgtgcaccccaagcggcgacagtctcgaaactaaagaggaccagaaaatgtctccaaaagccactgaggagacaggtcaagcccagtccggtcaggccaattgtcagggcctgtcacccgtgagtgtggccagtaaaaatccacaggtgccatcagatggaggcgtgaggcttaataagtcaaaaaccgatttgctcgttaacgataatcccgacccagccccactgtcccccgagctgcaagacttcaaatgcaacatttgcggctacggttattatggaaacgaccctaccgatctgatcaagcactttcggaagtatcacctcggcctccacaacagaactcggcaggacgcagaattagattcaaaaattctagcgctccacaacatggtccaattttctcatagtaaagattttcagaaagtgaacaggtcggtgttcagcggtgtgctgcaggatattaacagttcaagaccagtgctgcttaatgggacatatgacgtgcaggtgacatctggaggcacgttcatcggaatcggccgcaaaacaccagactgtcagggtaacacaaagtattttagatgcaaattttgtaacttcacttatatggggaatagctccaccgagctggaacagcatttcttgcagacgcacccaaataagattaaagcctccctgccctcctctgaagtggctaagccgtctgaaaaaaattccaacaagtcaattcctgcccttcagagctccgattcgggtgatcttggtaagtggcaagacaagataacagtcaaagccggcgatgacacacctgttggctactcagtaccaataaagcctctggatagctcacgccaaaatggaaccgaggctactagctactattggtgtaagttctgttcctttagctgtgaaagctcttcaagtctaaagttgctggaacattacggcaagcagcatggagcagtgcagtccggcggcctgaaccccgagttaaatgacaagctgtctcggggcagcgttattaaccagaacgacctcgcaaagtcgtccgaaggtgaaaccatgaccaagacagataaatcctcgtccggcgcgaagaaaaaagacttcagttccaagggtgcagaggacaatatggtcacatcctacaattgccagttctgcgattttaggtattcgaagagtcacgggcccgatgttatcgtggtgggtcctctgctgagacattatcaacagcttcataatattcataagtgtactattaaacactgccccttctgtcccagaggtctgtgcagccccgagaagcacctgggagagatcacctatccctttgcttgcagaaagtctaactgttcacactgcgccctactcctgctgcacctctctcccggggctgctggttccagcagagtcaagcatcaatgtcaccaatgttctttcactactccagacgtcgatgttttgctcttccactatgaaagtgttcacgagtcccaggcgagcgatgtgaaacaggaagcaaatcatttacaggggtccgatggacagcagagtgtcaaagagagcaaagagcatagctgtacgaagtgtgattttatcactcaggttgaggaggagatatccagacattaccggagagcccactcctgctacaaatgccgccagtgttcctttaccgccgccgatacccaatctttactggaacactttaatacagtccattgtcaagagcaggacatcacaaccgccaacggagaggaggatgggcacgctatttcaacaattaaggaggagcccaagatagattttcgcgtatacaatctgctcacccctgatagcaaaatgggtgagccagtaagtgagtcagtcgtgaaaagagagaaactggaagaaaaagacggtctaaaagaaaaagtgtggaccgagtcaagctcagacgacctgcgcaatgttacgtggcgcggcgcggatatcctgcgcgggagccctagctacacccaggcaagcttaggtttactcactcctgtctcaggaacgcaagagcagacaaagactttgagagacagtcccaacgtagaagctgcccacctggcaaggccaatctacgggctggctgtagaaacaaagggatttctgcaaggagctcccgctggcggcgagaaatccggcgctctcccgcaacagtatcctgcttccggggagaataaatctaaagatgagtcccagtcactcctgaggagaaggaggggttccggcgtcttctgcgcgaattgtcttacgactaaaacatccctttggcggaagaatgcgaatggcgggtatgtgtgcaacgcctgtggtttgtatcagaaacttcactcgaccccgaggccactcaatataatcaaacagaataacggcgaacagatcatcaggcggcgcacacgaaaaaggctgaatcctgaagcactgcaggctgagcagctaaacaagcagcagcggggctccaacgaagagcaggtgaatggttctccattagaaagacgctccgaggaccacctgaccgaaagccaccagcgagagatccccctcccctcgttgtccaagtacgaagcacagggatccttaacgaagagccactccgcacagcagccagttctcgtctctcagactctggacatacacaaacgtatgcagcctttacatatccagatcaagtccccgcaagaatccaccggcgatcctggaaattcttcaagcgtgagcgaaggcaagggctcttcagaaagaggcagccccatagagaagtacatgcgtcccgcaaagcacccaaattatagcccacccgggagtcctatagaaaagtatcagtacccccttttcgggttgccttttgttcataacgacttccagtctgaagcagactggctccgattctggtctaagtacaagttgtctgtacctggcaatcctcattatttgagccacgtgcccgggctccccaatccttgtcagaattatgttccttaccctacatttaatctccctcctcactttagtgctgttggatctgataacgacattccactggacctcgccataaagcattctcgtcccggtcccaccgcaaatggagcaagcaaagagaagaccaaggccccccctaacgttaaaaatgagggccctctgaatgtggttaagaccgaaaaggtggacagatctacacaggatgagttgtcaacaaaatgtgtgcattgcgggatcgtgttcttagacgaggtgatgtacgcactgcatatgtcctgtcacggcgactccgggcccttccagtgtagcatttgtcagcacctgtgcacggataaatacgatttcacgactcatatccagagagggttgcatcgtaacaatgcacaggtagagaaaaacggcaaacccaaagagtag

SEQ ID NO: 102925 - DNA, 3858 bp, Artificial Sequence
  derived and/or modified sequence
atgcagagtaatatggtgcggaagaagaaccctccgctgcgcaatgtcgcttcggaaggcgagggtcagatattagaaccgattggtactgaatctaaggtgagcggcaagaataaagagttctccgccgatcaaatgtccgagaacactgatcagtctgatgctgcagagcttaatcacaaggaggagcactcactgcacgtgcaggaccccagctcatctagcaaaaaggatctgaaaagcgctgtcctctccgagaaagcagggttcaattacgagtccccgtctaagggtggcaattttccatccttcccgcatgacgaggtgaccgatagaaatatgctggcctttagctctcctgccgcaggtggagtttgtgagccgttaaagtccccccaacgcgcagaggcagatgatccccaggatatggcatgtacaccctctggggacagcctcgagactaaggaagaccaaaaaatgagcccaaaagcaacagaggagacagggcaggctcagtccgggcaggcgaactgccaggggctctccccggtatctgtcgctagtaaaaatcctcaggtcccttctgatgggggtgtccgtctaaataaatctaagacggacctacttgtcaatgataaccccgatcctgcccctctgtcccccgagctgcaggacttcaagtgtaacatctgcggatacggttactatggcaacgaccctactgacctgatcaagcactttcgaaagtatcacctaggactgcataaccggacccggcaagatgcagaactcgatagtaaaatactggctctccacaatatggtacagttctctcacagtaaagattttcagaaagtgaaccggagtgtgttctcaggtgtactgcaggatattaactccagcagacctgtccttctaaacggaacctatgatgttcaggtgacctccggaggcacatttattggcattgggaggaagacccccgattgccagggaaatactaaatattttcgttgtaagttctgcaacttcacctacatgggaaactcaagtactgaactggaacagcactttctgcaaacccatccgaataagataaaagcttccctgccatcttcagaagtggcaaaaccttcagaaaagaactctaacaagagcataccagctctgcagtcgagtgacagcggtgatctcgggaagtggcaggacaagatcaccgtgaaagcaggagacgacaccccggtagggtatagcgttccaatcaaacctctggacagttcaaggcagaatggtaccgaggcaacttcttactattggtgcaaattctgctcctttagctgcgaaagtagcagcagcctgaaactgctagagcattacggcaaacagcacggggctgtccagtccgggggactgaaccccgagctgaacgataaactgagccgagggtcggttattaatcagaacgacctcgctaagtccagcgaaggagaaactatgacgaagactgacaagtcctccagtggtgccaaaaagaaggactttagctccaagggcgcagaagacaacatggtaaccagctataactgccagttctgtgacttccggtatagtaagtcccatggcccagatgtcattgtggtggggccattgcttcgccactatcaacagttacataacatccacaaatgcaccattaagcactgccctttctgccctcgcggattatgctcacctgaaaagcacctgggcgagatcacctacccgttcgcttgcaggaagagcaattgcagccattgcgcccttctgctcttgcacctttcccccggtgcggcagggagtagtagagtaaagcaccagtgccaccagtgctcctttactacacctgatgtggatgtgcttctattccattacgagtcggtccacgagagccaggcaagcgacgtgaaacaggaggccaatcacctccagggaagcgacggtcagcagagtgtgaaggagtccaaggagcattcatgcaccaagtgcgacttcatcactcaggtggaggaagaaatctcccgtcactatagaagagcccattcatgctataagtgccgccagtgtagcttcaccgccgctgatacacagagtctcctagaacattttaataccgtgcactgtcaggaacaggacataactacagccaacggtgaggaggacggccacgctattagcactatcaaagaagaacctaagatcgattttcgcgtgtataacctccttacccctgattctaagatgggtgagccagtgagcgagtcagtggtgaagcgcgagaagttggaggaaaaagacgggttaaaagagaaggtgtggacagagtcttcctcggacgacctccggaatgtcacttggaggggagccgacatcttaagaggtagccccagctacacgcaggcatcactgggcctgctcaccccagtttccggcacccaggagcagacaaagactttgagggattcccctaacgtggaagccgctcacctggccaggccaatttacggactggcggttgagacaaaaggcttcctgcagggcgctccagccggtggggagaaaagcggggctttgcctcagcaataccccgcttcgggtgagaacaaaagcaaggatgagtcacaaagcttgctccggaggcgccgaggtagtggcgtgttttgcgcaaactgtctgaccacaaaaacctcattatggaggaagaacgcaaatgggggttatgtgtgcaatgcatgcgggctctatcaaaaactgcacagcacacccagacccctgaacatcattaaacagaataacggcgagcagatcatcagacgcagaacaaggaaacgccttaatccagaggctctgcaggccgagcagcttaataaacagcagaggggctccaatgaggagcaggtgaatggttcccccctggagcgcagaagcgaagatcatttgaccgaaagtcaccagcgtgagatacccttgccatcactctctaaatatgaggcacaagggagtctcactaagtcccactctgcacaacagccggttcttgtctctcagacccttgacatccacaagagaatgcaaccgctccatatacagatcaaatctcctcaggagtccaccggggatcctggaaactcctcttctgtgtccgaggggaagggatcttcggaaagaggttctcccattgagaaatacatgcggccagcaaagcatcccaactactctcccccaggctctcctatcgaaaaatatcagtacccactatttgggctcccctttgtgcataatgacttccaatcagaagctgactggttgcggttttggtccaagtacaagctttctgtgcccggaaacccccattatctcagccatgtgcctgggctcccaaacccctgtcaaaactacgtcccttatccgacttttaatctcccacctcactttagcgctgtaggtagtgacaatgacattcccctggaccttgcaattaaacattcccgcccaggaccgaccgccaatggcgcaagcaaagagaaaaccaaggcccctccaaacgttaagaacgagggtcctcttaatgttgtaaaaactgagaaggtggaccgaagtacacaggacgagctgagcacaaagtgcgtgcactgtgggatagtctttctggatgaggtaatgtacgccctgcacatgtcctgccacggagactcaggccctttccagtgttccatctgtcagcatctgtgtactgataagtacgatttcacaacgcatatccaacgcggactgcacagaaataacgctcaggttgaaaaaaatggcaaaccaaaagaatag

SEQ ID NO: 102926 - DNA, 4083 bp, Artificial Sequence
  derived and/or modified sequence
aattctctcctaccgggcgcagcggaggagctggaggtggttggacccgaggggccgccgccgccgccgccactgcaagttttctgggggctcgtgacaagcggggcgcagactaggcaccagcatgcagagtaatatggtccggaaaaagaacccccctctgagaaacgttgcaagtgaaggcgagggccagatcctggagcctataggtacagaaagcaaggtatctggaaagaacaaagaattttctgcagatcagatgtcagaaaatacggatcagagtgatgctgcagaactaaatcataaggaggaacatagcttgcatgttcaagatccatcttctagcagtaagaaggacttgaaaagcgcagttctgagtgagaaggctggcttcaattatgaaagccccagtaagggaggaaactttccctcctttccgcatgatgaggtgacagacagaaatatgttggctttctcatctccagctgctgggggagtctgtgagcccttgaagtctccgcaaagagcagaggcagatgaccctcaagatatggcctgcaccccctcaggggactcactggagacaaaggaagatcagaagatgtcaccaaaggctacagaggaaacagggcaagcacagagtggtcaagccaattgtcaaggtttgagcccagtttcagtggcctcaaaaaacccacaagtgccttcagatgggggtgtaagactgaataaatccaaaactgacttactggtgaatgacaacccagacccggcacctctgtctccagagcttcaggactttaaatgcaatatctgtggatatggttactacggcaacgaccccacagatctgattaagcacttccgaaagtatcacttaggactgcataaccgcaccaggcaagatgctgagctggacagcaaaatcttggcccttcataacatggtgcagttcagccattccaaagacttccagaaggtcaaccgttctgtgttttctggtgtgctgcaggacatcaattcttcaaggcctgttttactaaatgggacctatgatgtgcaggtgacttcaggtggaacattcattggcattggacggaaaacaccagattgccaagggaacaccaagtatttccgctgtaaattctgcaatttcacttatatgggcaactcatccaccgaattagaacaacattttcttcagactcacccaaacaaaataaaagcttctctcccctcctctgaggttgcaaaaccttcagagaaaaactctaacaagtccatccctgcacttcaatccagtgattctggagacttgggaaaatggcaggacaagataacagtcaaagcaggagatgacactcctgttgggtactcagtgcccataaagcccctcgattcctctagacaaaatggtacagaggccaccagttactactggtgtaaattttgtagtttcagctgtgagtcatctagctcacttaaactgctagaacattatggcaagcagcacggagcagtgcagtcaggcggccttaatccagagttaaatgataagctttccaggggctctgtcattaatcagaatgatctagccaaaagttcagaaggagagacaatgaccaagacagacaagagctcgagtggggctaaaaagaaggacttctccagcaagggagccgaggataatatggtaacgagctataattgtcagttctgtgacttccgatattccaaaagccatggccctgatgtaattgtagtggggccacttctccgtcattatcaacagctccataacattcacaagtgtaccattaaacactgtccattctgtcccagaggactttgcagcccagaaaagcaccttggagaaattacttatccgtttgcttgtagaaaaagtaattgttcccactgtgcactcttgcttctgcacttgtctcctggggcggctggaagctcgcgagtcaaacatcagtgccatcagtgttcattcaccacccctgacgtagatgtactcctctttcactatgaaagtgtgcatgagtcccaagcatcggatgtcaaacaagaagcaaatcacctgcaaggatcggatgggcagcagtctgtcaaggaaagcaaagaacactcatgtaccaaatgtgattttattacccaagtggaagaagagatttcccgacactacaggagagcacacagctgctacaaatgccgtcagtgcagttttacagctgccgatactcagtcactactggagcacttcaacactgttcactgccaggaacaggacatcactacagccaacggcgaagaggacggtcatgccatatccaccatcaaagaggagcccaaaattgacttcagggtctacaatctgctaactccagactctaaaatgggagagccagtttctgagagtgtggtgaagagagagaagctggaagagaaggacgggctcaaagagaaagtttggaccgagagttccagtgatgaccttcgcaatgtgacttggagaggggcagacatcctgcgggggagtccgtcatacacccaagcaagcctggggctgctgacgcctgtgtctggcacccaagagcagacaaagactctaagggatagtcccaatgtggaggccgcccatctggcgcgacctatttatggcttggctgtggaaaccaagggattcctgcagggggcgccagctggcggagagaagtctggggccctcccccagcagtatcctgcatcgggagaaaacaagtccaaggatgaatcccagtccctgttacggaggcgtagaggctccggtgttttttgtgccaattgcctgaccacaaagacctctctctggcgaaagaatgcaaatggcggatatgtatgcaacgcgtgtggcctctaccagaagcttcactcgactcccaggcctttaaacatcattaaacaaaacaacggtgagcagattattaggaggagaacaagaaagcgccttaacccagaggcacttcaggctgagcagctcaacaaacagcagaggggcagcaatgaggagcaagtcaatggaagcccgttagagaggaggtcagaagatcatctaactgaaagtcaccagagagaaattccactccccagcctaagtaaatacgaagcccagggttcattgactaaaagccattctgctcagcagccagtcctggtcagccaaactctggatattcacaaaaggatgcaacctttgcacattcagataaaaagtcctcaggaaagtactggagatccaggaaatagttcatccgtatctgaagggaaaggaagttctgagagaggcagtcctatagaaaagtacatgagacctgcgaaacacccaaattattcaccaccaggcagccctattgaaaagtaccagtacccactttttggacttccctttgtacataatgacttccagagtgaagctgattggctgcggttctggagtaaatataagctctccgttcctgggaatccgcactacttgagtcacgtgcctggcctaccaaatccttgccaaaactatgtgccttatcccaccttcaatctgcctcctcatttttcagctgttggatcagacaatgacattcctctagatttggcgatcaagcattccagacctgggccaactgcaaacggtgcctccaaggagaaaacgaaggcaccaccaaatgtaaaaaatgaaggtcccttgaatgtagtaaaaacagagaaagttgatagaagtactcaagatgaactttcaacaaaatgtgtgcactgtggcattgtctttctggatgaagtgatgtatgctttgcatatgagttgccatggtgacagtggacctttccagtgcagcatatgccagcatctttgcacggacaaatatgacttcacaacacatatccagaggggcctgcataggaacaatgcacaagtggaaaaaaatggaaaacctaaagagtaaaaccttagcacttagcacaattaaatagaaataggttttcttgatgggaattcaatagcttgtaatgtcttatgaagacctattaaaaaaatacttcatag

SEQ ID NO: 102927 - protein, 649 aa, Artificial Sequence
  derived and/or modified sequence
MEQSNDSLRVNHNDGEESKTSAQVFEMIVASPTENGQVLRVIPPTQTGMAQVIIPQGQLVDVNSPRDVPEEKPSNRNLPTVRVDTLADNTSNYILHPQTSFPLPKKSVTGMLEEPLLGPLQPLSSNTPIWACRLRSCEKIGDSYRGYCVSETELESVLTFHKQQTQSVWGTRQSPSPAKPATRLMWKSQYVPYDGIPFVNAGSRAVVMECQYGPRRKGFQLKKVSEQESRSCQLYKATCPARIYIKKVQKFPEYRVPTDPKIDKKIIRMEQEKAFNMLKKNLVDAGGVLRWYVQLPTQQAHQYHELETPCLTLSPSPFPVSSLEEEETAVRDENCALPSRLHPQVAHKIQELVSQGIEQVYAVRKQLRKFVERELFKPDEVPERHNLSFFPTVNDIKNHIHEVQKSLRNGDTVYNSEIIPATLQWTTDSGNILKETMTVTFAEGNSPGESITTKVETNQTRGSLSPEPTHLLSSLSSFQPKIFTQLQGLQLQPRYTSPDESPAVVSVNNQPSSSPSGLLDTIGSAVMNNNSLLLGQSHSLQRDTCLTQNNSTASTMGNLPEPDQNLVAMDELVEVGDVEDTGNLEGTVHRILLGDVQTIPIQIIDNHSALIEENPESTISVSQVKQEPKEPALSMEAKKTVDYKKLSAT

SEQ ID NO: 102928 - DNA, 1950 bp, Artificial Sequence
  derived and/or modified sequence
atggaacagtctaacgattccctgagggtgaatcataacgacggggaagagtctaagacttccgcccaggtgttcgaaatgatcgtggcctcccctacagaaaatggtcaagtactgagagtgatcccccccactcagacaggcatggcccaggtgataattccacagggacagctagtggatgtgaatagcccgagggacgttcccgaagagaagccctccaaccgcaacctgccgactgtgcgagttgatacgctcgccgacaatacctccaactacatcctgcatccccagacttcattccctctacccaagaaatcagtgaccggcatgctggaggagcctctattgggacctcttcaacccctttcttcaaatactcctatctgggcgtgtcgcctgaggagctgcgagaaaataggggacagttatagagggtactgcgtgagtgagaccgagcttgagtccgtgcttacttttcataaacagcagactcagtctgtctgggggacaaggcagtcccctagccccgccaagcctgcgaccaggttaatgtggaagtctcagtacgtaccctacgacggaattccattcgtgaacgccgggtcccgggctgtcgtaatggagtgtcagtacggtccaagacgcaaaggtttccagttgaaaaaggtgtctgagcaggagagtcgttcttgtcagctgtacaaggctacttgtccggctaggatctacatcaagaaggtgcaaaaattccccgagtaccgggtccctacagaccctaagatcgacaagaaaattattagaatggaacaggagaaagcatttaacatgctgaagaagaaccttgtggatgctggcggtgtgctgagatggtacgtgcagctgccaacgcagcaagcccaccagtatcatgagctcgaaaccccttgcctcaccttgagtccctccccatttccagtgtcttcacttgaggaagaggagaccgctgtgagagatgaaaactgcgctttacccagtcggttgcatccccaggtcgctcataagattcaggagttggtttcccaagggatcgaacaagtgtatgcagtgcgcaaacagcttagaaagtttgttgaaagggaacttttcaaaccagacgaggttccagagcggcacaatctcagctttttccctacagtgaacgacatcaagaaccatatccatgaggttcagaagtctctccgcaacggtgatacagtgtacaatagtgagattatccctgccactctccagtggacaacagattcgggcaacatcctgaaagagacgatgacagtcacttttgcagaaggcaactcacccggcgagtccattactactaaagtggaaacgaaccagacgcgagggagtttgagcccagaacctacccacttgctctccagtctctcaagcttccagcccaagatctttacccagctgcagggcttacagttgcagcctcgctacacttcacctgacgaatccccggcggtggtatctgtgaacaatcagccctcatcctctccaagtggtctgttagacaccatcggtagtgccgtgatgaacaataactccctcctcctcggacagtcgcacagtttacaacgggatacctgtctcacgcagaataacagcacagcctccacaatgggcaacctgcccgagcctgatcagaatctggtcgctatggatgaactcgtggaagtgggtgacgtcgaagacaccggcaatctcgaggggaccgtgcaccgcatcctgctaggcgatgtgcagacaattcccatccaaattattgacaatcactcagctctgatcgaggagaatccggagtcaactatttccgtgagccaggtaaagcaggaacccaaggagcctgcccttagtatggaggccaagaagactgtcgattataaaaaattatcagcgacatag

SEQ ID NO: 102929 - DNA, 1950 bp, Artificial Sequence
  derived and/or modified sequence
atggagcagagcaatgacagcctgcgggtgaaccacaatgatggagaggagagcaagaccagcgcccaggtgtttgagatgattgtggccagccccacagaaaatggccaggtgctgcgggtcatcccccccacccagacaggcatggcccaggtgatcatcccccagggccagctggtggatgtgaacagccccagagatgtgcctgaggagaagcccagcaacagaaacctgcccaccgtgcgggtggacaccctggccgacaacaccagcaactacatcctgcacccccagaccagcttccccctgcccaagaagtctgtgacaggcatgctggaggagcccctgctgggccccctgcagcccctgagcagcaacacccccatctgggcctgccgcctgcggagctgtgagaagatcggggacagctaccggggctactgtgtgtctgaaacagagctggagagcgtgctgaccttccacaagcagcagacccagagcgtgtggggcacccggcagagccccagccctgccaagccagccacccggctgatgtggaagagccagtatgtgccctatgatggcatcccctttgtgaatgccggcagcagagctgtggtgatggagtgccagtatggccccaggaggaagggcttccagctgaagaaggtgtctgagcaggagagccgcagctgccagctgtacaaggccacctgcccagcccgcatctacatcaagaaggtgcagaagtttcctgagtacagagtgcccacagaccccaagattgacaagaagatcatccgcatggagcaggagaaggccttcaacatgctgaagaagaacctggtggatgctggaggagtgctgcgctggtacgtgcagctgcccacccagcaggcccaccagtaccacgagctggagaccccctgcctgaccctgagccccagccccttccctgtgagcagcctggaggaggaggagacagctgtgagagatgagaactgtgccctgcccagccggctgcacccccaggtggcccacaagatccaggagctggtgtcccagggcatcgagcaggtgtatgctgtgaggaagcagctgaggaagtttgtggagcgggagctgttcaagccagatgaggtgcctgagcggcacaacctgtccttcttccccaccgtgaatgacatcaagaaccacatccacgaggtgcagaagagcctgagaaatggagacacagtgtacaacagcgagatcatcccagccaccctgcagtggaccacagattctggcaacatcctgaaggagaccatgacagtgacctttgctgagggcaacagccctggagagagcatcaccaccaaggtggagaccaaccagacccggggcagcctgagccctgagcccacccacctgctgagcagcctgagcagcttccagcccaagatcttcacccagctgcagggcctgcagctgcagccccgctacaccagcccagatgagagccctgctgtggtgtctgtgaacaaccagcccagcagcagccccagcggcctgctggacaccatcggcagcgctgtgatgaacaacaacagcctgctgctgggccagagccacagcctgcagagggacacctgcctgacccagaacaacagcacagccagcaccatgggcaacctgcctgagccagaccagaacctggtggccatggatgagctggtggaggtgggagatgtggaggacaccggcaacctggagggcaccgtgcaccgcatcctgctgggagatgtgcagaccatccccatccagatcatcgacaaccacagcgccctgattgaagaaaatcctgagagcaccatctctgtgtcccaggtgaagcaggagcccaaggagcccgccctgtccatggaggccaagaagacagtggactacaagaagctgagcgccacctag

SEQ ID NO: 102930 - DNA, 1950 bp, Artificial Sequence
  derived and/or modified sequence
atggagcagagcaacgacagcctgcgggtgaaccacaacgacggcgaggaaagcaagactagtgctcaagtcttcgagatgatcgtggcttctcctactgagaacgggcaggtgcttagagtcataccccccacccagaccggtatggctcaggtgattatcccccaaggacagctggtggacgtcaactcacccagagacgtccccgaggagaaaccctcaaatagaaacttgccgacagttagagtcgacaccttggcagacaatacttccaactacattctgcacccacagacaagctttcctctgcccaaaaagtcggttaccggtatgctggaggaaccacttttgggaccactgcagccactgtctagtaataccccaatatgggcttgccgactcagaagttgcgagaaaattggagacagctaccgaggatactgtgtgagtgaaaccgaactggaatccgtccttacatttcacaagcagcagactcaaagcgtgtggggaactcgacagtctccatcgcccgccaaacctgccaccagattgatgtggaaaagtcagtacgtcccatatgacggaattccttttgtcaatgccggttccagagccgtggtgatggaatgtcagtatgggcccaggagaaagggatttcagctaaagaaggtgtcagagcaggagtccaggagttgccagttgtacaaggccacatgcccagcacgcatttacattaaaaaggttcagaagtttccagaatatcgggtgccgaccgatcccaagattgataaaaagattatccgtatggagcaggagaaagccttcaacatgttaaagaagaatctggtggatgcagggggcgttttgcggtggtatgttcagttaccaactcagcaggctcaccaatatcacgagctggagacaccttgcctaaccctgtcaccaagtccgttccccgtgagttctctcgaggaggaagagacagccgtgcgtgatgagaattgcgctctgcccagccggctccaccctcaggttgcgcataagatccaagagttagtctcacagggcatcgagcaggtgtacgccgttagaaagcagttgcggaaattcgtggagcgcgagttgttcaaacccgatgaggtgccggaacggcacaacctgagtttctttcctaccgtgaatgacattaaaaaccatatacatgaggtgcagaagtccctccgaaatggggacacggtctataactcagaaatcattccggccacattgcaatggaccaccgattccggtaacattctgaaggagacaatgactgtaacattcgctgaggggaacagtcccggcgagagcatcaccaccaaggtggagactaatcagacccgaggctcgttgtctcctgaacccactcacttgctctcgagcctgtcgtcttttcagcccaagatttttacccagttacaggggcttcaactgcagccaagatacacttcccccgatgagtcccccgccgtggtatctgtcaataaccagccttcctcctctccttccggcctgcttgatactattggatccgccgtcatgaacaataatagtctactgctgggacaatcccattctctgcaacgtgatacatgtctgacacagaataattcaaccgcatcgactatggggaatctgccagagccagatcagaacctcgtagctatggacgagttagttgaagtgggagacgtagaggatactgggaacctggaggggactgtgcacaggatcctcctcggcgatgtgcagacaattccaatacagatcatagataatcatagtgctttgatcgaggagaaccccgaatctaccatatccgtgagccaggttaagcaagaacccaaagagcctgcactcagtatggaggctaagaaaaccgtggactacaaaaaactgtccgcgacctag

SEQ ID NO: 102931 - DNA, 2770 bp, Artificial Sequence
  derived and/or modified sequence
attatgctggtctccatggcggggcctcggagccaagacgaggcattcgcttcaagagacaagcagtttagaatcaggcagaactggattgcaaaatttatgggcagaccggtatgtgtgcagagaaaatgctgctgtgaagacccaattaaagctttcacataaatgaagctacagctatcatgatttagtgcccccaaaaggaagaacttcagtggacaagaaaggacatttctgggggtagtagaatgcttgaggcctggaatttaaacctgagccactatctgaagctattaaataatagaagaaaatggaattgaatatgatgtcagcatggaacaatctaatgattcattaagagtcaaccataatgacggtgaagagtcaaaaaccagtgctcaagtatttgagatgatcgttgccagcccaacagaaaatggacaggtacttcgtgtaattccacctacccagacaggaatggcacaagtgattatacctcaggggcaacttgtggatgtgaatagtcctcgggatgtccctgaagagaaacccagtaacagaaacttaccaactgtaagagtggatactctagcagacaataccagcaattacattcttcatcctcaaacatccttcccattgcccaaaaagtcagtgaccggaatgctggaagaaccccttctggggcctcttcagccactttcttctaatacacctatatgggcctgccgtcttaggagctgtgagaaaattggagattcataccgtggctactgtgtaagtgagactgaattagaaagtgtcctaacatttcacaagcagcaaacacagagtgtttgggggacccgtcagtctccaagcccagccaagcctgctacacgcttgatgtggaaatcccagtatgttccatatgatggaatcccatttgttaatgcagggagtagagctgtggtaatggagtgtcagtatgggccaagaagaaaaggtttccagttaaaaaaagtcagtgagcaggaaagcaggtcttgtcagctctacaaagccacttgtccagctcggatttacattaaaaaggtacagaagtttcctgaatatagagttcctacagaccccaaaattgacaagaaaattatcagaatggagcaggagaaagcttttaacatgctaaagaagaacttggtagatgctggtggtgttcttaggtggtatgtacagttacctacacagcaagctcatcagtatcatgaattagagactccctgcctcactttgtcaccttctccttttcctgtgtcttctcttgaagaagaggaaactgcagttagagatgagaattgtgcattaccctcacgtttacatcctcaagtagcacataagattcaagaattagtatcacagggaatagaacaagtgtatgcagtaaggaaacagctaagaaaatttgtggaaagggaactgttcaaacccgatgaggtacctgaaagacataatttatctttttttccaactgtaaatgatataaaaaatcacatccatgaggtacagaaatccttgagaaatggagatacggtatataactcagagattattccagcaacgcttcaatggactacagacagtgggaatattctcaaagagaccatgacagttacatttgcagaaggaaattcaccaggagaatcaattaccaccaaagtggaaacaaatcagaccaggggttctttgtctcctgagccaacccacttgctctcctcactctcctcatttcagcccaaaatatttacacaactacagggtttgcagttacaaccaaggtacacctctcctgatgaatcaccagctgtggtatcagtaaataaccagccgtcctctagtccttcaggacttctggatacaataggaagtgctgtaatgaataataattctctactgcttggtcaaagtcatagccttcaaagagatacatgcttaacccaaaacaatagtactgcctccaccatgggtaaccttccagaaccagatcaaaatctagttgcaatggacgagctggtagaagttggagatgttgaggatacagggaatctggaaggaactgttcatcggattctgttgggagatgtgcagactattccaatacagattatagacaaccactcagctcttattgaagaaaatccagaaagtaccatttctgtgagccaagttaaacaagaacccaaagaaccagcattgtctatggaagcaaaaaaaactgtggactataagaaattatctgctacataaattattgaagcttttcagaatttacaactctggtgacttctgatgtcttagaaaggaaggtgaatatagtcaaagcgtggcattgagataattggactgaagaccagtttgatgagaagcttttatttaaaactgatatatttgttgccagttccatatttttaccttccttaagagatgttttactcttcttattttgtataatttttatgctctttgattatctaataaggccagtatttcaaaagctgttctgaatttatccacagtaatatagtctgaacacaaatagtttacttaacttatccttggaaatattcaattttggttattacaaaacagaaaagaacaacagcaacaaaaacattgtgtgaatgtatgtttgtatgtgtgtatgtatatcatgaattttttttttaagttctgaaaaagaacttgttctctccttaaagttgtgaagaaattgttaattgccagacaggtaaga

SEQ ID NO: 102932 - DNA, 1950 bp, Artificial Sequence
  derived and/or modified sequence
atggagcagtcaaacgattctctacgggtcaaccacaatgatggcgaggagtcgaagacatctgcacaggtgttcgaaatgattgtagcctctccgacagaaaatggccaggttctgcgcgttattcctcctactcagacaggcatggcccaggtcataatcccccagggccagttagtggacgtgaactcccctagagatgttcccgaggaaaagccctccaacagaaatcttccaacagtgagagttgacacactggccgataatacctccaattacatactgcacccccagacttctttccccctccctaagaagagcgtgacaggcatgctcgaggagccccttctgggcccactgcagccactgagcagtaatacccccatttgggcgtgcagactgcgctcctgcgagaagatcggggattcttatagagggtactgcgtgagtgaaaccgagttggaatccgtgctcaccttccataagcaacagacgcaaagcgtatgggggacacgccagtccccgagccctgcaaaacccgcaactaggttgatgtggaaaagtcagtacgttccatatgacggaattccattcgtgaatgccggtagccgggcagtggtgatggaatgtcagtacggcccacggagaaagggctttcagttaaaaaaggtgagcgagcaggagagtaggagctgccagctgtacaaagctacctgccccgcacgaatctatattaaaaaggtccagaagttccctgagtatcgcgttcccactgaccccaagattgacaagaagatcatccggatggaacaagagaaggccttcaacatgttgaagaagaatctggtggatgccggaggagtgttgcgctggtatgttcagttgccgactcaacaggcccaccagtatcacgaactcgagaccccctgtctcacgctgagtccatccccttttccagttagcagcttagaggaggaggaaaccgccgtccgcgatgagaattgcgctctccctagtagattgcatccacaagtggcccataagattcaagagcttgtgtctcagggtatagaacaggtgtatgctgtgagaaagcagctgaggaaattcgtagaaagggaactgtttaagccggacgaagttccggagaggcataacctgtccttcttccccaccgtgaatgacatcaaaaatcacatccacgaggtgcaaaagtcccttcgaaacggagataccgtttataattcagagattatacccgcaactctccagtggacaactgattctggtaacattctgaaagagacaatgacagtaaccttcgcagaaggtaactcacctggggagtctatcaccacaaaggtggaaaccaatcagacacgcggatctctgtcacccgaaccgactcacctgttgtcctcactgtcctctttccagccgaaaatttttactcagctgcagggtttacagttgcaaccaaggtatacctctccagatgagtcacctgcagtggtctccgtgaataatcagcccagcagctccccgagcggcttgctggatactatcgggtctgccgtaatgaataataatagcctcctgctggggcagagccattcacttcaaagggatacctgcctgactcagaataattcgaccgcctcaaccatgggtaacctacccgaaccagatcaaaacctggtggcgatggacgagctggttgaggtcggcgatgtagaagatacaggtaatttggagggcaccgtgcaccgtatcctgctgggggacgtacagaccatcccaatccagataatagacaatcatagcgcccttatagaggagaaccccgaaagcaccattagcgtatcacaagtgaagcaggaacccaaggagcctgccctatctatggaggccaagaaaactgttgactacaaaaagctttctgctacatag

SEQ ID NO: 102933 - DNA, 1950 bp, Artificial Sequence
  derived and/or modified sequence
atggagcagagcaacgacagcctgagagtgaaccacaacgacggcgaggagagcaagaccagcgcccaggtgttcgagatgatcgtggccagccccaccgagaacggccaggtgctgagagtgatcccccccacccagaccggcatggcccaggtgatcatcccccagggccagctggtggacgtgaacagccccagagacgtgcccgaggagaagcccagcaacagaaacctgcccaccgtgagagtggacaccctggccgacaacaccagcaactacatcctgcacccccagaccagcttccccctgcccaagaagagcgtgaccggcatgctggaggagcccctgctgggccccctgcagcccctgagcagcaacacccccatctgggcctgcagactgagaagctgcgagaagatcggcgacagctacagaggctactgcgtgagcgagaccgagctggagagcgtgctgaccttccacaagcagcagacccagagcgtgtggggcaccagacagagccccagccccgccaagcccgccaccagactgatgtggaagagccagtacgtgccctacgacggcatccccttcgtgaacgccggcagcagagccgtggtgatggagtgccagtacggccccagaagaaagggcttccagctgaagaaggtgagcgagcaggagagcagaagctgccagctgtacaaggccacctgccccgccagaatctacatcaagaaggtgcagaagttccccgagtacagagtgcccaccgaccccaagatcgacaagaagatcatcagaatggagcaggagaaggccttcaacatgctgaagaagaacctggtggacgccggcggcgtgctgagatggtacgtgcagctgcccacccagcaggcccaccagtaccacgagctggagaccccctgcctgaccctgagccccagccccttccccgtgagcagcctggaggaggaggagaccgccgtgagagacgagaactgcgccctgcccagcagactgcacccccaggtggcccacaagatccaggagctggtgagccagggcatcgagcaggtgtacgccgtgagaaagcagctgagaaagttcgtggagagagagctgttcaagcccgacgaggtgcccgagagacacaacctgagcttcttccccaccgtgaacgacatcaagaaccacatccacgaggtgcagaagagcctgagaaacggcgacaccgtgtacaacagcgagatcatccccgccaccctgcagtggaccaccgacagcggcaacatcctgaaggagaccatgaccgtgaccttcgccgagggcaacagccccggcgagagcatcaccaccaaggtggagaccaaccagaccagaggcagcctgagccccgagcccacccacctgctgagcagcctgagcagcttccagcccaagatcttcacccagctgcagggcctgcagctgcagcccagatacaccagccccgacgagagccccgccgtggtgagcgtgaacaaccagcccagcagcagccccagcggcctgctggacaccatcggcagcgccgtgatgaacaacaacagcctgctgctgggccagagccacagcctgcagagagacacctgcctgacccagaacaacagcaccgccagcaccatgggcaacctgcccgagcccgaccagaacctggtggccatggacgagctggtggaggtgggcgacgtggaggacaccggcaacctggagggcaccgtgcacagaatcctgctgggcgacgtgcagaccatccccatccagatcatcgacaaccacagcgccctgatcgaggagaaccccgagagcaccatcagcgtgagccaggtgaagcaggagcccaaggagcccgccctgagcatggaggccaagaagaccgtggactacaagaagctgagcgccacctag

SEQ ID NO: 102934 - protein, 637 aa, Artificial Sequence
  derived and/or modified sequence
MLEAWNLNLSHYLKMIVASPTENGQVLRVIPPTQTGMAQVIIPQGQLVDVNSPRDVPEEKPSNRNLPTVRVDTLADNTSNYILHPQTSFPLPKKSVTGMLEEPLLGPLQPLSSNTPIWACRLRSCEKIGDSYRGYCVSETELESVLTFHKQQTQSVWGTRQSPSPAKPATRLMWKSQYVPYDGIPFVNAGSRAVVMECQYGPRRKGFQLKKVSEQESRSCQLYKATCPARIYIKKVQKFPEYRVPTDPKIDKKIIRMEQEKAFNMLKKNLVDAGGVLRWYVQLPTQQAHQYHELETPCLTLSPSPFPVSSLEEEETAVRDENCALPSRLHPQVAHKIQELVSQGIEQVYAVRKQLRKFVERELFKPDEVPERHNLSFFPTVNDIKNHIHEVQKSLRNGDTVYNSEIIPATLQWTTDSGNILKETMTVTFAEGNSPGESITTKVETNQTRGSLSPEPTHLLSSLSSFQPKIFTQLQGLQLQPRYTSPDESPAVVSVNNQPSSSPSGLLDTIGSAVMNNNSLLLGQSHSLQRDTCLTQNNSTASTMGNLPEPDQNLVAMDELVEVGDVEDTGNLEGTVHRILLGDVQTIPIQIIDNHSALIEENPESTISVSQVKQEPKEPALSMEAKKTVDYKKLSAT

SEQ ID NO: 102935 - DNA, 1914 bp, Artificial Sequence
  derived and/or modified sequence
atgctggaagcgtggaacttaaacctctctcattaccttaaaatgatagtggccagtccaacggagaacggtcaagtgctcagggtgatcccacccactcagacaggaatggctcaggttataataccccagggccagctggtggatgtcaactctcctagggacgtcccggaggagaaaccctctaacagaaatctgccaacggtacgtgttgacacgttagcggacaacactagcaactatatactccacccccagaccagcttcccactgccaaagaagtcagttacggggatgctggaagaacccctactgggcccgctccagccccttagctccaatacgccaatctgggcctgtcgtctgaggagttgtgagaagatcggcgatagttacagagggtactgcgtgagcgagactgaactggagtcagtcctgaccttccacaagcaacagacacagtctgtctggggaacaagacagtccccatcccctgccaaaccagccactcgtctgatgtggaagtcgcagtacgtgccttatgatggaataccctttgtgaacgccggaagccgcgccgtagtgatggagtgccagtatggtccacgaagaaagggctttcaactgaagaaggtgtctgagcaagagagcagaagctgtcagctgtataaagccacttgtcctgcacgaatctatattaaaaaggtgcagaagttccccgagtaccgagttcctacagatcccaagattgacaagaaaatcattcgaatggagcaggagaaggcatttaacatgctgaagaagaacctggttgatgcaggcggcgtgctgcggtggtacgtacaacttccaactcagcaggctcatcagtaccacgaactggaaacaccatgcctgactctgagtcctagtccgttcccagtctccagtctcgaagaagaggagacagcagtgcgagacgagaattgcgccctgccatcgcggctgcatccgcaggtggcacacaagatccaggaacttgtgtcgcaagggatcgagcaggtgtacgccgttcggaaacagctgcgaaagttcgtggaacgcgagctgttcaaacctgacgaggtgcccgagaggcataacctctctttctttcctaccgtcaatgacattaaaaaccacattcacgaagttcagaagtccctgaggaatggggataccgtgtataatagcgagatcatccccgccacactgcaatggactacggacagcggcaacattttaaaggaaactatgacggttacttttgctgaaggtaatagcccgggggagagcatcaccaccaaggttgaaactaaccagactcgaggatctctgagcccggagcccacccatctgttgagttcgttgagctctttccagcctaagatcttcactcagttacagggcctgcagttgcaaccacgctacacaagtccagacgagagcccggcagtcgtgtcagtcaataaccagcctagttcgtctcccagcggcctgttggacacaatcgggtcggctgttatgaataataacagccttctgttgggccagagccactctttgcagagggacacatgtctgactcagaataacagcacagccagcaccatgggcaacctcccagaacctgaccagaatctagtggccatggatgagctggtggaggtaggagacgtcgaggatactggcaatctggagggcaccgttcatcgcatattgcttggcgacgtgcagacgatccccatccaaatcatcgataaccattccgcccttatcgaggagaaccctgagagcactatttccgtgtcacaagtcaagcaggagccgaaagaacccgccctgtccatggaagctaaaaaaacagtggactataaaaagctttccgccacctag

SEQ ID NO: 102936 - DNA, 1914 bp, Artificial Sequence
  derived and/or modified sequence
atgctggaggcctggaacctgaacctgagccactacctgaagatgattgtggccagccccacagaaaatggccaggtgctgcgggtcatcccccccacccagacaggcatggcccaggtgatcatcccccagggccagctggtggatgtgaacagccccagagatgtgcctgaggagaagcccagcaacagaaacctgcccaccgtgcgggtggacaccctggccgacaacaccagcaactacatcctgcacccccagaccagcttccccctgcccaagaagtctgtgacaggcatgctggaggagcccctgctgggccccctgcagcccctgagcagcaacacccccatctgggcctgccgcctgcggagctgtgagaagatcggggacagctaccggggctactgtgtgtctgaaacagagctggagagcgtgctgaccttccacaagcagcagacccagagcgtgtggggcacccggcagagccccagccctgccaagccagccacccggctgatgtggaagagccagtatgtgccctatgatggcatcccctttgtgaatgccggcagcagagctgtggtgatggagtgccagtatggccccaggaggaagggcttccagctgaagaaggtgtctgagcaggagagccgcagctgccagctgtacaaggccacctgcccagcccgcatctacatcaagaaggtgcagaagtttcctgagtacagagtgcccacagaccccaagattgacaagaagatcatccgcatggagcaggagaaggccttcaacatgctgaagaagaacctggtggatgctggaggagtgctgcgctggtacgtgcagctgcccacccagcaggcccaccagtaccacgagctggagaccccctgcctgaccctgagccccagccccttccctgtgagcagcctggaggaggaggagacagctgtgagagatgagaactgtgccctgcccagccggctgcacccccaggtggcccacaagatccaggagctggtgtcccagggcatcgagcaggtgtatgctgtgaggaagcagctgaggaagtttgtggagcgggagctgttcaagccagatgaggtgcctgagcggcacaacctgtccttcttccccaccgtgaatgacatcaagaaccacatccacgaggtgcagaagagcctgagaaatggagacacagtgtacaacagcgagatcatcccagccaccctgcagtggaccacagattctggcaacatcctgaaggagaccatgacagtgacctttgctgagggcaacagccctggagagagcatcaccaccaaggtggagaccaaccagacccggggcagcctgagccctgagcccacccacctgctgagcagcctgagcagcttccagcccaagatcttcacccagctgcagggcctgcagctgcagccccgctacaccagcccagatgagagccctgctgtggtgtctgtgaacaaccagcccagcagcagccccagcggcctgctggacaccatcggcagcgctgtgatgaacaacaacagcctgctgctgggccagagccacagcctgcagagggacacctgcctgacccagaacaacagcacagccagcaccatgggcaacctgcctgagccagaccagaacctggtggccatggatgagctggtggaggtgggagatgtggaggacaccggcaacctggagggcaccgtgcaccgcatcctgctgggagatgtgcagaccatccccatccagatcatcgacaaccacagcgccctgattgaagaaaatcctgagagcaccatctctgtgtcccaggtgaagcaggagcccaaggagcccgccctgtccatggaggccaagaagacagtggactacaagaagctgagcgccacctag

SEQ ID NO: 102937 - DNA, 1914 bp, Artificial Sequence
  derived and/or modified sequence
atgctggaggcctggaacctgaacctgagccactacctgaagatgatcgtggcatcccctactgagaacggtcaggtgcttcgggtgatccccccaactcagaccggcatggctcaggtgataatccctcaagggcagctcgtggatgtgaactctccccgcgacgtgccagaggagaaaccaagtaatcgcaaccttcccacggtacgggtagatacactggccgataatacgtcaaactatatcctccacccacagacatcctttcctctcccaaaaaaatcagtgactggcatgttggaggaacctttgctgggaccactgcaacccctatccagcaacacacccatttgggcttgtcgtttgagatcttgcgaaaagatcggcgattcctaccgggggtattgcgtgtctgaaacggagctagaaagcgttttgacctttcataagcagcagacacagtcagtatggggtacccgccaaagccctagtcctgccaagcctgccacacgtctgatgtggaagtcccagtacgtcccatatgacggcatacccttcgtgaacgcaggttcaagggccgtggttatggagtgtcagtacggtccacgcagaaaaggctttcagctcaaaaaggtatctgaacaggaaagccgttcctgccagctttacaaggcaacctgtcccgctaggatttatatcaagaaggtccaaaaattcccagaataccgtgtgccaacagacccaaagatcgataagaagattatccggatggaacaggagaaagctttcaacatgcttaagaaaaatctagttgatgccggcggggtcctgagatggtacgtacagctgccaacccagcaggctcaccagtaccacgagctggagaccccatgcctaaccctatctccaagcccgtttcccgtgtcttccctggaggaagaagagactgcagtcagggatgaaaactgtgcactgccgtccaggctgcatccccaggtagctcataagatccaagagctggtgagtcaggggatcgaacaggtgtacgcagttcgcaagcagctgcggaagttcgttgaacgggagctttttaagcctgatgaagttcctgaacgccacaacttgagtttttttcccactgtaaatgacatcaaaaatcacattcacgaagtccagaagagccttaggaatggtgacaccgtttacaacagcgagatcatcccggccactttgcagtggactactgactctgggaatatactcaaggagacgatgacggtgacattcgccgaaggaaacagcccaggcgaaagcattacaactaaggtggaaacaaaccagactagggggtctctctcaccagagcctactcatcttcttagctccttgtcttcattccaacctaagatcttcacacaattacagggactgcagctgcaaccccgctatacatctcctgatgagtctccagccgttgtgagcgtgaacaaccagccatcatcttccccgtcaggattgctggatacaatcggttccgcagtcatgaataataacagcctcctcctcggacagagccatagcttgcagcgggatacatgtctcacacagaacaacagtactgcaagtactatgggaaatttgcccgaaccggatcagaacctcgtcgctatggatgagctggtcgaagtcggcgatgttgaggacacggggaacctggaaggaacggtccaccgaattctgctcggggacgttcagactattcctatccagattatcgacaatcacagtgcattaatcgaggagaaccccgagtcgaccatctcagtaagccaagtcaaacaggagcccaaagaacccgctctgtccatggaagccaagaagacggtggattacaagaagctgtctgcaacgtag

SEQ ID NO: 102938 - DNA, 2099 bp, Artificial Sequence
  derived and/or modified sequence
attatgctggtctccatggcggggcctcggagccaagacgagagaaaatgctgctgtgaagacccaattaaagctttcacataaatgaagctacagctatcatgatttagtgcccccaaaaggaagaacttcagtggacaagaaaggacatttctgggggtagtagaatgcttgaggcctggaatttaaacctgagccactatctgaagatgatcgttgccagcccaacagaaaatggacaggtacttcgtgtaattccacctacccagacaggaatggcacaagtgattatacctcaggggcaacttgtggatgtgaatagtcctcgggatgtccctgaagagaaacccagtaacagaaacttaccaactgtaagagtggatactctagcagacaataccagcaattacattcttcatcctcaaacatccttcccattgcccaaaaagtcagtgaccggaatgctggaagaaccccttctggggcctcttcagccactttcttctaatacacctatatgggcctgccgtcttaggagctgtgagaaaattggagattcataccgtggctactgtgtaagtgagactgaattagaaagtgtcctaacatttcacaagcagcaaacacagagtgtttgggggacccgtcagtctccaagcccagccaagcctgctacacgcttgatgtggaaatcccagtatgttccatatgatggaatcccatttgttaatgcagggagtagagctgtggtaatggagtgtcagtatgggccaagaagaaaaggtttccagttaaaaaaagtcagtgagcaggaaagcaggtcttgtcagctctacaaagccacttgtccagctcggatttacattaaaaaggtacagaagtttcctgaatatagagttcctacagaccccaaaattgacaagaaaattatcagaatggagcaggagaaagcttttaacatgctaaagaagaacttggtagatgctggtggtgttcttaggtggtatgtacagttacctacacagcaagctcatcagtatcatgaattagagactccctgcctcactttgtcaccttctccttttcctgtgtcttctcttgaagaagaggaaactgcagttagagatgagaattgtgcattaccctcacgtttacatcctcaagtagcacataagattcaagaattagtatcacagggaatagaacaagtgtatgcagtaaggaaacagctaagaaaatttgtggaaagggaactgttcaaacccgatgaggtacctgaaagacataatttatctttttttccaactgtaaatgatataaaaaatcacatccatgaggtacagaaatccttgagaaatggagatacggtatataactcagagattattccagcaacgcttcaatggactacagacagtgggaatattctcaaagagaccatgacagttacatttgcagaaggaaattcaccaggagaatcaattaccaccaaagtggaaacaaatcagaccaggggttctttgtctcctgagccaacccacttgctctcctcactctcctcatttcagcccaaaatatttacacaactacagggtttgcagttacaaccaaggtacacctctcctgatgaatcaccagctgtggtatcagtaaataaccagccgtcctctagtccttcaggacttctggatacaataggaagtgctgtaatgaataataattctctactgcttggtcaaagtcatagccttcaaagagatacatgcttaacccaaaacaatagtactgcctccaccatgggtaaccttccagaaccagatcaaaatctagttgcaatggacgagctggtagaagttggagatgttgaggatacagggaatctggaaggaactgttcatcggattctgttgggagatgtgcagactattccaatacagattatagacaaccactcagctcttattgaagaaaatccagaaagtaccatttctgtgagccaagttaaacaagaacccaaagaaccagcattgtctatggaagcaaaaaaaactgtggactataagaaattatctgctacataaattattgaagcttttcag

SEQ ID NO: 102939 - DNA, 1914 bp, Artificial Sequence
  derived and/or modified sequence
atgctggaagcttggaatctgaatctctctcattacctcaagatgattgtcgcctcccccacagaaaacggtcaggtgcttcgcgtgatacctcctactcagactggtatggcgcaagtcatcataccgcaaggccaactggtggacgtgaacagccccagggacgtgcccgaggaaaagccaagtaataggaacttgccaacggtgcgagttgataccctcgccgacaacacctcaaactacatcctccatccccagacatctttccctctgccaaaaaaatcagtgaccgggatgttagaagagcccttactcgggcctttacaaccactcagttctaacaccccaatatgggcctgccgtctgaggtcttgcgagaagattggcgactcataccgaggctactgcgtcagcgagacagagctcgaaagcgtgttgaccttccacaaacagcagacccagtcagtgtgggggacacgccagagcccttcacctgccaaaccagccacgcgcctaatgtggaagagtcagtatgtgccgtatgatggaatcccattcgtcaatgcgggaagccgggcagtggtgatggagtgccaatacggacctaggcggaaaggctttcagctgaagaaggttagcgaacaggaatccagatcttgccagttgtataaagcgacctgtcccgctaggatatacatcaagaaggtacagaaattccctgaatatagggttccaaccgatcccaaaatagacaagaaaataatccgaatggaacaagagaaagccttcaatatgcttaagaaaaatctcgtagacgccggaggagtattgagatggtatgtccagctcccgacacagcaagcccaccagtatcatgagttggagactccctgtttgacacttagtcctagccccttccctgtcagtagcctggaggaagaggaaaccgccgtgcgggacgaaaactgcgccttaccaagtagattgcatcctcaggtggctcacaaaatccaggaattggtgtctcagggcattgagcaggtctatgccgtgcggaaacaactgcgtaagtttgtggagcgggagctgtttaaaccagatgaggtccccgaacgtcataatctcagtttcttcccgacagttaatgatattaaaaatcacatccacgaggttcagaagagtttaagaaacggggacacggtctataattccgagatcataccggctaccctgcagtggaccacagactctggcaatatcctgaaagaaaccatgaccgttacatttgctgagggtaattccccaggcgagtctattaccactaaagtggaaaccaaccagacaaggggctcactgagtccagagccaacacatctgcttagttctctcagctcattccagcctaagattttcacccagctacaaggtctgcagcttcagccgagatatacaagcccggatgaatctcccgctgtcgtctccgtgaataatcagcccagcagttccccttctggactgctggacacaatcggctcagccgtgatgaacaataattccctccttttaggtcagtcacattctctgcagcgggacacctgtttaactcaaaataactcgacggcgtctactatgggcaacctgcccgagcctgatcaaaatctggtagccatggacgagctcgtagaggtaggagatgtggaagatacaggaaatctggaaggcacggtccaccgtatcctgctgggcgacgtgcaaacgatccctatccagattattgacaaccacagcgcattgatcgaagagaatccagagagcacgatctccgtttctcaggtgaagcaagagccaaaagagccagctctgagtatggaagccaagaaaactgtggattacaagaaactctcagccacctag

SEQ ID NO: 102940 - DNA, 1914 bp, Artificial Sequence
  derived and/or modified sequence
atgctggaggcctggaacctgaacctgagccactacctgaagatgatcgtggccagccccaccgagaacggccaggtgctgagagtgatcccccccacccagaccggcatggcccaggtgatcatcccccagggccagctggtggacgtgaacagccccagagacgtgcccgaggagaagcccagcaacagaaacctgcccaccgtgagagtggacaccctggccgacaacaccagcaactacatcctgcacccccagaccagcttccccctgcccaagaagagcgtgaccggcatgctggaggagcccctgctgggccccctgcagcccctgagcagcaacacccccatctgggcctgcagactgagaagctgcgagaagatcggcgacagctacagaggctactgcgtgagcgagaccgagctggagagcgtgctgaccttccacaagcagcagacccagagcgtgtggggcaccagacagagccccagccccgccaagcccgccaccagactgatgtggaagagccagtacgtgccctacgacggcatccccttcgtgaacgccggcagcagagccgtggtgatggagtgccagtacggccccagaagaaagggcttccagctgaagaaggtgagcgagcaggagagcagaagctgccagctgtacaaggccacctgccccgccagaatctacatcaagaaggtgcagaagttccccgagtacagagtgcccaccgaccccaagatcgacaagaagatcatcagaatggagcaggagaaggccttcaacatgctgaagaagaacctggtggacgccggcggcgtgctgagatggtacgtgcagctgcccacccagcaggcccaccagtaccacgagctggagaccccctgcctgaccctgagccccagccccttccccgtgagcagcctggaggaggaggagaccgccgtgagagacgagaactgcgccctgcccagcagactgcacccccaggtggcccacaagatccaggagctggtgagccagggcatcgagcaggtgtacgccgtgagaaagcagctgagaaagttcgtggagagagagctgttcaagcccgacgaggtgcccgagagacacaacctgagcttcttccccaccgtgaacgacatcaagaaccacatccacgaggtgcagaagagcctgagaaacggcgacaccgtgtacaacagcgagatcatccccgccaccctgcagtggaccaccgacagcggcaacatcctgaaggagaccatgaccgtgaccttcgccgagggcaacagccccggcgagagcatcaccaccaaggtggagaccaaccagaccagaggcagcctgagccccgagcccacccacctgctgagcagcctgagcagcttccagcccaagatcttcacccagctgcagggcctgcagctgcagcccagatacaccagccccgacgagagccccgccgtggtgagcgtgaacaaccagcccagcagcagccccagcggcctgctggacaccatcggcagcgccgtgatgaacaacaacagcctgctgctgggccagagccacagcctgcagagagacacctgcctgacccagaacaacagcaccgccagcaccatgggcaacctgcccgagcccgaccagaacctggtggccatggacgagctggtggaggtgggcgacgtggaggacaccggcaacctggagggcaccgtgcacagaatcctgctgggcgacgtgcagaccatccccatccagatcatcgacaaccacagcgccctgatcgaggagaaccccgagagcaccatcagcgtgagccaggtgaagcaggagcccaaggagcccgccctgagcatggaggccaagaagaccgtggactacaagaagctgagcgccacctag

SEQ ID NO: 102941 - protein, 845 aa, Artificial Sequence
  derived and/or modified sequence
MAQVWRRVSEHFWESETTTSKSTSGLTDITWSSSGSDLSDEDKTLSQLQRDELQFIDWEIDSDRAEASDCDEFEDDEGAVEISDCASCASNQSLTSDEKLSELPKPSSIEILEYSSDSEKEDDLENVLLIDSESPHKYHVQFASDARQIMERLIDPRTKSTETILHTPQKPTAKFPRTPENSAKKKLLRGGLAERLNGLQNRERSAISLWRHQCISYQKTLSGRKSGVLTVKILELHEECAMQVAMCEQLLGSPATSSSQSVAPRPGAGLKVLFTKETAGYLRGRPQDTVRIFPPWQKLIIPSGSCPVILNTYFCEKVVAKEDSEKTCEVYCPDIPLPRRSISLAQMFVIKGLTNNSPEIQVVCSGVATTGTAWTHGHKEAKQRIPTSTPLRDSLLDVVESQGAASWPGAGVRVVVQRVYSLPSRDSTRGQQGASSGHTDPAGTRACLLVQDACGMFGEVHLEFTMSKARQLEGKSCSLVGMKVLQKVTRGRTAGIFSLIDTLWPPAIPLKTPGRDQPCEEIKTHLPPPALCYILTAHPNLGQIDIIDEDPIYKLYQPPVTRCLRDILQMNDLGTRCSFYATVIYQKPQLKSLLLLEQREIWLLVTDVTLQTKEERDPRLPKTLLVYVAPLCVLGSEVLEALAGAAPHSLFFKDALRDQGRIVCAERTVLLLQKPLLSVVSGASSCELPGPVMLDSLDSATPVNSICSVQGTVVGVDESTAFSWPVCDMCGNGRLEQRPEDRGAFSCGDCSRVVTSPVLKRHLQVFLDCRSRPQCRVKVKLLQRSISSLLRFAAGEDGSYEVKSVLGKEVGLLNCFVQSVTAHPTSCIGLEEIELLSAGGASAEH

SEQ ID NO: 102942 - DNA, 2538 bp, Artificial Sequence
  derived and/or modified sequence
atggcccaggtgtggagaagagtgagcgagcacttctgggagagcgagaccaccaccagcaagagcaccagcggcctgaccgacatcacctggagcagcagcggcagcgacctgagcgacgaggacaagaccctgagccagctgcagagagacgagctgcagttcatcgactgggagatcgacagcgacagagccgaggccagcgactgcgacgagttcgaggacgacgagggcgccgtggagatcagcgactgcgccagctgcgccagcaaccagagcctgaccagcgacgagaagctgagcgagctgcccaagcccagcagcatcgagatcctggagtacagcagcgacagcgagaaggaggacgacctggagaacgtgctgctgatcgacagcgagagcccccacaagtaccacgtgcagttcgccagcgacgccagacagatcatggagagactgatcgaccccagaaccaagagcaccgagaccatcctgcacaccccccagaagcccaccgccaagttccccagaacccccgagaacagcgccaagaagaagctgctgagaggcggcctggccgagagactgaacggcctgcagaacagagagagaagcgccatcagcctgtggagacaccagtgcatcagctaccagaagaccctgagcggcagaaagagcggcgtgctgaccgtgaagatcctggagctgcacgaggagtgcgccatgcaggtggccatgtgcgagcagctgctgggcagccccgccaccagcagcagccagagcgtggcccccagacccggcgccggcctgaaggtgctgttcaccaaggagaccgccggctacctgagaggcagaccccaggacaccgtgagaatcttccccccctggcagaagctgatcatccccagcggcagctgccccgtgatcctgaacacctacttctgcgagaaggtggtggccaaggaggacagcgagaagacctgcgaggtgtactgccccgacatccccctgcccagaagaagcatcagcctggcccagatgttcgtgatcaagggcctgaccaacaacagccccgagatccaggtggtgtgcagcggcgtggccaccaccggcaccgcctggacccacggccacaaggaggccaagcagagaatccccaccagcacccccctgagagacagcctgctggacgtggtggagagccagggcgccgccagctggcccggcgccggcgtgagagtggtggtgcagagagtgtacagcctgcccagcagagacagcaccagaggccagcagggcgccagcagcggccacaccgaccccgccggcaccagagcctgcctgctggtgcaggacgcctgcggcatgttcggcgaggtgcacctggagttcaccatgagcaaggccagacagctggagggcaagagctgcagcctggtgggcatgaaggtgctgcagaaggtgaccagaggcagaaccgccggcatcttcagcctgatcgacaccctgtggccccccgccatccccctgaagacccccggcagagaccagccctgcgaggagatcaagacccacctgcccccccccgccctgtgctacatcctgaccgcccaccccaacctgggccagatcgacatcatcgacgaggaccccatctacaagctgtaccagccccccgtgaccagatgcctgagagacatcctgcagatgaacgacctgggcaccagatgcagcttctacgccaccgtgatctaccagaagccccagctgaagagcctgctgctgctggagcagagagagatctggctgctggtgaccgacgtgaccctgcagaccaaggaggagagagaccccagactgcccaagaccctgctggtgtacgtggcccccctgtgcgtgctgggcagcgaggtgctggaggccctggccggcgccgccccccacagcctgttcttcaaggacgccctgagagaccagggcagaatcgtgtgcgccgagagaaccgtgctgctgctgcagaagcccctgctgagcgtggtgagcggcgccagcagctgcgagctgcccggccccgtgatgctggacagcctggacagcgccacccccgtgaacagcatctgcagcgtgcagggcaccgtggtgggcgtggacgagagcaccgccttcagctggcccgtgtgcgacatgtgcggcaacggcagactggagcagagacccgaggacagaggcgccttcagctgcggcgactgcagcagagtggtgaccagccccgtgctgaagagacacctgcaggtgttcctggactgcagaagcagaccccagtgcagagtgaaggtgaagctgctgcagagaagcatcagcagcctgctgagattcgccgccggcgaggacggcagctacgaggtgaagagcgtgctgggcaaggaggtgggcctgctgaactgcttcgtgcagagcgtgaccgcccaccccaccagctgcatcggcctggaggagatcgagctgctgagcgccggcggcgccagcgccgagcactag

SEQ ID NO: 102943 - DNA, 2538 bp, Artificial Sequence
  derived and/or modified sequence
atggcgcaggtctggaggcgggtgtcagagcacttctgggaatcagaaactacaacatccaaaagcacatctgggcttaccgatattacttggagcagttctgggtccgacctgtcagacgaggacaagactttgtctcagttgcagcgcgatgagctgcagttcatagactgggaaatcgactctgacagagctgaggcatctgattgtgacgaatttgaggatgatgagggtgccgtggaaatcagtgattgcgcctcttgcgccagcaatcagtccctaactagtgatgaaaaactgtctgaactccccaagccttcttccatcgaaatactcgaatacagcagcgattcagaaaaggaagacgacctggaaaatgtgctgctcatagacagcgaatctccgcacaaataccatgtccaattcgcttctgacgccagacagattatggaaaggcttattgacccccgcaccaaatctacggaaacaatcctgcacacgccacagaagcccacggcaaaattccctcgcacgcctgagaattcggctaagaaaaaactgctgaggggaggcctggctgagcgcctcaatggattacagaatcgcgagaggtccgcgattagtttgtggcggcatcagtgtatctcataccagaagacgctgtcaggcaggaaatctggcgtgctgacagttaaaattcttgagttgcacgaggagtgcgcaatgcaggtggcgatgtgtgagcagttacttgggagtcctgccaccagttcttcacaatcggtcgccccacgacctggagctggcctcaaggtcttatttaccaaagaaaccgccggttatttacgcgggaggcctcaggacaccgttaggatcttccccccatggcagaagcttattataccctctggatcttgccctgtgattcttaacacctacttttgtgaaaaagttgtggccaaggaggactcagagaagacctgtgaagtgtattgcccggacatacccctgccacgaaggtcaatctccctggcacaaatgttcgtgattaaaggattaaccaacaacagcccagagatacaagttgtgtgctcaggcgttgcaaccaccgggacagcttggacccatggccataaggaagcgaaacagagaatcccaactagcactcctctgcgggactctttgttggacgtggtcgaatcccagggcgctgcaagctggccaggcgctggagtaagagtagtggtccagagagtgtattctttgccttcccgggattctacaaggggccagcagggggcaagctccgggcatacagatcccgcggggacaagagcctgcttacttgtgcaggatgcttgcgggatgtttggcgaagtgcatttggagtttaccatgagcaaggcaaggcagctcgagggcaagtcctgctcactggtgggcatgaaggttctccagaaggtgactcgaggcagaacggccgggattttctccctgatcgacacgttgtggccaccagcaattccactgaaaactcccgggcgtgaccagccgtgcgaggagatcaagacacatctacccccacccgccctgtgctacatcttaactgctcatcccaacctgggacagattgatattatcgatgaggacccaatctataagctgtaccagcctcccgttacgaggtgcctgcgagatatactacagatgaacgacttgggaacccgttgttcattctatgccaccgttatttaccagaaaccgcagcttaaaagccttctgctgctggagcaacgtgaaatatggctgcttgtcaccgatgtgactctgcagacaaaggaggagagagatccccggttgcccaaaacccttctggtgtacgtggctcccctgtgcgttttgggcagtgaggtgttagaggctcttgcaggcgcggctccccattctttgttttttaaggacgctttgcgggaccagggccggatcgtctgcgctgaaagaactgtgctactgctccagaaacctctgctatctgtcgttagcggggcttcctcatgcgaacttcccggtcctgtgatgctcgatagcctcgattccgccactcctgttaactcaatttgctcggtacaggggaccgtggtaggtgtggacgagtcgacagccttttcatggcccgtgtgcgatatgtgcggaaatggccgtctggaacaacggccagaggaccgaggcgcgtttagctgcggcgactgttctcgtgtagtgactagccctgttttaaagagacatttgcaggttttccttgattgcaggtccagaccccagtgcagggtcaaggtgaaactcttgcaacgctcaatttcgtccttgctgcgctttgctgcaggggaggatggatcttacgaagtcaagtcagtgctgggcaaggaggtgggtctgcttaactgttttgtgcagtcggttacggcccaccctacctcctgtatcggtctcgaggaaattgaacttttgtccgctggtggcgcatctgcagagcattag

SEQ ID NO: 102944 - DNA, 2538 bp, Artificial Sequence
  derived and/or modified sequence
atggcccaggtgtggaggagagtgtctgagcacttctgggagagcgagaccaccaccagcaagagcaccagcggcctgacagacatcacctggagcagcagcggcagtgacctgagtgatgaggacaagaccctgagccagctgcagagagatgagctgcagttcatcgactgggagattgacagcgacagagctgaggccagtgactgtgatgaatttgaagatgatgagggcgctgtggagatcagtgactgtgccagctgtgccagcaaccagagcctgaccagtgatgagaagctgtctgagctgcccaagcccagcagcattgagatcctggagtacagcagtgacagcgagaaggaggatgacctggagaatgtgctgctgattgacagcgagagcccccacaagtaccacgtgcagtttgccagtgatgcccggcagatcatggagcggctgattgaccccaggaccaagagcacagagaccatcctgcacaccccccagaagcccacagccaagttccccaggaccccagagaacagcgccaagaagaagctgctgcggggcggcctggccgagcggctgaatggcctgcagaaccgggagaggtctgccatcagcctgtggaggcaccagtgcatctcctaccagaagaccctgagcggcaggaagagcggcgtgctgactgtgaagatcctggagctgcatgaagaatgtgccatgcaggtggccatgtgtgagcagctgctgggcagccctgccaccagcagcagccagagcgtggcccccaggcctggggccggcctgaaggtgctcttcaccaaggagacagctggctacctgcggggccggccccaggacacagtgcgcatcttccccccctggcagaagctgatcatccccagcggcagctgccctgtgatcctgaacacctacttctgtgagaaggtggtggccaaggaggacagcgagaagacctgtgaggtgtactgcccagacatccccctgcccaggaggagcatcagcctggcccagatgtttgtgatcaagggcctgaccaacaacagccctgagatccaggtggtgtgcagcggcgtggccaccaccggcacagcctggacccacggccacaaggaggccaagcagaggatccccaccagcacccccctgcgggacagcctgctggatgtggtggagagccagggcgccgcctcctggccaggggccggcgtgcgggtggtggtgcagagggtgtacagcctgcccagccgggacagcacccggggccagcagggcgccagcagcggccacacagatcctgctggcacccgggcctgcctgctggtgcaggatgcctgtggcatgtttggagaggtgcacctggagttcaccatgagcaaggcccggcagctggagggcaagagctgcagcctggtgggcatgaaggtgctgcagaaggtgacccggggccgcacagctggcatcttcagcctgattgacaccctgtggcccccagccatccccctgaagaccccaggccgggaccagccctgtgaggagatcaagacccacctgcccccaccagccctgtgctacatcctgacagcccaccccaacctgggccagattgacatcattgatgaggaccccatctacaagctgtaccagccccctgtgacccgctgcctgcgggacatcctgcagatgaatgacctgggcacccgctgcagcttctacgccaccgtcatctaccagaagccccagctgaagagcctgctgctgctggagcagcgggagatctggctgctggtgacagatgtgaccctgcagaccaaggaggagcgggacccccggctgcccaagaccctgctggtgtatgtggcccccctgtgtgtgctgggcagcgaggtgctggaggccctggccggggccgccccccacagcctcttcttcaaggatgccctgcgggaccagggccgcatcgtgtgtgccgagaggacagtgctgctgctgcagaagcccctgctgtctgtggtgtctggggccagcagctgtgagctgcccggccctgtgatgctggacagcctggacagcgccacccctgtgaacagcatctgcagcgtgcagggcaccgtggtgggcgtggatgagagcacagccttctcctggcctgtgtgtgacatgtgtggaaatggccgcctggagcagaggcctgaggacagaggagccttcagctgtggggactgcagccgggtggtgaccagccctgtgctgaagaggcacctgcaggtgttcctggactgccgcagccggccccagtgccgggtgaaggtgaagctgctgcagaggagcatcagcagcctgctgcgctttgctgctggggaggatggcagctatgaggtgaagtctgtgctgggcaaggaggtgggcctgctgaactgctttgtgcagagcgtgacagcccaccccaccagctgcatcggcctggaggagattgagctgctgtctgctgggggcgccagcgctgagcactag

SEQ ID NO: 102945 - DNA, 2538 bp, Artificial Sequence
  derived and/or modified sequence
atggcccaggtgtggcggcgggtgagcgagcacttctgggagagcgagactacaaccagtaagtcaaccagtgggctaaccgacattacatggagttcaagcgggagcgacctttctgatgaagacaaaacactcagccagctgcagagagatgaactgcaatttattgactgggagatagatagtgacagagccgaggcttccgactgtgacgagtttgaagacgatgagggggctgtggagatttcggactgcgcgagctgcgcgagcaaccaatccttaaccagcgatgagaagcttagcgagcttcctaaaccctccagcattgaaatcctggagtatagttcagactcggagaaagaagacgatctagagaatgtgcttctcatcgatagcgaaagtccacataagtatcacgtccagttcgccagtgacgcgcgccagatcatggaaagacttattgatcctagaacgaaatcaaccgagaccatacttcatacccctcagaagccaaccgccaagtttcccagaacacccgagaattccgcgaaaaagaaactgttgagaggcggactagctgagcgcctgaatggactccaaaacagagaacgaagcgcgatcagtctgtggcgccatcagtgcattagttaccagaagaccctgagcggccgcaagagtggggttctaacagtcaagattttggagctgcatgaggaatgtgccatgcaggtagccatgtgcgagcaactgctcggcagccccgccacctcaagcagtcagtccgttgccccgcgacctggagccggcctaaaggtgctgttcacgaaggaaacagccggctatttgaggggccgcccccaggacaccgtgcggatttttccaccatggcagaaactgatcataccctctggcagctgccccgttattctgaatacatacttctgcgaaaaagtggtggccaaagaagacagtgaaaagacatgtgaggtctattgccctgatattccactcccccgccgcagtatcagtctcgctcagatgttcgtaataaaagggttaacaaataactctccagagatccaggtcgtgtgctcaggtgtcgcaaccactggtacagcctggacgcacggccataaggaggccaagcagaggattccaaccagtacccccctccgggactccctgttagatgtggtggagtcacagggggccgctagctggccaggtgcaggcgttcgagtggtcgtccagcgggtctattcactgccttctagggactcaactcggggccagcaaggcgcaagcagcggacacaccgatcccgctggcacccgagcctgtcttctcgtccaggacgcctgtggtatgttcggcgaggtgcacctggagtttacaatgtctaaggctcggcaactcgaagggaagtcttgctccctcgtcggcatgaaagtcctgcagaaggtgacaagaggcagaacggctgggattttctcgctcatcgacaccttgtggccacctgccatccctcttaagacccctgggagagaccagccgtgcgaggaaatcaaaacgcatctgccaccccctgccctgtgttacatcctcactgctcatccaaatctgggccaaattgatatcattgatgaggacccaatctacaaactgtatcagccgcccgtcacccgttgtttgcgggacattttacagatgaatgaccttggaacacgttgttctttctatgccacagtgatttaccagaagccccagctgaagagcctgttactgttggagcagcgggagatttggctgctggtgacagacgtaactctccagacgaaagaagagcgcgacccccgtttaccaaaaactttgctcgtctatgtggcgcccctgtgtgtgcttggctctgaagtcctggaggccctcgccggagcggccccccattcccttttctttaaagacgccctgcgcgaccagggccgaatcgtttgcgctgaaagaactgtgctgctgctgcagaaaccgctgctgtcagtggtcagcggtgcgagctcatgcgagctccccgggcccgtgatgttagattctctggatagcgccacacccgttaactctatttgcagcgtacaggggaccgtcgtcggagtcgacgagtctaccgccttctcttggcctgtgtgtgatatgtgtggtaatggtcgattggaacaacgccccgaggatcgcggcgccttctcctgcggcgattgctcaagggtcgtgactagcccagtgcttaagcgacacttgcaggtgttcttagactgtagatctcgcccccagtgtagggtgaaggtgaaactcctgcaaaggagcatctcctcacttctgagattcgccgccggtgaagacggcagctatgaggttaagtcagttctgggcaaggaggtgggcctgctcaattgtttcgtgcagagcgtgacggcacatccaacaagctgcatcggacttgaagagattgaactgttgagtgcgggcggagcgtccgccgagcactag

SEQ ID NO: 102946 - DNA, 2538 bp, Artificial Sequence
  derived and/or modified sequence
atggcccaggtctggcgtagagtcagcgagcatttctgggaaagcgagacgacaacctctaaatccacctccggattgactgacatcacatggagctcctcgggttccgacctgagcgatgaagacaagactctgtctcagctgcagcgtgacgaactgcagtttattgattgggaaattgactccgaccgtgccgaagccagcgactgtgatgagttcgaggatgacgagggcgctgtggagatctctgactgtgcgtcctgcgcgagcaaccaaagcctgacaagcgatgaaaagctatccgagctcccaaaacccagcagcattgagatccttgaatattctagcgattcagaaaaggaagacgacctggaaaacgtgctgttgatagatagcgaatctccacacaagtatcacgtccagttcgcttcggacgcacggcagattatggaaaggctgatcgatcctaggacaaaaagtacggaaacaatcctccatactccacagaaacccacagcaaaattcccacggacgccagagaacagcgcaaagaagaagttgctgcgtgggggactcgccgaacgattaaatggccttcagaaccgggaacgaagtgctatatccctgtggcgccaccagtgtatatcatatcagaaaaccttgagcggaagaaagagcggcgtgctcacagtgaaaatcctcgagctgcacgaagaatgcgctatgcaggtggctatgtgcgagcagttgctcggatcccctgccacaagctcaagtcagtctgttgctccacgacccggtgcgggtcttaaggttctgtttactaaggaaaccgcaggttacctacgcggtagacctcaagatacagtccgcatattccctccctggcagaagttgataataccttcgggtagttgccccgtcatcctcaatacgtatttttgcgaaaaggtggttgccaaggaggatagcgagaaaacctgtgaagtatactgcccagatatccccctgccaagaagaagcatttctttagctcagatgttcgttataaagggactaactaataattccccagagatacaggttgtttgctctggagtcgcgaccactggcacagcttggacccacgggcataaagaagcaaagcagagaattcccacatccactcccctgagggactctctgctagatgtcgttgagtcccagggggctgcttcatggccaggtgccggtgtccgcgtggtggtgcagcgggtatatagtttgccaagcagagatagcactcgtggccagcagggagctagcagcggtcacacggatcccgctggcacaagagcttgtctgctggtccaggacgcatgtggcatgttcggggaggtgcaccttgaatttacaatgtcaaaagcccgacaactggaggggaaaagctgctctctggtggggatgaaagtactgcaaaaggtgacacgcggtagaacagcaggtatttttagcctgattgacaccttgtggccacctgctatcccccttaaaactcccggacgcgatcaaccatgcgaggagataaaaacccatcttccgcctcccgctctgtgctacattctgaccgctcaccctaacctcggccagatcgatatcatcgatgaggaccccatatacaagttataccagcctcctgtcacacgttgtctgcgggatattctgcagatgaacgatctaggcaccaggtgtagcttctatgcaaccgtgatttaccagaagcctcagctgaaaagcctactgctcctggagcagcgcgaaatttggcttctcgtaacagatgtgacactccagaccaaggaagagcgcgatcccaggctgcctaagacattgttagtatacgtagccccactatgtgtgctcggatcagaggtgctagaggcgctagcaggcgcagcgccacacagcttgtttttcaaagacgcactgcgggatcagggacgtatcgtctgtgctgaaaggaccgtgctgctgctccagaagcccctacttagcgtggtgtccggagcatcgagctgcgaactgcccggtccagtaatgctggactccctggactctgcgacacctgttaacagcatttgctcagtacagggtacagtcgtgggagttgatgaatccacggccttctcctggccggtctgtgacatgtgcgggaatgggcgactggagcagaggcccgaggacagaggagccttttcctgtggcgactgctcccgggtagtcacttccccagtgctgaagaggcacctgcaggtgtttctggattgtcgtagtcgaccacaatgtagggtgaaggttaaactgctgcagaggtcaatctcctctctgctcagatttgctgcgggtgaagatggaagctatgaagtgaagtctgttttggggaaggaggtgggactgcttaactgttttgttcagagtgtgaccgctcatcctacatcatgcataggactcgaagagattgagctgttaagcgcaggaggggcatcagctgaacattag

SEQ ID NO: 102947 - DNA, 2745 bp, Artificial Sequence
  derived and/or modified sequence
gagatgccccgcggcagccgcgctcggggctctaagagaaaaaggagttggaatacagaatgcccatcctttccaggagaaagaccactgcaggtcagaagagcaggtctcaggacagcaggggcagctgcctctctctctgaagcatggctcaggtgtggagaagggtttcagaacacttctgggaatccgaaaccaccacatctaaaagcaccagtgggcttacagacataacatggagctccagtggaagtgatttgtcggatgaagataagacactttctcagttacagagagatgaattacagtttatcgactgggagattgacagtgacagggcagaggctagtgactgtgatgaatttgaagatgacgagggtgctgtggaaatctcagactgtgcttcttgtgcaagtaatcagtctttgacaagtgatgagaagctgtcggagcttcccaagccaagttctatagaaattttagagtattcatcagatagtgaaaaagaagatgatttggaaaatgtcctactcattgattcagaatcccctcacaaataccacgtgcagtttgcatcggatgcaagacagattatggagagactgatagatccaaggacaaaatcaacagagaccattttgcatacacctcagaaacccacagctaagtttcccaggactccagaaaattcagcaaagaagaagcttttaagaggtggactagcagaaagactaaatggactgcagaatcgagagagatctgctatttctttgtggagacatcaatgtatttcttaccaaaagacactttcaggtagaaaatctggtgtattaactgtgaaaattttagagctgcatgaggaatgtgccatgcaagttgccatgtgtgagcagttattggggtcaccagccaccagctcctcccaaagtgtggctcccaggcctggagctggcctgaaagttctcttcaccaaggagactgcaggctacctcaggggccgtccccaggacactgtccggatcttccctccctggcaaaaactgattattccaagtggaagttgccctgttattctgaatacttacttttgtgagaaagttgttgccaaagaagattcagaaaaaacttgtgaagtgtactgtccggacataccccttccaagaagaagcatctctttggcccagatgtttgtaattaagggtctaacaaataattcacctgaaatccaggttgtgtgtagtggtgtagccactacagggacagcctggacccatgggcacaaagaagcaaaacagcgcatcccaaccagcactcccctgagggattctctcctggatgtggtggaaagccagggagctgcctcgtggccaggagctggagtccgagtggtggtgcaaagagtgtattctcttcccagcagagacagcaccaggggtcagcagggggccagctcaggacacacagacccagctggaactcgagcctgccttctggtacaagatgcctgtggaatgttcggtgaagtgcacttggagttcaccatgtcgaaggcaagacagttggaagggaagtcttgcagcctggtgggaatgaaggttctacagaaagtcaccagaggaaggacagcggggattttcagtttgattgacaccctgtggcccccagcgatacctctgaaaacacctggccgcgaccagccctgtgaagagataaaaactcatctgcctcctccagccttgtgttacatcctcacagctcatccaaatctgggacaaattgatataattgacgaagaccccatttataagctttaccagcctccagttacccgctgcttaagagacattctccagatgaatgatcttggtacccgttgcagtttctatgccacggtgatttaccaaaaaccacagctgaagagtctgctgcttctggagcaaagggagatctggctgctagtgaccgatgtcactctgcaaacgaaggaggagagagaccccaggctccccaaaaccctgctggtctatgtggcccccttgtgtgtgctgggctctgaagtcctggaggcactcgctggggctgcccctcacagcctcttcttcaaggacgctctccgtgaccagggtcggattgtttgtgctgaacgaactgtcctcttgcttcagaagccccttttgagtgtggtctctggtgcaagttcctgtgagctgcctggcccggtgatgctcgacagcctggactctgcaacacctgtcaactccatctgcagtgttcaaggcactgtggttggcgtggacgagagcactgctttctcatggcctgtgtgtgacatgtgtggcaacgggagattggaacagaggccggaagacagaggcgccttttcctgtggggactgctcccgggtggtcacatctcctgttctcaagaggcacctgcaggtcttcctggactgccgctcaagaccgcagtgcagagtgaaggtcaagctgttgcagcgcagcatttcctccctgctgaggtttgccgccggtgaagatgggagctacgaagtgaagagtgtcctcggaaaggaagtggggttgttaaattgttttgtccagtccgtaaccgcccacccgaccagctgcattggattggaggaaatcgagcttctgagtgcaggaggggcctctgcagaacactagcggttgccgcaggatctgtgaactttgcaatgtggctgcaagggtggtggtggtggtggtg

SEQ ID NO: 102948 - protein, 1491 aa, Artificial Sequence
  derived and/or modified sequence
MYSEWRSLHLVIQNDQGHTSVLHSYPESVGREVANAVVRPLGQVLGTPSVAGSENLLKTDKEVKWTMEVICYGLTLPLDGETVKYCVDVYTDWIMALVLPKDSIPLPVIKEPNQYVQTILKHLQNLFVPRQEQGSSQIRLCLQVLRAIQKLARESSLMARETWEVLLLFLLQINDILLAPPTVQGGIAENLAEKLIGVLFEVWLLACTRCFPTPPYWKTAKEMVANWRHHPAVVEQWSKVICALTSRLLRFTYGPSFPAFKVPDEDASLIPPEMDNECVAQTWFRFLHMLSNPVDLSNPAIISSTPKFQEQFLNVSGMPQELNQYPCLKHLPQIFFRAMRGISCLVDAFLGISRPRSDSAPPTPVNRLSMPQSAAVSTTPPHNRRHRAVTVNKATMKTSTVSTAHASKVQHQTSSTSPLSSPNQTSSEPRPLPAPRRPKVNSILNLFGSWLFDAAFVHCKLHNGINRDSSMTAITTQASMEFRRKGSQMSTDTMVSNPMFDASEFPDNYEAGRAEACGTLCRIFCSKKTGEEILPAYLSRFYMLLIQGLQINDYVCHPVLASVILNSPPLFCCDLKGIDVVVPYFISALETILPDRELSKFKSYVNPTELRRSSINILLSLLPLPHHFGTVKSEVVLEGKFSNDDSSSYDKPITFLSLKLRLVNILIGALQTETDPNNTQMILGAMLNIVQDSALLEAIGCQMEMGGGENNLKSHSRTNSGISSASGGSTEPTTPDSERPAQALLRDYDSAAGLLIRSIHLVTQRLNSQWRQDMSISLAALELLSGLAKVKVMVDSGDRKRAISSVCTYIVYQCSRPAPLHSRDLHSMIVAAFQCLCVWLTEHPDMLDEKDCLKEVLEIVELGISGSKSKNNEQEVKYKGDKEPNPASMRVKDAAEATLTCIMQLLGAFPSPSGPASPCSLVNETTLIKYSRLPTINKHSFRYFVLDNSVILAMLEQPLGNEQNDFFPSVTVLVRGMSGRLAWAQQLCLLPRGAKANQKLFVPEPRPVPKNDVGFKYSVKHRPFPEEVDKIPFVKADLSIPDLHEIVTEELEERHEKLRSGMAQQIAYEIHLEQQSEEELQKRSFPDPVTDCKPPPPAQEFQTARLFLSHFGFLSLEALKEPANSRLPPHLIALDSTIPGFFDDIGYLDLLPCRPFDTVFIFYMKPGQKTNQEILKNVESSRTVQPHFLEFLLSLGWSVDVGRHPGWTGHVSTSWSINCCDDGEGSQQEEVISSEDIGASIFNGQKKVLYYADALTEIAFVVPSPVESLTDSLESNISDQDSDSNMDLMPGILKQPSLTLELFPNHTDNLNSSQRLSPSSRMRKLPQGRPVPPLGPETRVSVVWVERYDDIENFPLSELMTEISTGVETTANSSTSLRSTTLEKEVPVIFIHPLNTGLFRIKIQGATGKFNMVIPLVDGMIVSRRALGFLVRQTVINICRRKRLESDSYSPPHVRRKQKITDIVNKYRNKQLEPEFYTSLFQEVGLKNCSS

SEQ ID NO: 102949 - DNA, 4476 bp, Artificial Sequence
  derived and/or modified sequence
atgtacagcgagtggagaagcctgcacctggtgatccagaacgaccagggccacaccagcgtgctgcacagctaccccgagagcgtgggcagagaggtggccaacgccgtggtgagacccctgggccaggtgctgggcacccccagcgtggccggcagcgagaacctgctgaagaccgacaaggaggtgaagtggaccatggaggtgatctgctacggcctgaccctgcccctggacggcgagaccgtgaagtactgcgtggacgtgtacaccgactggatcatggccctggtgctgcccaaggacagcatccccctgcccgtgatcaaggagcccaaccagtacgtgcagaccatcctgaagcacctgcagaacctgttcgtgcccagacaggagcagggcagcagccagatcagactgtgcctgcaggtgctgagagccatccagaagctggccagagagagcagcctgatggccagagagacctgggaggtgctgctgctgttcctgctgcagatcaacgacatcctgctggccccccccaccgtgcagggcggcatcgccgagaacctggccgagaagctgatcggcgtgctgttcgaggtgtggctgctggcctgcaccagatgcttccccacccccccctactggaagaccgccaaggagatggtggccaactggagacaccaccccgccgtggtggagcagtggagcaaggtgatctgcgccctgaccagcagactgctgagattcacctacggccccagcttccccgccttcaaggtgcccgacgaggacgccagcctgatcccccccgagatggacaacgagtgcgtggcccagacctggttcagattcctgcacatgctgagcaaccccgtggacctgagcaaccccgccatcatcagcagcacccccaagttccaggagcagttcctgaacgtgagcggcatgccccaggagctgaaccagtacccctgcctgaagcacctgccccagatcttcttcagagccatgagaggcatcagctgcctggtggacgccttcctgggcatcagcagacccagaagcgacagcgccccccccacccccgtgaacagactgagcatgccccagagcgccgccgtgagcaccacccccccccacaacagaagacacagagccgtgaccgtgaacaaggccaccatgaagaccagcaccgtgagcaccgcccacgccagcaaggtgcagcaccagaccagcagcaccagccccctgagcagccccaaccagaccagcagcgagcccagacccctgcccgcccccagaagacccaaggtgaacagcatcctgaacctgttcggcagctggctgttcgacgccgccttcgtgcactgcaagctgcacaacggcatcaacagagacagcagcatgaccgccatcaccacccaggccagcatggagttcagaagaaagggcagccagatgagcaccgacaccatggtgagcaaccccatgttcgacgccagcgagttccccgacaactacgaggccggcagagccgaggcctgcggcaccctgtgcagaatcttctgcagcaagaagaccggcgaggagatcctgcccgcctacctgagcagattctacatgctgctgatccagggcctgcagatcaacgactacgtgtgccaccccgtgctggccagcgtgatcctgaacagcccccccctgttctgctgcgacctgaagggcatcgacgtggtggtgccctacttcatcagcgccctggagaccatcctgcccgacagagagctgagcaagttcaagagctacgtgaaccccaccgagctgagaagaagcagcatcaacatcctgctgagcctgctgcccctgccccaccacttcggcaccgtgaagagcgaggtggtgctggagggcaagttcagcaacgacgacagcagcagctacgacaagcccatcaccttcctgagcctgaagctgagactggtgaacatcctgatcggcgccctgcagaccgagaccgaccccaacaacacccagatgatcctgggcgccatgctgaacatcgtgcaggacagcgccctgctggaggccatcggctgccagatggagatgggcggcggcgagaacaacctgaagagccacagcagaaccaacagcggcatcagcagcgccagcggcggcagcaccgagcccaccacccccgacagcgagagacccgcccaggccctgctgagagactacgacagcgccgccggcctgctgatcagaagcatccacctggtgacccagagactgaacagccagtggagacaggacatgagcatcagcctggccgccctggagctgctgagcggcctggccaaggtgaaggtgatggtggacagcggcgacagaaagagagccatcagcagcgtgtgcacctacatcgtgtaccagtgcagcagacccgcccccctgcacagcagagacctgcacagcatgatcgtggccgccttccagtgcctgtgcgtgtggctgaccgagcaccccgacatgctggacgagaaggactgcctgaaggaggtgctggagatcgtggagctgggcatcagcggcagcaagagcaagaacaacgagcaggaggtgaagtacaagggcgacaaggagcccaaccccgccagcatgagagtgaaggacgccgccgaggccaccctgacctgcatcatgcagctgctgggcgccttccccagccccagcggccccgccagcccctgcagcctggtgaacgagaccaccctgatcaagtacagcagactgcccaccatcaacaagcacagcttcagatacttcgtgctggacaacagcgtgatcctggccatgctggagcagcccctgggcaacgagcagaacgacttcttccccagcgtgaccgtgctggtgagaggcatgagcggcagactggcctgggcccagcagctgtgcctgctgcccagaggcgccaaggccaaccagaagctgttcgtgcccgagcccagacccgtgcccaagaacgacgtgggcttcaagtacagcgtgaagcacagacccttccccgaggaggtggacaagatccccttcgtgaaggccgacctgagcatccccgacctgcacgagatcgtgaccgaggagctggaggagagacacgagaagctgagaagcggcatggcccagcagatcgcctacgagatccacctggagcagcagagcgaggaggagctgcagaagagaagcttccccgaccccgtgaccgactgcaagccccccccccccgcccaggagttccagaccgccagactgttcctgagccacttcggcttcctgagcctggaggccctgaaggagcccgccaacagcagactgcccccccacctgatcgccctggacagcaccatccccggcttcttcgacgacatcggctacctggacctgctgccctgcagacccttcgacaccgtgttcatcttctacatgaagcccggccagaagaccaaccaggagatcctgaagaacgtggagagcagcagaaccgtgcagccccacttcctggagttcctgctgagcctgggctggagcgtggacgtgggcagacaccccggctggaccggccacgtgagcaccagctggagcatcaactgctgcgacgacggcgagggcagccagcaggaggaggtgatcagcagcgaggacatcggcgccagcatcttcaacggccagaagaaggtgctgtactacgccgacgccctgaccgagatcgccttcgtggtgcccagccccgtggagagcctgaccgacagcctggagagcaacatcagcgaccaggacagcgacagcaacatggacctgatgcccggcatcctgaagcagcccagcctgaccctggagctgttccccaaccacaccgacaacctgaacagcagccagagactgagccccagcagcagaatgagaaagctgccccagggcagacccgtgccccccctgggccccgagaccagagtgagcgtggtgtgggtggagagatacgacgacatcgagaacttccccctgagcgagctgatgaccgagatcagcaccggcgtggagaccaccgccaacagcagcaccagcctgagaagcaccaccctggagaaggaggtgcccgtgatcttcatccaccccctgaacaccggcctgttcagaatcaagatccagggcgccaccggcaagttcaacatggtgatccccctggtggacggcatgatcgtgagcagaagagccctgggcttcctggtgagacagaccgtgatcaacatctgcagaagaaagagactggagagcgacagctacagccccccccacgtgagaagaaagcagaagatcaccgacatcgtgaacaagtacagaaacaagcagctggagcccgagttctacaccagcctgttccaggaggtgggcctgaagaactgcagcagctag

SEQ ID NO: 102950 - DNA, 4476 bp, Artificial Sequence
  derived and/or modified sequence
atgtacagtgagtggcgaagcctccatttggttattcagaacgatcagggacacacaagcgtgctgcactcctaccccgaatcagttggtcgcgaagtggctaacgctgtggtccgccccctcggacaggtcttgggcacccctagcgtggccggaagtgagaacctgctgaagactgacaaggaggtaaaatggacaatggaggttatctgttatggcctcactcttccattagacggcgagactgtgaagtattgcgtcgacgtgtacaccgattggatcatggcccttgttctgcccaaggattctattcctttgcccgtcattaaagagcctaatcaatacgttcaaaccattctgaaacacctgcaaaacttatttgtgccacggcaggaacagggatctagccagattagactctgtctgcaggtacttagagccatccagaaactggcccgcgagagctccctcatggcaagggagacatgggaggtactcctgctgttcctgctccaaatcaacgatatactgctcgcacctccaacggttcagggaggcatcgctgaaaacttagccgaaaagctgattggggtccttttcgaggtctggctgctagcctgtacacgctgctttccaactccgccctactggaaaacagccaaggagatggtagcaaattggaggcaccacccagcagtagtggaacagtggtctaaagtgatttgtgccctgactagccgactccttcgttttacctatggcccaagctttcccgccttcaaagttcccgacgaggacgcatctctgatccctcccgaaatggataatgaatgcgttgcacagacatggtttaggtttcttcacatgctgtcaaatcctgtggatctgagcaacccagccataatttcaagcacccccaagtttcaagaacagtttcttaacgtgtctgggatgccacaggaactgaatcagtatccctgcttaaagcacctgccacaaatctttttcagggctatgcgggggattagctgccttgtcgatgcattcctgggcatcagccgaccacgtagcgatagtgcccctcccactcctgtgaatcgactcagtatgccccaatccgctgcggtctccacgacacctccacacaaccggagacatcgggccgtcaccgtgaataaggcgacaatgaaaactagtacggtatcaacagcgcatgcaagcaaggtgcagcaccaaacctctagcacgagcccattgagcagtccaaaccagacctcttctgagcctagaccattgcccgccccccgaagaccgaaagtcaattctatcctgaatctgttcggttcctggctctttgatgccgcctttgtccactgtaagctgcacaacgggataaatagagactcttcaatgactgcaattactacacaggcaagtatggaattcagaaggaagggatcgcagatgtctactgacacaatggtgagcaatcccatgtttgatgctagtgagtttcctgataattatgaagccggtcgtgccgaagcgtgcggtaccctgtgcaggatattttgcagcaagaagaccggcgaggaaattctccccgcgtacctgtcacgcttttacatgctgttaattcaagggctacaaatcaacgattacgtgtgccaccccgtgctggcatctgtgatcctcaactcccctcctttattctgttgcgatctgaagggaattgacgtggtggttccatacttcatcagtgcactggagactatcttgcccgatcgcgaacttagcaagtttaaatcatacgtcaaccctactgagctcagaagaagctccattaacatattgctcagtctcttgcctctgcctcatcactttggcacggtgaagtcagaagtcgttctcgaggggaagttcagcaatgacgactcctcctcttatgacaaacctatcacattcctctccttaaaactaagactggtaaatatcctgattggtgccctgcagaccgaaactgatcctaataacacgcagatgatcctgggggccatgttaaatatcgtacaggacagcgcactactggaagcgatcggctgtcagatggaaatgggaggtggagaaaataacctcaaaagccatagtagaaccaattcgggcattagcagtgcctctggtggaagcacagagccgacaacacccgattccgaaaggcctgcacaggccctgctgcgagattatgactccgccgccggcttattgataagaagtattcacctggtcacacaacgccttaactcccagtggagacaggatatgtccatcagccttgcggctctggagctgctcagcggtctagctaaggtcaaggtgatggtcgattcaggcgaccgaaagagagcaatttcttctgtctgtacctacattgtttatcagtgctccagacctgctccattgcacagccgagatctccactccatgattgtggctgccttccaatgtctatgcgtgtggctgaccgaacatccggacatgctagatgagaaagactgcttaaaggaagtgctggagatcgtggagctgggtatctcgggatcaaagtctaagaacaatgaacaggaggtcaagtacaagggcgacaaggagcctaatcctgctagtatgcgcgtcaaagacgcagccgaggcaacgcttacgtgcatcatgcaactgctcggggcatttccgtctccgagtgggcctgcctctccatgctcattggtgaatgagaccactctgattaaatattctcgtcttcctaccatcaacaagcactcattccgatatttcgtccttgataactcagtgatccttgcaatgctcgaacaacctctggggaacgaacagaacgactttttccctagcgttacagtattggttaggggaatgagcggcaggctggcctgggcacagcagttgtgcctgctccctaggggcgcaaaggcgaaccagaagctttttgttccggaaccccgaccagtgcctaaaaacgacgtggggttcaagtactctgttaaacaccgtccttttcccgaggaggtcgacaagataccttttgtcaaagccgacttgagcataccagatttacatgagatcgttacagaggagctggaggagaggcacgaaaagctgcgctctgggatggcccagcagatagcctatgagatacacctcgaacagcaatcagaggaggagctgcagaaacgctctttccccgacccagttaccgactgcaagccaccccctccagctcaggagttccagacagcacgcctgttcttgtctcacttcggctttctgtcccttgaggcacttaaggagccagccaatagtcggttgcccccacatctgatagccttggactctaccatccccggattcttcgacgatatcggctacctggacctgctgccatgccggcctttcgataccgtttttattttttacatgaagccaggccaaaagactaatcaggagatcttaaagaacgtggagtcaagtcgaaccgtgcagcctcacttcctcgagtttctcctctctcttggctggagtgtggatgttggacggcatccaggatggaccggccacgtctcgacttcatggtcaattaattgctgcgatgacggagaagggtcacaacaggaagaggttatttcttccgaggacatcggtgcctctatctttaacggacagaagaaagtcctgtactacgcagacgctcttaccgagattgcattcgtggtgcctagcccagttgaaagtcttaccgattccctcgagagcaacataagtgaccaggatagcgactccaatatggatttgatgcctgggatcctcaaacagccatctctgacattggaactcttccctaatcacactgacaatctcaattcctcccagagactctccccttccagtcgcatgcggaaattgccccagggcaggcctgtaccccccctcggccccgagactcgcgtgtctgtggtatgggtggaacggtatgatgacatagagaactttccactgagcgaattgatgacagagatatccaccggtgtcgagaccacagccaacagttccacttcattaaggagcaccactctagagaaggaagtcccggtgatctttattcacccactcaataccggactcttccgcataaagatccaaggtgcgaccggcaaattcaacatggtgatccctctggtcgatggcatgatcgtgtcccgccgcgccctaggcttccttgttagacagaccgtgatcaacatctgccggcgtaaacgcttggaaagtgacagctactcacccccccatgtacgaaggaaacagaaaataacagatatcgttaacaagtatagaaacaaacagctggaacctgagttttacacctcccttttccaggaggtggggctaaagaactgcagttcttag

SEQ ID NO: 102951 - DNA, 4476 bp, Artificial Sequence
  derived and/or modified sequence
atgtacagcgagtggaggagcctgcacctggtgatccagaatgaccagggccacacctctgtgctgcacagctacccagagagcgtgggccgggaggtggccaatgctgtggtgcggcccctgggccaggtgctgggcaccccatctgtggccggcagcgagaacctgctgaagacagacaaggaggtgaagtggaccatggaggtgatctgctacggcctgaccctgcccctggatggagagaccgtgaagtactgtgtggatgtgtacacagactggatcatggccctggtgctgcccaaggacagcatccccctgcctgtgatcaaggagcccaaccagtatgtgcagaccatcctgaagcacctgcagaacctgtttgtgccccggcaggagcagggcagcagccagatccggctgtgcctgcaggtgctgcgggccatccagaagctggcccgggagagcagcctgatggcccgggagacctgggaggtgctgctgctcttcctgctgcagatcaatgacatcctgctggccccacccaccgtgcagggcggcattgctgagaacctggccgagaagctgattggagtgctgtttgaggtgtggctgctggcctgcacccgctgcttccccaccccaccctactggaagacagccaaggagatggtggccaactggaggcaccaccctgctgtggtggagcagtggagcaaggtgatctgtgccctgaccagccggctgctgcgcttcacctacggccccagcttccctgccttcaaggtgcctgatgaagatgccagcctcatccccccagagatggacaatgaatgtgtggcccagacctggttccgcttcctgcacatgctgagcaaccctgtggacctgagcaacccagccatcatcagcagcacccccaagttccaggagcagttcctgaatgtgtctggcatgccccaggagctgaaccagtacccctgcctgaagcacctgccccagatcttcttccgggccatgaggggcatcagctgcctggtggatgccttcctgggcatcagccggcccaggagtgacagcgccccacccacccctgtgaaccggctgtccatgccccagagcgctgctgtgtccaccaccccaccccacaacagaagacacagagctgtgacagtgaacaaggccaccatgaagaccagcacagtgtccacagcccacgccagcaaggtgcagcaccagaccagcagcaccagccccctgagcagccccaaccagaccagcagcgagccccggcccctgcctgccccccggcggcccaaggtgaacagcatcctgaacctgtttggctcctggctgtttgatgctgcctttgtgcactgcaagctgcacaacggcatcaacagagacagctccatgacagccatcaccacccaggcctccatggagttccggaggaagggcagccagatgagcacagacaccatggtgagcaaccccatgtttgatgccagcgagttcccagacaactatgaagctggccgggcagaggcctgtggcaccctgtgccgcatcttctgcagcaagaagacaggagaggagatcctgcctgcctacctgagccgcttctacatgctgctgatccagggcctgcagatcaatgactatgtgtgccaccctgtgctggccagcgtcatcctgaacagccccccactcttctgctgtgacctgaagggcattgatgtggtggtgccctacttcatcagcgccctggagaccatcctgcctgaccgggagctgagcaagttcaagagctatgtgaaccccacagagctgcggcgcagcagcatcaacatcctgctgagcctgctgcccctgccccaccacttcggcaccgtgaagtctgaggtggtgctggagggcaagttcagcaatgatgacagcagcagctatgacaagcccatcaccttcctgagcctgaagctgcggctggtgaacatcctgattggagccctgcagacagaaacagaccccaacaacacccagatgatcctgggcgccatgctgaacatcgtgcaggacagcgccctgctggaggccatcggctgccagatggagatgggcggcggggagaacaacctgaagagccacagcaggaccaacagcggcatcagcagcgccagcggcggcagcacagagcccaccaccccagattctgagaggcctgcccaggccctgctgcgggactatgacagcgctgctggcctgctgatccgcagcatccacctggtgacccagaggctgaacagccagtggaggcaggacatgagcatcagcctggccgccctggagctgctgagcggcctggccaaggtgaaggtgatggtggacagcggggacaggaagagggccatcagctctgtgtgcacctacatcgtgtaccagtgcagcaggcctgcccccctgcacagccgggacctgcacagcatgattgtggccgccttccagtgcctgtgtgtgtggctgacagagcacccagacatgctggatgagaaggactgcctgaaggaggtgctggagatcgtggagctgggcatcagcggcagcaagagcaagaacaatgagcaggaggtgaagtacaagggggacaaggagcccaacccagcctccatgagggtgaaggatgctgctgaggccaccctgacctgcatcatgcagctgctgggcgccttccccagccccagcggccctgccagcccctgcagcctggtgaatgagaccaccctcatcaagtacagccggctgcccaccatcaacaagcacagcttccgctactttgtgctggacaacagcgtcatcctggccatgctggagcagcccctgggcaatgagcagaatgacttcttccccagcgtgacagtgctggtgcggggcatgagcggccgcctggcctgggcccagcagctgtgcctgctgcccaggggggccaaggccaaccagaagctgtttgtgcctgagcccaggcctgtgcccaagaatgatgtgggcttcaagtacagcgtgaagcaccggcccttccctgaggaggtggacaagatcccctttgtgaaggctgacctgagcatcccagacctgcacgagatcgtgacagaggagctggaggagagacatgagaagctgcggagcggcatggcccagcagatcgcctatgagatccacctggagcagcagagcgaggaggagctgcagaagaggagcttcccagaccctgtgacagactgcaagcccccacctccagcccaggagttccagacagcccggctcttcctgagccacttcggcttcctgagcctggaggccctgaaggagcccgccaacagccggctgcccccccacctgattgccctggacagcaccatccctggcttctttgatgacatcggctacctggacctgctgccctgccggccctttgacaccgtcttcatcttctacatgaagccaggccagaagaccaaccaggagatcctgaagaatgtggagagcagcaggacagtgcagccccacttcctggagttcctgctgagcctgggctggagcgtggatgtgggccgccaccctggctggacaggccacgtgtccacctcctggagcatcaactgctgtgatgatggagagggcagccagcaggaggaggtgatcagcagtgaagatattggagccagcatcttcaacggccagaagaaggtgctgtactatgcagatgccctgacagagatcgcctttgtggtgcccagccctgtggagagcctgacagacagcctggagagcaacatcagtgaccaggacagcgacagcaacatggacctgatgcctggcatcctgaagcagcccagcctgaccctggagctgttccccaaccacacagacaacctgaacagcagccagaggctgagccccagcagcaggatgaggaagctgccccagggccggcctgtgccccccctgggccctgagaccagggtgtctgtggtgtgggtggagagatatgatgacatcgagaacttccccctgtctgagctgatgacagagatcagcactggagtggagaccacagccaacagcagcaccagcctgcggagcaccaccctggagaaggaggtgcctgtgatcttcatccaccccctgaacacaggcctcttccgcatcaagatccagggcgccaccgggaagttcaacatggtgatccccctggtggatggcatgattgtgtcccggcgggccctgggcttcctggtgcggcagaccgtcatcaacatctgcaggaggaagaggctggagagtgacagctacagcccccctcatgtgcggaggaagcagaagatcacagacatcgtgaacaagtacagaaacaagcagctggagcctgagttctacaccagcctcttccaggaggtgggcctgaagaactgcagcagctag

SEQ ID NO: 102952 - DNA, 4476 bp, Artificial Sequence
  derived and/or modified sequence
atgtacagcgagtggcggagcctgcacctggtgatccagaacgaccaggggcatacaagcgttctgcacagttatccagagtctgttggaagggaagtggcgaatgccgtggtgagacctctgggccaggtgttaggcaccccgtccgttgccggaagtgaaaatcttttaaagacggacaaagaggtgaaatggacaatggaggttatttgctatgggctaaccctaccactggacggagaaaccgtaaagtactgcgtcgacgtttacaccgattggattatggcccttgtgttgcctaaggactctattcccctacctgttattaaggaaccgaaccaatatgttcaaacaattctcaagcatctgcaaaatctgttcgttccaagacaggagcagggctcttcccagattaggttgtgtttgcaagtcttgcgcgcaattcagaagctcgctcgcgagtcatcgctgatggcccgcgaaacctgggaggtgctgctcctattcttgctgcagatcaacgatattctgttggcaccccccacggtgcaggggggtatcgctgagaaccttgctgaaaaactgatcggtgtgttgttcgaggtttggctactcgcctgcaccagatgtttccccacaccaccatattggaagactgctaaagagatggttgccaactggcgccaccatccagctgtggtcgagcagtggagtaaagtgatctgtgccctaacatcgcggctgctgcgttttacatacggccctagcttccctgccttcaaggtccctgacgaggacgcctctctgatccctcccgagatggacaatgagtgcgttgctcagacctggtttagatttctgcacatgctctctaacccagtggacttgtctaaccccgcaattatcagttcaacgcccaagtttcaggagcaatttctgaacgtgagcggtatgccgcaggagctgaatcagtacccttgtctgaaacacttaccacagattttttttcgcgcgatgagaggcatcagttgcctggtggacgcctttctggggatatctagaccccgatcggactcggctccacccaccccagtcaaccgcctcagtatgcctcaatcggccgcagtttcaacaaccccacctcacaataggagacatagggccgtgaccgttaataaggctaccatgaaaacgagtacagtttctacagcccatgctagtaaggtgcagcatcagacatcctcaacttcccctctgtcctcccccaaccagacttcttcagaaccaaggccgctgcccgcccctcgccggccaaaggtcaattcaatcctgaacctgttcggcagctggctctttgacgccgcctttgtccactgtaagcttcacaatgggattaacagagacagcagcatgacagctatcaccacacaggcaagcatggaatttagacgcaaggggagccaaatgtctactgatacgatggtgagtaatcccatgtttgatgcgagcgagtttcccgacaactatgaagccggtcgggcggaggcatgtgggaccctgtgcaggatcttctgctccaaaaaaaccggcgaggagatcctccccgcttacctttcgcggttctatatgttgctcatccagggactgcaaatcaacgactatgtgtgccatcctgttctggcatctgtcattctgaatagtccacctctgttctgttgcgacttgaaaggcattgatgtcgtggttccttactttataagcgccttggaaacaatcttaccggaccgtgagctgtctaagtttaagtcttatgtaaatccaacagagctccgccgaagctctatcaacattctgctttccctgctcccgctgccacatcattttggtacagtcaagtcggaagtcgtactggaggggaaattttcaaacgatgatagtagcagttacgacaaacccattactttcctgtcgctgaagctgagactcgtaaacatactgatcggtgcgctccagacggagaccgaccccaataacacacagatgatccttggagccatgctgaacattgtccaggacagcgctctcctggaggcaattggatgtcagatggagatgggggggggagaaaacaatctgaaatcgcatagccgcaccaacagcggaatcagttccgcctcgggcggtagtaccgagccaacgacacctgattctgaacgtcccgcacaggcactcctgcgggattatgatagcgcagctgggctcctcattagatccatccatctcgttactcagagactcaactcacagtggcggcaggatatgtcaatcagtctggccgcattggaattgctctcaggcctggcgaaagtcaaagtcatggttgacagcggagacagaaagagagccatctcctccgtctgtacatacatcgtgtaccagtgctcacggcctgccccccttcactcccgagacctgcattccatgatcgttgccgccttccagtgcctgtgcgtctggcttacagagcaccctgacatgctggacgaaaaagactgtttgaaggaagtcctcgagattgttgagctgggaatctcagggagcaagagtaaaaacaatgaacaggaagtgaagtacaagggcgataaggaaccaaatccagcttccatgcgggtgaaagacgcagctgaggccacccttacgtgtatcatgcagctgcttggcgcctttccttccccgtctggaccagcctccccatgcagtctggttaatgaaactaccctgattaagtattcaagactccccaccattaacaagcattccttcagatattttgtgctagataattctgtgattctggccatgttagagcaaccactgggaaatgaacagaatgatttctttccttctgtgaccgtgttggtgagaggaatgagtgggaggctggcgtgggcccaacagctgtgcctattacctcggggggcaaaggccaatcaaaaattatttgtgcctgaaccaagaccagtgcccaaaaacgatgtcggattcaaatattctgtgaagcacagaccctttccagaagaggtggataaaatccccttcgtaaaggcggacttatccattccagatctgcacgaaattgtgactgaagagttagaggaaagacacgagaagttaagaagtggaatggcccagcagattgcttatgagattcatctggaacagcagagtgaggaggaattgcaaaaacgaagttttcctgaccctgtgacggactgcaaaccacctcctcctgctcaggagtttcaaacagctcgactattcttgtcacattttggattcctgtctctggaggcattgaaggaacccgcaaatagccgactcccaccccatttgattgcccttgatagcaccatcccggggtttttcgacgacattggctacctcgatctcctgccctgccgccccttcgatacagtctttatattctacatgaaacccggccaaaagaccaaccaagagattctcaagaacgtggagtcttccaggacagtgcagccacactttctggaattcttgctctccttggggtggtctgtcgatgtgggcaggcatcccggttggaccgggcatgttagcacatcctggtctattaactgctgcgacgacggcgagggtagccaacaggaggaggtgattagttctgaggatatcggtgctagtatttttaacggtcagaaaaaggtcctgtattacgccgacgccttgacagagatcgccttcgtggttcctagccctgtcgagtcactgaccgactccttggagtctaacatatcagatcaagacagcgacagtaatatggacctgatgccaggcatcttaaaacagccaagccttacgctggagcttttccccaaccataccgataaccttaatagtagccagcggttgagcccaagctctaggatgagaaaactcccccaggggcgtccggtacctccactcggcccagagactcgagtctccgtggtgtgggtggagcgttacgacgacatcgagaatttcccactttcggaactgatgacggaaatttctacgggagtcgagacaacagccaactctagcaccagcttgcgcagcacaaccttggagaaggaagtccctgtcatattcattcatcccctgaacactggactgttccgtatcaaaatccagggggcaactggcaagttcaatatggttatcccgctcgtggacggcatgatcgtttcacgccgggctctaggctttttggttagacagacagtcattaatatttgtaggcgtaagcgcctagagagtgatagttattccccgccccatgtccgccgcaagcagaaaatcaccgacattgtcaacaaatacagaaataagcagctggagcccgaattctatacaagtctctttcaagaagtgggactgaaaaactgttcaagttag

SEQ ID NO: 102953 - DNA, 4476 bp, Artificial Sequence
  derived and/or modified sequence
atgtacagcgagtggcggtccctgcatctggtgatccagaatgatcaaggtcatactagcgtgctccactcatacccggaatccgtgggccgagaggtagccaatgcggtggtcaggcccctgggacaggtcctgggtactccaagcgtcgctgggtcagaaaacctccttaaaacagataaggaggttaaatggactatggaggtaatctgctatgggctcaccctgccgctggacggggaaacagtaaagtattgtgttgacgtgtatacagattggattatggccctcgtactgcccaaggacagcatccccctccccgttattaaggagccaaatcagtacgtgcagaccattctgaagcacctgcagaaccttttcgtgcctcggcaggagcagggctcttcccaaatcagattgtgtctccaggtcctgcgggctatacaaaaactggccagagaaagctccctcatggcacgcgagacctgggaagttcttttgctgtttctcttgcaaataaatgatatcctcctcgcaccgccaaccgtccagggtggcatagctgaaaatctcgccgagaaactgattggagtgcttttcgaggtctggcttctcgcatgcaccaggtgttttcctacacccccatactggaagactgccaaggaaatggtggcaaactggcgacaccacccagcagtggtggagcagtggagcaaagtgatatgtgccctcacgtcccgtctgttacggtttacttatggaccatccttccccgcattcaaggtgcctgatgaggacgcctcacttatcccacccgagatggataatgaatgcgtggcccaaacctggttcagattcttgcatatgctgagcaaccctgtcgatctctctaatccggctattatctcatctacgcccaaatttcaggaacagtttcttaatgtcagtggaatgccccaagagctgaaccagtatccctgtcttaaacatctgcctcagattttcttccgggctatgaggggcatctcatgtcttgtcgacgccttcctcggaatctctagacctagaagcgactcagcccctccgacacccgtgaaccgcctgagcatgcctcaatctgcagccgtaagcacgaccccgcctcataaccgacgccatcgggcagtcaccgttaacaaagcaaccatgaaaacttctacagtgagtaccgcccacgccagcaaagttcagcaccagacatcgagcacgagcccactctcctctcctaaccagacttccagtgaaccccgacctcttccggctcccagaaggcccaaagtgaactctatcctcaacctcttcgggagttggctgttcgatgctgctttcgtccattgcaagcttcacaatggaataaatcgtgattcaagtatgaccgcaattacgacacaggcctcaatggagtttagacggaagggtagccagatgagtactgacacaatggtctctaatcccatgttcgacgctagcgagttccctgacaactacgaagctgggagggccgaagcctgtggcacactatgtcggatcttctgctcgaagaagacgggggaagaaatcctgcctgcttatttgagtcgcttttatatgttactgatacaaggactgcagatcaacgactatgtttgtcatccggtactcgcatcagttatcttgaattcccctcccttgttttgttgtgacctcaaaggtatcgacgtggtggtcccctattttatctccgctctggagaccattctgccagaccgagagttatcaaagttcaaaagctatgtgaatccaactgagctcaggagaagctccattaacattctgctgagtcttctgccccttccacatcacttcggtacagtgaagtctgaagtcgtactcgagggcaaattctcaaacgatgatagtagttcctacgataaacctatcacttttctgagcctgaagctcaggctggtgaacattctgattggggcactgcagacggagaccgatccaaacaatactcagatgatccttggagctatgttgaatatagtgcaggactccgctctgctggaggccattggatgtcagatggaaatgggaggaggcgagaacaatttaaaatcccattcgcggactaactctggcatcagcagcgcgagtggcggtagcaccgaacctactacacccgactctgaacggccagctcaggcattgctccgtgactacgactctgccgctggactactgatccggtcaatacacctcgtgacccagcgattgaacagtcagtggagacaggatatgagcattagtttggctgcactggagctgttgagcggcttggctaaagttaaagtcatggtggattcaggggacagaaagcgggcaatctccagtgtgtgtacttacatcgtttatcagtgttccagaccagctccactgcactcaagagacctccattctatgatcgttgctgcgttccagtgcctctgtgtgtggcttactgaacacccggatatgctcgatgagaaggactgtctgaaagaagtgctggagatcgtcgagcttggaattagcggttccaaatcgaaaaacaatgagcaagaggtgaagtacaaaggggataaggagcctaaccccgcttccatgcgagtgaaagacgcagccgaagccacactgacatgcatcatgcagctcctgggagcatttccctcaccaagtgggcctgcctccccatgttccctcgtcaatgaaacaaccttgatcaaatactcaagactcccaacaatcaacaaacactctttcagatactttgtgttggataattcggtcattctggcaatgctcgagcagccgttgggaaatgaacagaacgatttcttcccatctgtaaccgttctggttagaggaatgtccggcaggctggcttgggcacagcaactgtgtttgctgccgcgaggcgctaaggctaaccaaaagttatttgtaccagagcctcgccctgtaccaaaaaatgatgtcgggttcaagtactcagttaaacacagacctttccctgaagaggtcgacaaaatccccttcgtaaaagccgatctgtctatccccgatttgcatgagatcgttaccgaggagctggaggaacgtcacgagaagttgcggtctgggatggcccagcagatagcctatgagatccatctagaacagcaatccgaagaagagctgcagaagaggtcattccccgaccccgtgacagactgtaaaccaccaccccctgctcaggagttccagacggcccgtctcttcctgtcacattttggattcctttcactcgaggccttaaaagagccggctaatagcaggctcccccctcatctgatcgcccttgactccaccattcctggattcttcgacgacatcgggtacctcgatctgctgccctgtcggccatttgacacagtttttatattctacatgaagccgggacaaaaaaccaatcaggaaattttgaagaacgttgagtctagtaggaccgtgcagccccacttccttgagttcctgttaagcctcggatggtccgtcgatgtggggaggcatcctgggtggacagggcatgtgtctaccagttggtctatcaactgctgtgacgatggcgaagggtcacagcaagaggaggtgatctcctccgaagatatcggtgcttcaatttttaacggtcaaaagaaggtgctgtattacgccgacgcactgactgaaatagcttttgtcgtaccttcgcctgtggaaagcctgacagatagccttgagtctaatatttccgatcaagacagtgatagcaatatggatctcatgcctgggattttaaaacagccatctcttactctcgagctgttcccaaatcacacggataatctgaactcatctcagagactatctccctcctccaggatgagaaagctgcctcagggcaggccagtgccaccgctcggaccagaaactagagtctctgtggtttgggtcgaacggtacgacgatatcgagaattttccattgtctgaacttatgaccgaaatctctacaggagtggagactactgcaaattcctcaaccagccttcgctcgactaccctggagaaggaggtccccgtgatttttatacatccactgaacacgggcctgttccgcattaagattcagggagctaccgggaagttcaatatggtgataccactggtcgacgggatgattgtgagccgcagggcattggggttcttggttcgacaaacagtgatcaacatatgtagacggaaaagacttgagtccgactcctacagtccccctcacgtgcgccgtaaacagaagatcactgatatcgttaacaagtataggaataaacaactggagccagagttttacacatcccttttccaagaggtcgggctgaaaaactgcagttcatag

SEQ ID NO: 102954 - DNA, 8652 bp, Artificial Sequence
  derived and/or modified sequence
gagttatttgacgccgccgcccctggcagtcggaagttgcctgagcagatcccagccggctggctcgagtggccttcgtcgtcccttggcgccctgggagagtcgctgacgggtggactgacggaccgcctgaggacggccggccagggcggtgaaagcgccagccctatggcgcgggtcgcgtgaggcggaaggccgaggacggccggcggcggcgcccgccccggcgatgcgggccccgcccgtcgcctcaggtgccatttggattgtactttagtggcacgatgtactctgagtggaggtcactgcatttggtgattcagaatgatcaaggccataccagtgtgctgcacagctatccagagagcgttggacgagaggtggcaaatgctgtagtccgtcctcttgggcaggtgttaggtaccccttcagtggctggtagtgagaatttgttaaaaactgacaaagaagtaaaatggaccatggaagtaatttgctatggactgacccttccattggatggagagactgtaaaatattgcgttgatgtatatacagactggattatggctttagtgttgccaaaagattctattccattgccagttattaaagagcctaatcaatatgttcaaactatactaaaacacctacagaatctttttgtaccaagacaggaacagggttccagtcagattcgactatgcttacaggtcctgagagccattcagaaactggcccgtgagtcatctctcatggcccgagaaacttgggaagtcttactgttgtttcttctgcagattaacgacatacttctggccccaccaactgttcaaggtggcattgctgagaatctagcagagaagttgattggtgttctctttgaggtgtggttactagcttgtactcggtgcttcccaacacctccttattggaaaacagccaaggagatggtggctaactggaggcatcacccagcagtggtggagcagtggagcaaggtcatttgtgcactcacttccagattgctacgctttacatatggtccttcatttcctgcatttaaagttcccgatgaagatgccagtctgatccctccagaaatggataatgagtgtgttgcacagacatggtttcgctttttacacatgttaagtaatcctgtggatttgagtaacccagctattataagctctactcccaaatttcaggaacagttcttgaatgtgagcggaatgccgcaagaattgaatcagtatccctgccttaaacatctgcctcaaatattttttcgtgccatgcgtggaatcagctgtctggtggatgcattcttaggtatttctagaccccgatcagacagtgctcccccaacacccgtgaatagattaagtatgcctcaaagtgctgctgtcagtaccacccccccacataaccggaggcaccgggctgttactgtgaataaggccaccatgaagacaagcacagttagtactgctcatgcctctaaagttcagcaccagacgtcctccacctctcctctgtcaagtccaaatcagactagttcagaaccccggccactgcctgcccctcggagaccaaaggttaacagcatcttgaatctctttggatcatggttatttgatgcagcatttgttcactgtaaacttcataatgggataaacagagacagcagcatgactgccattacaacacaagctagcatggagtttcgacggaaagggtcacaaatgtccacagacaccatggtttccaatcctatgtttgatgcaagtgaatttcctgataactatgaagcaggaagagctgaggcttgtgggacactgtgtaggattttttgtagcaagaagactggagaagagattctgccagcttatttatccagattttacatgcttttaattcaaggtttgcagataaatgattatgtgtgccatcctgtcttggccagcgttattctaaactctcctcctttgttctgctgtgacttgaaagggattgatgttgtggttccttactttatttcagctcttgaaaccattttgcctgacagagaactctcaaaattcaaaagctatgtaaatccaacagaattgcgaagatcctccattaatatcctgctttctttgttgcccctccctcatcattttggcacagtcaaatctgaggtggtcctggaaggaaagtttagtaacgatgacagctcttcttatgataaaccaataacttttctgtccctgaagttgagacttgtgaatatattaataggtgccttgcaaactgaaacggaccccaacaacacccaaatgatattaggggcaatgttaaatattgttcaagattcagcacttttggaagccattggttgccagatggagatgggtggtggagaaaataacctgaagagtcatagtcgcaccaatagtggtattagttcagcaagtggtggaagcacggagcccacgactcccgatagtgagagacctgctcaagctctcttaagagattatgattcagctgctgggctcctgattcgcagcattcatctcgtcacccaaagactcaactcccagtggcgccaagacatgagcatatcactggcagctctagagctcctctctggccttgcaaaggtaaaagtgatggttgactcaggagaccggaagcgagccatcagttctgtgtgcacctacattgtttatcagtgtagtcggccagctcctttacactccagggatctgcactccatgatagtggcagcttttcagtgtctctgtgtctggctgacagagcaccctgatatgcttgatgaaaaggactgccttaaggaagtactggagattgtggaactgggtatctcaggaagtaagtccaagaacaatgagcaagaggtcaagtacaaaggagataaggagccaaaccctgcatctatgagggtaaaggatgctgctgaagccaccctaacatgcattatgcagttgctcggcgcatttccttcacctagtggtcctgcctctccttgtagtcttgtgaatgagaccactttgattaaatactccaggctgccaaccataaacaagcatagtttccggtactttgtcttggataacagtgtcatcctggcaatgctggaacaacctcttggaaatgagcagaatgattttttcccctctgtcactgtgctggtccggggaatgtctggaagacttgcttgggcacaacagctttgtcttttacccagaggagcaaaagcaaatcagaagctttttgtacctgaacctcgcccagttcctaaaaatgacgttggatttaaatattctgtgaaacatcggccatttcctgaagaggtggacaagattccttttgtgaaagcagatctcagcattccagatttgcatgaaatagtcactgaagaattagaagagagacacgaaaaattaaggagtggcatggcccagcagattgcttatgaaatacaccttgagcaacagagtgaggaggaattgcagaagagaagttttcctgacccagttacggattgcaagcccccgcctcctgcccaggaattccaaacagcccgcctttttctctcacactttggatttttgtccttagaagcactgaaggaacctgcaaatagtcgtctacctcctcaccttattgcacttgattccacgatacctggattttttgatgacattgggtatctggatctcttgccatgtcgtccttttgacacagtttttattttctatatgaagccaggtcagaaaacgaaccaagagattttaaagaatgtggagtcttccagaactgttcagccacatttcctagaatttttgctttcccttggctggtcagtagatgtgggcagacaccctggttggactgggcatgtttctaccagttggtctattaattgttgtgatgatggtgaaggatctcaacaagaagaagtgatttcctctgaagatattggagctagcattttcaatggacagaagaaggtgctgtattatgctgatgcccttacagaaattgcttttgtggttccttctcctgtggagtccttaactgattcattggaaagtaacatctcggaccaagatagtgattcaaatatggatcttatgccaggaattctgaaacagccatccctgacacttgagcttttccccaatcatacagacaatcttaattcctcacagaggctcagtcccagttccagaatgaggaagctgcctcagggtcgccctgttcctccccttggacctgagacaagagtttctgtagtctgggtggaacgctatgatgatatagaaaactttcccctctcagagctgatgacagagatcagtactggtgtggaaactactgcaaatagtagcacttcactgagatctacaactcttgaaaaagaagttcctgtcatcttcatccaccctttaaacactggattattccggataaaaattcaaggagccactggaaaatttaatatggtcatccctcttgtggatgggatgattgtcagcaggcgagctcttggctttctggtgaggcagactgtaattaacatttgtagaagaaagagactggaaagtgactcctacagtcccccccatgtccgccggaaacagaaaatcaccgacattgtcaacaagtaccggaacaagcagctggagccagagttttatacttcacttttccaggaggttggactcaagaactgcagttcttagaccactgaatttctaagactgttgaactccagtttgggaactataacacagcagaacagtttgataggtgatcactgtaaaaataaaaacaaatcactcccaagagcttactgtttaatcaccagaatagaagaaacacattataacccatttgatagaagactttgggctatctagtgaaatgggctcccagacacaatcacactcctgctgataatgatgatatacattttagccataaactttcttttaaaagtgacaattttagttaaacataagccttttgaggagaaaggcttttatgcatctcagttaaacacgtgcattggtagtatcaacaaatttgcaatatagaagttgaagatagttttttacctcactttttaggaggttgtattcaaaattaaaatctcagaatcttacaggacatttaaagactcatgttgatagcatggaggagaaggaaagaagtcacagccttctactcagttgtaggtcttcttgtcatccagctgtcacactgacaaaaagaaaagatgatacatgttttttgctcagataagaagcctgacattaaaagatgtcatatttttttctccacatttcaaaaagttgtccttctcatcactgcacagatctgtctgaaagcctcagtttctgagtgacccaggaacagatcagaaatggagcatggccttgtcctttaatggggatgcaaataaagtttgtggggttaaaagttataagacagcagtgataccccactctctccattattgtccagcggggtgacataatgacaggttaaatatttgtgattcattgattaaatattatttaaagaaatgtaaattcacaataagggttgaaaattatttggtttcatccattgtctcttatttcaggaccaagcagcaaactgcagtagtttgtgaaggattctaatatggggttcaggaatagcctctcaacgctactaattcagatctctcccagagaactactggatttcctcataattgacaaacatgagtgaccacctctttgggtggctactgttagaaatggctgttgtcatgttttctggactttgccagccaacagatccctgccaggttttggaaatacttctattacctcgctgctacttttctgcagggataaaacttttgaggtggccagacccagaacatccaaggattcctgttacagtgctacagtatacactgctcatttatcctattctcatgtgctttcttctttagtaagattattttaagaaaataagtgatatttaaagtccaaagaggaatgatcacagttgtataaggggtgttttcccacttgaactctgatgtcagtcgactgtgggtcagagctacaaccatctgtttggtttgatgttttggtggtttacttacggagtggggatagtgtgagacctaattccctgtgcaaatgtctcttattccagaaatgtgcattttgtcatctataagcaagaaatatgggcatagcagctcttggtttaaagtttgccataacctgttcatgtttgttttaagctcaggtaaagataacctcctctttctatgactccagtttccattcaggttatagtattattcaatagttgattttctttttaagctgggcaataaattgatgtttccagatggtaacatgggagagggcatataggataaagatgagcaaattctaccctaaaaatgttctagtagttcacaggaagaagatgaggtttaataactttcaaggtaattctagattgacattttgaggggaaaatgggctcttgttctagttgaagtgagcagagaaggctataaattaatatgtaacttacagcattccagaggttaaaaataactgatgcagatgtacttcttcagtgtgattcttcagatcaaacttttacttttggcatagttaatttcagaaaaatgtgctgtatgtgtgtgtgtatgagggttggtcttgctgatccttcagttagctctaaattctggcaactccttgtaattccaatgtatttgatacatgaacaatcatgttgaatgcatttgtgatctgggagacttcctcgtcttccagggaaggaaggatgtgcagcccctgaaggcatgaaactcccagtgtgtacggagccagtggaatatgggatacccataccttaccaggcgctggttccttctgctcacaataacatctgcccaaagagggagtgggaagaacgcttagctctttcactagtatggatttgagttcatggtcactatttttacccacctgcctttgttaaaaatcactttgagtagaatagcactggaggaacatatttagcacctaatattaatatttagtagtccattgataaatttgccagcatatgttctagcctctggggggaaaccaggaccacttttgtctgtggcttaaacagttcagttgctatatctgttgggtatgccgggggtggatgagtgtggcattccgtgaagaggaaggtggtaagtaaggtttcccttctactgccttcttaagttgcaggagggagcttttctcctcccctctggttgggagcactgaggacagtgaggagggcttttaccttgttaatcctttccttatttagctagctttcctttttgtctagggcttcctcttgagaccctcttccatccattgggcctttgaaaggactaatcagacacacacacacacacacacacacacacacacactcgcatactcatgcacattttccttcatttccagatcctttatttcagagcagcccattttcctctggattcattgatgaatacaagtacccacacctttggccagtaatgtcagttacctgctgcaggttctgtgtatgaggccttcatgaacggttaccttctccatacactagggaagcatttgtcagactctgcagactgggttctagagaggcagagtctttaagagtattcatttcttctggaaggtggagctttacccaaagtggaagttagccttgctcaaagatgtgttttgtggtaggtggtaaaaataaataaataaataaataataaaaaaagaaacatgtattggaggtaatttgacactgctgctggcagtagttctctattcaccattttaaagcccattcaggttctctcttcctgaaaagaactgattgctgtgtttacatgaaatgacattggagtcagatggtctgttttaaagatttccatgacagcctcttttcctgagttggagagattggaggtggtctatccgtacgatgtggaatcaaacggtgggtttcttagtagctaaagaagccatgtacttctagtgtgtttctcagaatatcaactcatgttcttcagatgcttttctttttttaatggtgagggaaaaggtataatttgggattccacagtgccttgcatatagtaggcgcccagtaaatacttgttgaagcaaaccaagtttcccaagtcctcatctcttatagtgaccaagacatctttctcctctgaagggcttggcagttgtggctaaaaaataagcagtatcattatttgcttgaaatcatatatacagtttgtatgaatttcagtatgttgccaagacatgattttttcttattgtattttctgtaaatatttctggcactgaactgtaaagtaaaggcaaagtgtaaatatgaaggcgtgcccgtgccccttgcctcctgtgtttcatcttcgtcggttagggaagaaggtccagaggtttgtttgtatttatgccgatcctttgtccagaagaagcccatggaatattgaatgtaatacatttagtcaattaaattttaaggagattcttatctaat

SEQ ID NO: 102955 - protein, 513 aa, Artificial Sequence
  derived and/or modified sequence
MAELQMLLEEEIPGGRRALFDSYTNLERVADYCENNYIQSADKQRALEETKAYTTQSLASVAYLINTLANNVLQMLDIQASQLRRMESSINHISQTVDIHKEKVARREIGILTTNKNTSRTHKIIAPANLERPVRYIRKPIDYTILDDIGHGVKWLLRFKVSTQNMKMGGLPRTTPPTQKPPSPPMSGKGTLGRHSPYRTLEPVRPPVVPNDYVPSPTRNMAPSQQSPVRTASVNQRNRTYSSSGSSGGSHPSSRSSSRENSGSGSVGVPIAVPTPSPPSVFPAPAGSAGTPPLPATSASAPAPLVPATVPSSTAPDAAAGGAQTLADGFTSPTPPVVSSTPPTGHPVQFYSMNRPASRHTPPTIGGSLPYRRPPSITSQTSLQNQMNGGPFYSQNPVSDTPPPPPPVEEPVFDESPPPPPPPEDYEEEEAAVVEYSDPYAEEDPPWAPRSYLEKVVAIYDYTKDKEDELSFQEGAIIYVIKKNDDGWYEGVMNGVTGLFPGNYVESIMHYSE

SEQ ID NO: 102956 - protein, 486 aa, Artificial Sequence
  derived and/or modified sequence
MAELQMLLEEEIPGGRRALFDSYTNLERVADYCENNYIQSADKQRALEETKAYTTQSLASVAYLINTLANNVLQMLDIQASQLRRMESSINHISQTVDIHKEKVARREIGILTTNKNTSRTHKIIAPANLERPVRYIRKPIDYTILDDIGHGVKWLLRFKVSTQNMKMGGLPRTTPPTQKPPSPPMSGKGTLGRHSPYRTLEPVRPPVVPNDYVPSPTRNMAPSQQSPVRTASVNQRNRTYSSSGSSGGSHPSSRSSSRENSGSGSVGVPIAVPTPSPPSVFPAPAGSAGTPPLPATSASAPAPLVPATVPSSTAPDAAAGGAQTLADGFTSPTPPVVSSTPPTGHPVQFYSMNRPASRHTPPTIGGSLPYRRPPSITSQTSLQNQMNGGPFYSQNPVSDTPPPPPPVEEPVFDESPPPPPPPEDYEEEEAAVVEYSDPYAEEDPPWAPRSYLEKVVAIYDYTKDKEDELSFQEGAIIYVIKKNDD

SEQ ID NO: 102957 - protein, 480 aa, Artificial Sequence
  derived and/or modified sequence
MAELQMLLEEEIPGGRRALFDSYTNLERVADYCENNYIQSADKQRALEETKAYTTQSLASVAYLINTLANNVLQMLDIQASQLRRMESSINHISQTVDIHKEKVARREIGILTTNKNTSRTHKIIAPANLERPVRYIRKPIDYTILDDIGHGVKWLLRFKVSTQNMKMGGLPRTTPPTQKPPSPPMSGKGTLGRHSPYRTLEPVRPPVVPNDYVPSPTRNMAPSQQSPVRTASVNQRNRTYSSSGSSGGSHPSSRSSSRENSGSGSVGVPIAVPTPSPPSVFPDAAAGGAQTLADGFTSPTPPVVSSTPPTGHPVQFYSMNRPASRHTPPTIGGSLPYRRPPSITSQTSLQNQMNGGPFYSQNPVSDTPPPPPPVEEPVFDESPPPPPPPEDYEEEEAAVVEYSDPYAEEDPPWAPRSYLEKVVAIYDYTKDKEDELSFQEGAIIYVIKKNDDGWYEGVMNGVTGLFPGNYVESIMHYSE

SEQ ID NO: 102958 - DNA, 1461 bp, Artificial Sequence
  derived and/or modified sequence
atggccgagctgcagatgctgctggaggaggagatccccggcggcagaagagccctgttcgacagctacaccaacctggagagagtggccgactactgcgagaacaactacatccagagcgccgacaagcagagagccctggaggagaccaaggcctacaccacccagagcctggccagcgtggcctacctgatcaacaccctggccaacaacgtgctgcagatgctggacatccaggccagccagctgagaagaatggagagcagcatcaaccacatcagccagaccgtggacatccacaaggagaaggtggccagaagagagatcggcatcctgaccaccaacaagaacaccagcagaacccacaagatcatcgcccccgccaacctggagagacccgtgagatacatcagaaagcccatcgactacaccatcctggacgacatcggccacggcgtgaagtggctgctgagattcaaggtgagcacccagaacatgaagatgggcggcctgcccagaaccaccccccccacccagaagccccccagcccccccatgagcggcaagggcaccctgggcagacacagcccctacagaaccctggagcccgtgagaccccccgtggtgcccaacgactacgtgcccagccccaccagaaacatggcccccagccagcagagccccgtgagaaccgccagcgtgaaccagagaaacagaacctacagcagcagcggcagcagcggcggcagccaccccagcagcagaagcagcagcagagagaacagcggcagcggcagcgtgggcgtgcccatcgccgtgcccacccccagcccccccagcgtgttccccgcccccgccggcagcgccggcaccccccccctgcccgccaccagcgccagcgcccccgcccccctggtgcccgccaccgtgcccagcagcaccgcccccgacgccgccgccggcggcgcccagaccctggccgacggcttcaccagccccaccccccccgtggtgagcagcaccccccccaccggccaccccgtgcagttctacagcatgaacagacccgccagcagacacaccccccccaccatcggcggcagcctgccctacagaagaccccccagcatcaccagccagaccagcctgcagaaccagatgaacggcggccccttctacagccagaaccccgtgagcgacaccccccccccccccccccccgtggaggagcccgtgttcgacgagagccccccccccccccccccccccgaggactacgaggaggaggaggccgccgtggtggagtacagcgacccctacgccgaggaggaccccccctgggcccccagaagctacctggagaaggtggtggccatctacgactacaccaaggacaaggaggacgagctgagcttccaggagggcgccatcatctacgtgatcaagaagaacgacgactag

SEQ ID NO: 102959 - DNA, 1443 bp, Artificial Sequence
  derived and/or modified sequence
atggccgagctgcagatgctgctggaggaggagatccccggcggcagaagagccctgttcgacagctacaccaacctggagagagtggccgactactgcgagaacaactacatccagagcgccgacaagcagagagccctggaggagaccaaggcctacaccacccagagcctggccagcgtggcctacctgatcaacaccctggccaacaacgtgctgcagatgctggacatccaggccagccagctgagaagaatggagagcagcatcaaccacatcagccagaccgtggacatccacaaggagaaggtggccagaagagagatcggcatcctgaccaccaacaagaacaccagcagaacccacaagatcatcgcccccgccaacctggagagacccgtgagatacatcagaaagcccatcgactacaccatcctggacgacatcggccacggcgtgaagtggctgctgagattcaaggtgagcacccagaacatgaagatgggcggcctgcccagaaccaccccccccacccagaagccccccagcccccccatgagcggcaagggcaccctgggcagacacagcccctacagaaccctggagcccgtgagaccccccgtggtgcccaacgactacgtgcccagccccaccagaaacatggcccccagccagcagagccccgtgagaaccgccagcgtgaaccagagaaacagaacctacagcagcagcggcagcagcggcggcagccaccccagcagcagaagcagcagcagagagaacagcggcagcggcagcgtgggcgtgcccatcgccgtgcccacccccagcccccccagcgtgttccccgacgccgccgccggcggcgcccagaccctggccgacggcttcaccagccccaccccccccgtggtgagcagcaccccccccaccggccaccccgtgcagttctacagcatgaacagacccgccagcagacacaccccccccaccatcggcggcagcctgccctacagaagaccccccagcatcaccagccagaccagcctgcagaaccagatgaacggcggccccttctacagccagaaccccgtgagcgacaccccccccccccccccccccgtggaggagcccgtgttcgacgagagccccccccccccccccccccccgaggactacgaggaggaggaggccgccgtggtggagtacagcgacccctacgccgaggaggaccccccctgggcccccagaagctacctggagaaggtggtggccatctacgactacaccaaggacaaggaggacgagctgagcttccaggagggcgccatcatctacgtgatcaagaagaacgacgacggctggtacgagggcgtgatgaacggcgtgaccggcctgttccccggcaactacgtggagagcatcatgcactacagcgagtag

SEQ ID NO: 102960 - DNA, 1542 bp, Artificial Sequence
  derived and/or modified sequence
atggcggaactacagatgctcctggaagaggagatcccaggcggcaggagggccctgttcgactcatacactaatttggagcgcgtggcagactactgtgagaataattacattcagtctgccgataaacaaagggccctcgaagaaacaaaggcttatacaactcagtctcttgcctctgttgcctacctgattaataccctggccaacaacgtgctgcagatgctggatatccaggcatctcagctccgcagaatggagtcatcaattaaccacataagccagacagtcgacattcataaagagaaagtggcacgtagagaaatcggcattttaaccaccaataagaacacctccagaacccacaaaattatcgccccagccaatctcgagaggccggtgcggtatatacgcaagcctatagattacacgatccttgatgatattggtcacggagtgaaatggctgctacggttcaaagtttctactcagaacatgaagatggggggtctgccaaggaccaccccgcctactcagaagcccccaagtcctcctatgtccgggaagggaactctggggcggcattcaccctatcggaccttggaacccgtcaggccacctgttgtgccaaatgactatgttccctcccccactcggaacatggcacccagccagcagtcccccgttcgtaccgctagcgtcaaccaacggaatcggacgtacagttccagcggcagctcaggcgggtcccatccaagctctcggtcatctagccgggagaactcgggaagcggatcagtcggcgttcctattgccgttcccactccatccccaccctccgtgttcccagccccagctggatcggctggtactcccccccttcctgctactagcgcctcagcaccagcgcctctagttcccgccacagtgccatcttcaactgcacctgatgcagcggcagggggcgcccagaccctggctgacgggttcaccagtcctactcctcctgtcgtgtcaagcacccctccaactggccaccctgttcaattctatagcatgaataggcccgccagcaggcatacaccaccaactataggcggatccctgccatatcgtcggcctccctcaataacgtcgcagacttcgctgcagaaccagatgaacgggggacccttctattctcaaaaccccgtttcagacactccccctcctcccccgcccgttgaggagcctgttttcgatgagtctccaccgcctccccccccccctgaggactacgaagaagaagaggctgcagtggtcgagtactctgatccatatgccgaagaggaccctccctgggcccccaggagttaccttgagaaagtggtggcgatctacgattacaccaaggacaaggaggacgagcttagcttccaggagggggccatcatatatgtcataaagaaaaacgacgacgggtggtatgagggagtgatgaacggcgtgacagggctattcccaggcaactacgttgagagcatcatgcactattcggagtag

SEQ ID NO: 102961 - DNA, 1461 bp, Artificial Sequence
  derived and/or modified sequence
atggcggaattacaaatgctcctggaggaggaaattccgggaggaagaagagcgttgttcgacagttacactaacctagaacgggtggccgactattgtgaaaacaattatatccaaagcgccgacaaacagagggcactggaggagaccaaagcgtacacgacgcaaagcctcgcctccgtggcatatctcattaatactctggccaacaatgtactgcaaatgctggacatccaggctagtcaactgcgaagaatggaatcatcgatcaatcatatttcccagactgtggatattcacaaggaaaaggtggctaggcgagagatcgggattttgactaccaacaaaaacaccagccggactcataaaatcatcgcccctgccaacctcgagagacctgtaaggtatattcggaaacccatcgactacacaattttggatgatatcggtcatggagtcaagtggcttctcaggttcaaagtgtcaacacagaatatgaaaatgggggggctcccacggacaaccccccctacacagaaacccccgtcaccgccaatgtcaggtaagggcactttgggcagacactccccataccgaaccctggagcctgtgagacctcccgtggtgcccaacgactatgtgccaagcccaacccgcaatatggcgccctcccagcagagccctgttcggaccgcttcagttaatcaaaggaaccgcacctattcctcctcagggagttctggaggatcgcatccaagttcgaggtcctcctctagggagaactcaggttcgggctctgtcggcgtgccaattgctgtgcctacaccttcaccaccaagcgtgttccccgcgcctgccgggtcagctgggacaccgccacttcctgctactagcgcatcagctcccgctccactggtccccgcaaccgttcctagttcgacggccccagatgctgctgcaggtggcgcccagacactcgcggatggctttacgtcgcccacaccacccgtggtgtccagcacgcctcccacagggcaccccgttcaattttactcgatgaacaggccggctagtcggcatacaccaccgactattgggggatcgctgccataccgaagaccccccagtataacttcacagacttccctgcaaaaccagatgaatggaggtcccttctactcccagaacccagtttcggatacccctcctccgcctccaccggttgaagagccagttttcgacgagagccctcctccacccccccctccagaagattacgaagaagaggaagcagcggtagtagaatactccgacccatatgccgaagaggacccgccctgggccccaagatcctacctggagaaggtggtggcgatttatgattacaccaaagataaggaagacgaactgagtttccaggagggggccatcatctatgtaattaagaagaatgacgattag

SEQ ID NO: 102962 - DNA, 1443 bp, Artificial Sequence
  derived and/or modified sequence
atggctgagctgcagatgctgctggaagaagaaattcctggaggtaggagggccctgttcgattcttacacaaatctggaaagggtcgcagattactgcgagaacaactatatccagagcgctgataaacagagggccttggaggagacaaaggcctacaccactcagagcctggcaagtgtcgcatacctgatcaacacactcgccaacaacgttctgcagatgctcgatatccaagcctcacagctgagacgcatggaatcctctatcaaccatatcagccagacggtggacatacacaaagaaaaagtagctagacgtgagatcgggattcttaccaccaataaaaacacctcccgcactcacaagatcatcgcccctgcaaatctcgagcggcctgtgcgttacataagaaagcccatagactatactatacttgatgacatcggccatggggtgaagtggttactgcgcttcaaggtgtctacccaaaatatgaaaatgggggggctgcctcgtacgacccccccgacacagaagccgccctcccccccgatgagcggaaagggaactctcgggcgacattccccatatcgaactctcgaacccgtgcgccctccagtagtccctaacgactacgttcctagtccaaccaggaacatggcccccagccagcagtcaccggttaggacggcgtcggttaatcagagaaacagaacttatagtagtagtggaagctcggggggatctcatcctagttctcgctcctcttcaagagaaaatagcggctcaggttccgtgggtgtaccaatcgccgtccctacccctagtccgcctagtgtctttccagacgctgcagctgggggagcccagaccttggcagacgggtttacttcacctaccccccctgtggttagcagtacaccgccaactgggcaccccgtgcagttttactctatgaatagaccggctagtcgtcatacgccccctacaatcggagggtcactgccctaccgccggcccccctccataacatcgcagacatccttgcagaaccagatgaacgggggtcctttttattcacagaatcccgtgagcgatactccacctcctcctcctcctgtggaggagcccgtgtttgatgaatccccaccgcctccaccaccaccggaagattacgaggaggaagaggcagctgtggtggagtatagtgacccctacgctgaggaggaccctccttgggcccctcgctcctaccttgaaaaagtggttgcaatctatgactataccaaagacaaggaggacgaactgtcttttcaagaaggagctatcatatatgttatcaagaaaaatgatgacggttggtatgaaggagttatgaatggcgtgactggcctattccctggcaattatgtggaatctatcatgcactactctgagtag

SEQ ID NO: 102963 - DNA, 1542 bp, Artificial Sequence
  derived and/or modified sequence
atggccgagctgcagatgctgctggaggaggagatccctgggggccggcgggccctgtttgacagctacaccaacctggagcgggtggccgactactgtgagaacaactacatccagagcgctgacaagcagagggccctggaggagaccaaggcctacaccacccagagcctggcctctgtggcctacctgatcaacaccctggccaacaacgtgctgcagatgctggacatccaggccagccagctgcggaggatggagagcagcatcaaccacatcagccagacagtggacatccacaaggagaaggtggcccggcgggagatcggcatcctgaccaccaacaagaacaccagcaggacccacaagatcatcgccccagccaacctggagaggcctgtgcgctacatcaggaagcccatcgactacaccatcctggatgacattggacatggagtgaagtggctgctgcgcttcaaggtgtccacccagaacatgaagatgggcggcctgcccaggaccaccccacccacccagaagccacccagcccccccatgtctgggaagggcaccctgggccgccacagcccctaccgcaccctggagcctgtgcggccccctgtggtgcccaatgactatgtgcccagccccaccaggaacatggcccccagccagcagagccctgtgaggacagcctctgtgaaccagaggaacagaacctacagcagcagcggcagcagcggcggcagccaccccagcagccgcagcagcagccgggagaacagcggcagcggctctgtgggcgtgcccatcgctgtgcccacccccagcccccccagcgtcttccctgccccagctggcagcgctggcaccccacccctgcctgccaccagcgccagcgccccagcccccctggtgcctgccaccgtgcccagcagcacagccccagatgctgctgctgggggcgcccagaccctggctgatggcttcaccagccccaccccacctgtggtgagcagcaccccacccaccggccaccctgtgcagttctacagcatgaacagacctgccagccgccacaccccacccaccatcggcggcagcctgccctaccgccggccccccagcatcaccagccagaccagcctgcagaaccagatgaatggaggccccttctacagccagaaccctgtgtctgacaccccacctcctcctcctcctgtggaggagcctgtgtttgatgagagccccccacctcctcctcctcctgaggactatgaggaggaggaggccgctgtggtggagtacagcgacccctatgcagaagaagatcctccctgggcccccaggagctacctggagaaggtggtggccatctatgactacaccaaggacaaggaggatgagctgtccttccaggagggcgccatcatctacgtgatcaagaagaatgatgatggctggtatgaaggagtgatgaatggagtgacaggcctcttccctggcaactacgtggagagcatcatgcactacagcgagtag

SEQ ID NO: 102964 - DNA, 1461 bp, Artificial Sequence
  derived and/or modified sequence
atggccgagctgcagatgctgctggaggaggagatccctgggggccggcgggccctgtttgacagctacaccaacctggagcgggtggccgactactgtgagaacaactacatccagagcgctgacaagcagagggccctggaggagaccaaggcctacaccacccagagcctggcctctgtggcctacctgatcaacaccctggccaacaacgtgctgcagatgctggacatccaggccagccagctgcggaggatggagagcagcatcaaccacatcagccagacagtggacatccacaaggagaaggtggcccggcgggagatcggcatcctgaccaccaacaagaacaccagcaggacccacaagatcatcgccccagccaacctggagaggcctgtgcgctacatcaggaagcccatcgactacaccatcctggatgacattggacatggagtgaagtggctgctgcgcttcaaggtgtccacccagaacatgaagatgggcggcctgcccaggaccaccccacccacccagaagccacccagcccccccatgtctgggaagggcaccctgggccgccacagcccctaccgcaccctggagcctgtgcggccccctgtggtgcccaatgactatgtgcccagccccaccaggaacatggcccccagccagcagagccctgtgaggacagcctctgtgaaccagaggaacagaacctacagcagcagcggcagcagcggcggcagccaccccagcagccgcagcagcagccgggagaacagcggcagcggctctgtgggcgtgcccatcgctgtgcccacccccagcccccccagcgtcttccctgccccagctggcagcgctggcaccccacccctgcctgccaccagcgccagcgccccagcccccctggtgcctgccaccgtgcccagcagcacagccccagatgctgctgctgggggcgcccagaccctggctgatggcttcaccagccccaccccacctgtggtgagcagcaccccacccaccggccaccctgtgcagttctacagcatgaacagacctgccagccgccacaccccacccaccatcggcggcagcctgccctaccgccggccccccagcatcaccagccagaccagcctgcagaaccagatgaatggaggccccttctacagccagaaccctgtgtctgacaccccacctcctcctcctcctgtggaggagcctgtgtttgatgagagccccccacctcctcctcctcctgaggactatgaggaggaggaggccgctgtggtggagtacagcgacccctatgcagaagaagatcctccctgggcccccaggagctacctggagaaggtggtggccatctatgactacaccaaggacaaggaggatgagctgtccttccaggagggcgccatcatctacgtgatcaagaagaatgatgactag

SEQ ID NO: 102965 - DNA, 1443 bp, Artificial Sequence
  derived and/or modified sequence
atggccgagctgcagatgctgctggaggaggagatccctgggggccggcgggccctgtttgacagctacaccaacctggagcgggtggccgactactgtgagaacaactacatccagagcgctgacaagcagagggccctggaggagaccaaggcctacaccacccagagcctggcctctgtggcctacctgatcaacaccctggccaacaacgtgctgcagatgctggacatccaggccagccagctgcggaggatggagagcagcatcaaccacatcagccagacagtggacatccacaaggagaaggtggcccggcgggagatcggcatcctgaccaccaacaagaacaccagcaggacccacaagatcatcgccccagccaacctggagaggcctgtgcgctacatcaggaagcccatcgactacaccatcctggatgacattggacatggagtgaagtggctgctgcgcttcaaggtgtccacccagaacatgaagatgggcggcctgcccaggaccaccccacccacccagaagccacccagcccccccatgtctgggaagggcaccctgggccgccacagcccctaccgcaccctggagcctgtgcggccccctgtggtgcccaatgactatgtgcccagccccaccaggaacatggcccccagccagcagagccctgtgaggacagcctctgtgaaccagaggaacagaacctacagcagcagcggcagcagcggcggcagccaccccagcagccgcagcagcagccgggagaacagcggcagcggctctgtgggcgtgcccatcgctgtgcccacccccagcccccccagcgtcttcccagatgctgctgctggaggagcccagaccctggctgatggcttcaccagccccaccccacctgtggtgagcagcaccccacccaccggccaccctgtgcagttctacagcatgaacagacctgccagccgccacaccccacccaccatcggcggcagcctgccctacagaagacctccttccatcaccagccagaccagcctgcagaaccagatgaatggaggccccttctacagccagaaccctgtgtctgacaccccacctcctcctcctcctgtggaggagcctgtgtttgatgagagccccccacctcctcctcctccagaagattatgaggaggaggaggccgctgtggtggagtacagcgacccctatgcagaggaggaccccccctgggcccccaggagctacctggagaaggtggtggccatctatgactacaccaaggacaaggaggatgagctgtccttccaggagggcgccatcatctacgtgatcaagaagaatgatgatggctggtatgagggcgtgatgaatggagtgacaggcctcttccctggcaactacgtggagagcatcatgcactacagcgagtag

SEQ ID NO: 102966 - DNA, 1542 bp, Artificial Sequence
  derived and/or modified sequence
atggccgagctgcagatgctgctggaggaggagatccccggcggccgcagggcattgtttgatagctatactaatctggaacgcgtggcagactattgtgagaacaattacatccagtcagccgataaacagcgcgccctcgaagagacaaaggcgtacacgacccagagcctcgcctccgtggcgtacctaatcaatactctggcgaacaatgtcctccagatgttagacatacaggcctcgcagctgcgacgcatggaaagctccattaatcatattagtcagactgtagatatccacaaggaaaaggtggcgaggagggaaattggtattttgacaactaataaaaacacatcgcgcacacacaaaattatagctccagccaacctggagcgaccagttaggtacatccgtaaaccaattgactacacgattttggacgatatcggccacggcgtgaagtggttgcttcgctttaaagtgtcaactcagaatatgaaaatgggcggactgccaagaaccactccacctactcaaaaaccccccagccctcctatgagcggcaagggaacgctcggcaggcactcaccttatagaaccttggaaccagttcgaccgccagtcgtccctaatgactatgtgccctctcctactagaaacatggccccgtctcaacagagccctgttagaaccgcttctgtgaaccagcggaatcggacgtatagctcgtctggaagcagtgggggtagccatcctagctccaggtcctctagcagggaaaactccggctctggcagtgtgggggtgcccatcgcggtgccaacaccgtccccaccttcagtgttccccgctccggcggggagcgccggtacaccaccactgcccgcaacctctgcctctgctcctgcccccctagtgccagccaccgtgccctcctccacggctcccgatgctgccgcaggaggcgcccagactctcgcggatggatttacatcaccgacaccaccagtggtgagttcaacaccccctaccggacatcctgttcagttctacagcatgaaccgaccagcaagccgccacactccaccaaccattggcggtagcttgccttatcgcaggccgccaagtataacatctcaaacaagcctgcagaaccaaatgaacgggggacccttctattcccagaaccccgtcagtgacaccccaccgccacccccacccgttgaggaacctgtcttcgatgaaagcccaccgcctcctccccctcccgaagactacgaggaagaggaggccgccgtggtcgagtacagcgacccgtacgctgaggaagacccgccttgggctccaagaagctaccttgaaaaagtggtagccatctacgactataccaaggataaggaggacgaactgtcttttcaggagggggcaattatctacgtcattaagaagaatgacgatggatggtacgaaggcgtcatgaatggcgtgacaggcctttttcccggcaattacgtggagtccatcatgcactattcagagtag

SEQ ID NO: 102967 - DNA, 1461 bp, Artificial Sequence
  derived and/or modified sequence
atggccgagctgcagatgctgctggaggaggagatccccggcggcaggcgcgcactatttgactcctacacaaatctggaaagagttgcagactactgtgagaacaattacattcagagcgctgacaaacagcgcgccctcgaagaaacaaaggcttacaccacccagtctctggcctcagtggcttacctgattaacactttggcgaataacgttctgcagatgttagacatacaggcatctcagcttagaagaatggaatctagtattaaccatatatcccagacggtggacattcacaaggagaaggtggctagaagggagatcggtatcctgaccaccaataagaacacttcccgcacgcataaaataatcgcacctgctaacctcgaaaggccagtacggtacatacggaagcctatcgactacacaatcctggatgacatcgggcacggtgtcaaatggctcctacgcttcaaggtctccacccagaatatgaagatgggcggactgccccgaacaacacctccaacacagaaaccccccagtccgcccatgagcgggaaagggaccctagggaggcactccccataccgcaccctggaaccagtacgtccgccggtggtgccgaacgactacgtccctagcccaacaaggaatatggcaccgtcccaacagtcccccgtaaggacagcatcagtcaaccaacgaaatcgcacctactcaagcagtggtagctccggcgggtcacacccaagctcaagatcctcatcacgcgagaattccgggagcggcagtgtgggagtccccatagccgtaccaacaccctctccaccatcagtgttcccagcgcccgccggctctgcgggaaccccaccgttgccggccacgtctgctagtgctcctgcccctctggttccagcaaccgtcccctcctctacggcacccgacgcagccgcaggcggagcccaaacactagcggacggcttcacatcccccacaccgcccgtggtttcctcgactccacccaccggccaccctgtgcagttttactccatgaacagaccagcctcccggcacaccccgccaactattggcggctcattaccttaccgcagaccaccttctattacatctcagacatcgctccaaaatcaaatgaacggagggcctttctatagccagaatcctgtttctgacacgcccccccctcctcccccggtcgaggagcctgtatttgacgaaagtccgccccccccgccaccccccgaggactatgaggaggaggaggcagccgtcgttgaatactcggacccgtacgctgaggaggaccctccttgggcccccaggagttatctggagaaagtggttgctatttatgactacacgaaggacaaagaagacgaactgagtttccaagaaggggctattatctatgttataaaaaaaaacgatgactag

SEQ ID NO: 102968 - DNA, 1443 bp, Artificial Sequence
  derived and/or modified sequence
atggccgagctgcagatgctgctggaggaggagatccccggcggcagaagagcgctgttcgactcttatactaacttggaacgggtggctgactattgcgaaaataactacatccagagcgctgacaaacagagggcactcgaggagaccaaggcatacaccacccagtctcttgccagcgtggcgtacctgatcaacacgctggctaataacgtcttgcagatgttagatatccaggcttctcagctacggaggatggaatctagcattaaccacatctctcagactgtggacatccataaggagaaggtggcgcgccgcgagattggcatcttgaccaccaataagaatacaagtcggacccataaaatcatcgctccagcaaatttggagcggcctgtcaggtacatcaggaagcccatcgactacaccatcctggacgatatcggacacggcgtaaagtggcttctgcgttttaaagtgagcacacagaacatgaaaatgggcgggcttccccgcacaactcccccaacccagaaaccgccttctccccctatgtctggaaaaggaacattaggccgccattctccttaccggactctggagcctgtaaggccaccagtggtgcctaatgactacgtgccatcccccactcgaaatatggcccctagccagcagtcacccgtgcgtacggcaagcgtcaatcagagaaacaggacatactcgtcaagtgggtcatccggtggcagccatccctcttccagatctagttcgcgcgagaactctggcagcggttccgttggagtaccaatcgcagttcctacaccaagccccccgtccgtgttccctgacgccgcagccgggggtgcacagaccctggccgacgggttcactagtcccacgcctcctgttgtgtcaagtacgccaccaactggacaccccgtccaattctattctatgaacaggccagcctcccgccatacaccccccaccatcggcggctctctcccgtaccgtagacccccatccattacatctcagactagtctgcagaatcagatgaatggtggtcctttctacagtcaaaaccctgtttccgataccccacctccacctccacccgttgaggaaccagtcttcgacgagagcccgcctccaccccctcctcctgaggactacgaggaagaagaagccgccgtggtcgaatacagcgacccatacgccgaagaagacccaccttgggcaccccgatcttacctagagaaagtcgtggccatatatgactacacgaaggacaaggaggatgagcttagcttccaagagggcgcaatcatttacgtgattaaaaagaacgatgacggatggtacgagggcgtgatgaatggtgtgacaggactgttccctggaaattacgtcgagagcattatgcattactctgagtag

SEQ ID NO: 102969 - DNA, 1542 bp, Artificial Sequence
  derived and/or modified sequence
atggcagagctgcagatgcttctggaggaggagatccctggcggtcgcagggccctgttcgacagctacactaatttggaacgtgtcgccgattattgtgagaataactatatacagagcgccgacaagcagcgtgccctggaagaaaccaaggcctacactacacagtcactcgcttcggtggcctaccttatcaacacacttgccaacaacgttctgcagatgcttgacattcaggctagccaactgaggcgtatggagtccagcatcaatcatattagtcagacagttgatatacataaagaaaaagtagcacgcagagaaataggcatcctgaccaccaacaagaatacctccaggacccataagataatcgccccagccaatctggagaggcccgtacgctatattagaaaacctattgactacaccattctggatgatatcggacatggggtaaagtggctgctgcgatttaaggtttcaacccagaatatgaaaatggggggactgcccagaaccaccccccctacccagaagccgccttcgccaccaatgtcgggtaaaggtactctcggcaggcactctccataccgcacacttgagcccgtccgtccgccagttgttccaaatgactacgtcccgtcccctactcggaatatggctcccagccagcagtcccccgtcaggacagcttcggtaaatcaacgaaaccgcacatatagtagtagcggctcttcagggggtagccacccaagcagtcgaagctcatccagggagaactccggaagcggcagcgtcggcgtgcccatcgctgtgccgacaccctcacctccatccgtcttccccgctcctgctgggtccgctgggaccccacctctgccagccacatccgccagtgccccagcccctttagttcccgcaaccgtgccctcttcaaccgccccagacgcagcggcagggggtgcgcagacactggccgatggcttcacaagccctacaccccctgtggtgagctctaccccaccaaccggacatccagtacagttctattcaatgaacagacccgcatcaaggcacaccccaccaaccattgggggatccctgccataccgtaggcccccatcaataaccagccagactagtcttcaaaatcagatgaacggtggacctttttacagccagaacccagtgagcgataccccccctcccccaccgccagtggaagagcctgtatttgatgagagtcccccacctcccccaccgccagaagactacgaggaagaggaggctgctgttgtcgagtactcagatccctacgcagaagaggacccaccctgggccccacgttcctatttggaaaaagtggttgccatttatgattataccaaggacaaagaggacgaacttagcttccaggaaggcgcaatcatctacgtcattaaaaagaacgacgatggatggtacgaaggagttatgaacggcgtgaccgggctctttccagggaactacgtggagtccatcatgcattattctgaatag

SEQ ID NO: 102970 - DNA, 1567 bp, Artificial Sequence
  derived and/or modified sequence
cgccgccgtcgccgccgctcctcctctcccggtcctgggtttccttggcgctgcggccgccgctccctctgcgacctgtatgaggaggaggaggaggaggatgtgaagatggcggagctgcagatgctgctggaagaggaaatcccggggggccgccgggccctcttcgacagctacacaaatctggaacgggtggccgattactgcgagaacaactacatacagtcagcagataagcagagagccctagaagaaaccaaagcctacaccacccaatccttagcaagtgttgcctatctgataaacaccttggccaacaatgtcctgcagatgctggatatccaggcatcccagctacgaaggatggaatcttcaatcaatcatatttcacaaacagttgatattcataaagagaaagttgcaagaagagaaattggtattttgactaccaataaaaacacttcaaggacacataagattattgctccagccaaccttgaacgaccagttcgttatattagaaaacctattgactatacaattctagatgatattggacatggagtaaagtggttgcttagatttaaggtgagtacccagaacatgaagatgggtgggctgccgcgtacaacacctccaactcagaagccccctagtccccctatgtcagggaaagggacacttgggcggcactccccctatcgcacactggagccagtgcgtcctccagtggtaccaaatgattacgtacctagcccaacccgtaatatggctccctcgcagcagagccctgtgaggacagcttctgtgaatcaaagaaatcgaacttacagcagcagtgggagtagtggagggagccacccaagtagtcggagcagcagtcgagagaacagtggaagtggtagtgtgggggttcctattgctgttcctactccatctcctcccagtgtctttccagcccctgctggctctgctggcactcctccccttcctgctacttctgcatctgcccctgctcctcttgttcctgctactgtcccttcctccactgccccagacgctgctgctgggggtgcccagacccttgctgatggcttcacttctccaactccccctgttgtttcttccactccccctacaggtcatcctgtacagttctacagcatgaataggcctgcctctcgccatactcccccaacaatagggggctcgttgccctatagacgccctccttccattacttcacaaacaagccttcagaatcagatgaatggaggacctttttatagccagaatccagtttcagatacaccacctccaccgccacctgtggaagaaccagtctttgatgagtctcccccacctcctcctcctccagaagattacgaagaggaggaagctgctgtggttgagtatagtgatccttatgctgaagaggacccaccgtgggctccacgttcttacttggaaaaggttgtggcaatttatgactatacaaaagacaaggaagatgagctgtcctttcaggaaggagccattatttatgtcatcaagaagaatgacgatg

SEQ ID NO: 102971 - DNA, 2718 bp, Artificial Sequence
  derived and/or modified sequence
gtatgaggaggaggaggaggaggatgtgaagatggcggagctgcagatgctgctggaagaggaaatcccggggggccgccgggccctcttcgacagctacacaaatctggaacgggtggccgattactgcgagaacaactacatacagtcagcagataagcagagagccctagaagaaaccaaagcctacaccacccaatccttagcaagtgttgcctatctgataaacaccttggccaacaatgtcctgcagatgctggatatccaggcatcccagctacgaaggatggaatcttcaatcaatcatatttcacaaacagttgatattcataaagagaaagttgcaagaagagaaattggtattttgactaccaataaaaacacttcaaggacacataagattattgctccagccaaccttgaacgaccagttcgttatattagaaaacctattgactatacaattctagatgatattggacatggagtaaagtggttgcttagatttaaggtgagtacccagaacatgaagatgggtgggctgccgcgtacaacacctccaactcagaagccccctagtccccctatgtcagggaaagggacacttgggcggcactccccctatcgcacactggagccagtgcgtcctccagtggtaccaaatgattacgtacctagcccaacccgtaatatggctccctcgcagcagagccctgtgaggacagcttctgtgaatcaaagaaatcgaacttacagcagcagtgggagtagtggagggagccacccaagtagtcggagcagcagtcgagagaacagtggaagtggtagtgtgggggttcctattgctgttcctactccatctcctcccagtgtctttccagacgctgctgctgggggtgcccagacccttgctgatggcttcacttctccaactccccctgttgtttcttccactccccctacaggtcatcctgtacagttctacagcatgaataggcctgcctctcgccatactcccccaacaatagggggctcgttgccctatagacgccctccttccattacttcacaaacaagccttcagaatcagatgaatggaggacctttttatagccagaatccagtttcagatacaccacctccaccgccacctgtggaagaaccagtctttgatgagtctcccccacctcctcctcctccagaagattacgaagaggaggaagctgctgtggttgagtatagtgatccttatgctgaagaggacccaccgtgggctccacgttcttacttggaaaaggttgtggcaatttatgactatacaaaagacaaggaagatgagctgtcctttcaggaaggagccattatttatgtcatcaagaagaatgacgatggttggtatgagggagttatgaatggagtgactgggctttttcctgggaattacgttgagtctatcatgcattattctgagtaaagctcagcagggctgtgcttgcctcacaggaatagtcaggtcttcccagattatctgaaggccctggggattccactccagtaaagtagaatgaaggatacaaatgataaaaattacacttttttttttggtttattccccagtattaaaaacaaagcaagctgagtctgaacaaatggatctttctgccatcatttgtacaatgctgagctgtctggattgaaataaaatgaccatttttatgtatgtcaaaggtataacagcataactgtgtagccaaaacaaaatcagattaagactgattcagaaaaatctgggatctttctcaggaatactgtatacccttgggatttctcctcctgcagaatctgtggcattggatgttcttcattgcctgtgctaaggggttaacctcatggcccagtgggtaccctagccccttcttttcttccacttgtatgaagaggagggaaccaacatttaaataccacacttaaccatttttacaattatttcagatggcttttttcctctgtgacactgtaaattctgcattctctcagcacttgagtgcaccaaacgagtgaatgctgaactcacttgcatcccttcatgtttctgtttgtggattataaggatgatgaaatgtgaaagtctcccaacactctgagggtggtgaacgattgccacccgtttgattttaatgtgctgctgcatgagactgcattgttgctaatggccagtgtacccagatgtgaagtgtggtaggctggttcatatgtggaggtgggtgtgtgaagctagacacgaaggtccctaaggttctgaagagacttgaactgtggaaatgctcttagcaggcatcccgaacccctgcttcggtgctgttttgaggagtaggatcttggagttcagaccaactatgactatcatttccttcactatctagaaaaacgctattctactttggaagagaatagtagttattttcaagtctcctgacagtcactgggagtacaaggtttgctaatgtgctctctggacgttattaatggccagtattagttgctgctgtattactgactcgcttagctgtagaaagggtaatactctcctgattttgtatgattggactcttaagtagctgctgttagtcagaattaaaacccatctcagactaagaatataatgaataagattaataggccaaaatatgtatctaatcacattgataaaaattaata

SEQ ID NO: 102972 - DNA, 1461 bp, Artificial Sequence
  derived and/or modified sequence
atggctgagctgcagatgttgcttgaggaagagattcctggcggaagacgcgcactgtttgactcttacaccaacctagagcgcgttgccgattactgcgaaaataattatatccagtccgccgacaaacagcgagcattagaagagaccaaggcctacacgacccagtccctggcgtccgtggcataccttattaacacacttgctaataacgtactgcagatgctggatatacaggcgagccagctaagacgcatggaatcatccatcaatcacatctcacagacggtcgatatccacaaggagaaggtcgcaaggcgggagattggaatcctgaccaccaacaagaacactagcaggacgcacaagatcatagcccctgctaacctggagaggcccgtgcgctatatccgtaagccgattgattatacaatcctagacgatattggacatggggttaaatggctgctcaggttcaaagttagcacgcagaacatgaagatgggcggactgccaagaaccacaccaccgactcagaaacctccaagcccgcctatgtccggtaaaggcacacttgggagacacagtccttaccggacactggagcccgttaggcctcctgtggtgcctaatgactacgtcccctcccctacaagaaatatggccccatcccaacagtctccagtgcgaacggcaagcgtaaatcagcgcaaccgaacctactcttcatctggctcatccggcggaagtcatccaagtagcagatcatcgtctcgggagaactcgggaagcgggagcgtgggagtcccaatcgcggtacccacccccagtccaccatcagtgttccccgctccagcaggaagcgctggcaccccacccttgcctgcaacctccgccagcgcccctgcacccctggtcccagccacagtaccaagcagcactgctcctgacgcagctgccggtggggctcaaaccctggcagatggattcacatcacctaccccaccagtggtgtcttccacgcccccaaccggacaccctgttcagttttacagcatgaacagacccgcttctcgacatacccctccaactattgggggatctctgccttatcgaagacctccttccataacttcacaaactagcctgcagaatcagatgaacggtggccctttttactcccagaacccagtctcagatactcctcctcctcctcctcccgtggaagagccagtcttcgacgaatctccgccacctcctccccctcccgaagactatgaagaggaggaggctgccgtggtggaatacagcgatccctacgccgaggaggatcccccttgggcgcctaggtcgtacctggaaaaagttgtggcgatttatgactacaccaaggacaaggaggatgagctgtctttccaggagggcgctattatttacgtaattaagaagaacgacgattag

SEQ ID NO: 102973 - DNA, 1443 bp, Artificial Sequence
  derived and/or modified sequence
atggcagagctgcagatgctcctagaagaagagatacccggaggccgtagggctttgtttgactcctacacaaacctggagagagtcgcagattattgcgaaaacaactacatccagagcgcggataaacaaagagctctggaagaaaccaaagcctatacaacacagtctcttgctagcgtggcttaccttataaacacactggctaacaacgttttgcagatgctggacatccaggccagtcagttacggaggatggaatcttcaattaatcacatctcacagacagtagacattcacaaggaaaaagtggccaggcgggaaatcggaattctgaccaccaataaaaacacctcacggacgcacaagatcattgcacctgctaacctggagcgtccagtgagatacatccgcaaacccattgactatactatccttgatgatatagggcacggggttaaatggttgcttcgcttcaaagtttctacacagaacatgaaaatgggcggattgccaaggacgactccccctactcagaagccaccctccccgcctatgtccgggaaaggaaccctcggccgacacagcccttacagaaccttagagcctgtgaggcctcccgtggtgcccaacgactacgtcccatcccccaccagaaacatggctccaagccagcaaagccccgtgagaaccgcttcagtgaaccagaggaacaggacctactcgtcaagcgggtcttctgggggaagccaccctagttctagatcctcatccagagagaattctgggtcaggatccgtcggggttccgattgcggtcccaactccaagtccacctagcgtcttccccgacgctgccgctggcggtgctcagactcttgctgatgggttcaccagcccaactcccccagtggttagttctacaccaccaacaggacatccggttcagttctacagtatgaaccgacctgcctcacgacacacaccaccgaccatcgggggttctttgccatacagacggccaccttctattactagtcagacttcacttcagaaccagatgaatggcggtccattttattcacagaacccagtgtccgacacccccccaccacccccaccagtagaggaaccagtgtttgacgagtctccccctcctccaccaccaccggaggactacgaggaagaggaagcagcagtggtagagtactctgacccgtacgccgaagaggaccccccatgggcccctcggagttacttggagaaagtagtggctatttatgactacacaaaggataaggaggacgagctgagtttccaggagggcgctattatctacgtaatcaaaaaaaatgatgatggatggtatgagggagtcatgaatggagtgaccggcctctttccagggaactatgttgagtcgattatgcactacagtgagtag

SEQ ID NO: 102974 - DNA, 6659 bp, Artificial Sequence
  derived and/or modified sequence
ccggcggcgcgggcgagggtgggaatctttttcgggctcccgggggcggagggaagggagcgcgcgtgcgcgcgcccggccggccgtcgccgcggtgaccgtcctcggagtccgtcggctcgcgccccgcccccgtcgccccctcccctgtcgcgcgctggggctgtttctcgctccttccgagttaccgccgccgtcgccgccgctcctcctctcccggtcctgggtttccttggcgctgcggccgccgctccctctgcgacctgtatgaggaggaggaggaggaggatgtgaagatggcggagctgcagatgctgctggaagaggaaatcccggggggccgccgggccctcttcgacagctacacaaatctggaacgggtggccgattactgcgagaacaactacatacagtcagcagataagcagagagccctagaagaaaccaaagcctacaccacccaatccttagcaagtgttgcctatctgataaacaccttggccaacaatgtcctgcagatgctggatatccaggcatcccagctacgaaggatggaatcttcaatcaatcatatttcacaaacagttgatattcataaagagaaagttgcaagaagagaaattggtattttgactaccaataaaaacacttcaaggacacataagattattgctccagccaaccttgaacgaccagttcgttatattagaaaacctattgactatacaattctagatgatattggacatggagtaaagtggttgcttagatttaaggtgagtacccagaacatgaagatgggtgggctgccgcgtacaacacctccaactcagaagccccctagtccccctatgtcagggaaagggacacttgggcggcactccccctatcgcacactggagccagtgcgtcctccagtggtaccaaatgattacgtacctagcccaacccgtaatatggctccctcgcagcagagccctgtgaggacagcttctgtgaatcaaagaaatcgaacttacagcagcagtgggagtagtggagggagccacccaagtagtcggagcagcagtcgagagaacagtggaagtggtagtgtgggggttcctattgctgttcctactccatctcctcccagtgtctttccagcccctgctggctctgctggcactcctccccttcctgctacttctgcatctgcccctgctcctcttgttcctgctactgtcccttcctccactgccccagacgctgctgctgggggtgcccagacccttgctgatggcttcacttctccaactccccctgttgtttcttccactccccctacaggtcatcctgtacagttctacagcatgaataggcctgcctctcgccatactcccccaacaatagggggctcgttgccctatagacgccctccttccattacttcacaaacaagccttcagaatcagatgaatggaggacctttttatagccagaatccagtttcagatacaccacctccaccgccacctgtggaagaaccagtctttgatgagtctcccccacctcctcctcctccagaagattacgaagaggaggaagctgctgtggttgagtatagtgatccttatgctgaagaggacccaccgtgggctccacgttcttacttggaaaaggttgtggcaatttatgactatacaaaagacaaggaagatgagctgtcctttcaggaaggagccattatttatgtcatcaagaagaatgacgatggttggtatgagggagttatgaatggagtgactgggctttttcctgggaattacgttgagtctatcatgcattattctgagtaaagctcagcagggctgtgcttgcctcacaggaatagtcaggtcttcccagattatctgaaggccctggggattccactccagtaaagtagaatgaaggatacaaatgataaaaattacacttttttttttggtttattccccagtattaaaaacaaagcaagctgagtctgaacaaatggatctttctgccatcatttgtacaatgctgagctgtctggattgaaataaaatgaccatttttatgtatgtcaaaggtataacagcataactgtgtagccaaaacaaaatcagattaagactgattcagaaaaatctgggatctttctcaggaatactgtatacccttgggatttctcctcctgcagaatctgtggcattggatgttcttcattgcctgtgctaaggggttaacctcatggcccagtgggtaccctagccccttcttttcttccacttgtatgaagaggagggaaccaacatttaaataccacacttaaccatttttacaattatttcagatggcttttttcctctgtgacactgtaaattctgcattctctcagcacttgagtgcaccaaacgagtgaatgctgaactcacttgcatcccttcatgtttctgtttgtggattataaggatgatgaaatgtgaaagtctcccaacactctgagggtggtgaacgattgccacccgtttgattttaatgtgctgctgcatgagactgcattgttgctaatggccagtgtacccagatgtgaagtgtggtaggctggttcatatgtggaggtgggtgtgtgaagctagacacgaaggtccctaaggttctgaagagacttgaactgtggaaatgctcttagcaggcatcccgaacccctgcttcggtgctgttttgaggagtaggatcttggagttcagaccaactatgactatcatttccttcactatctagaaaaacgctattctactttggaagagaatagtagttattttcaagtctcctgacagtcactgggagtacaaggtttgctaatgtgctctctggacgttattaatggccagtattagttgctgctgtattactgactcgcttagctgtagaaagggtaatactctcctgattttgtatgattggactcttaagtagctgctgttagtcagaattaaaacccatctcagactaagaatataatgaataagattaataggccaaaatatgtatctaatcacattgataaaaattaatataactgacacaataaaacacatttcccccatctgtacaataaatacagcttcaaattcagtggagtctgtagggcagataactttaatcatcactactgtagtcagtataagaaatgctgaaaaaaatccaggagggcttgtctctttgtgggtggtcactgtgatgttgggccagctcctgttcaggtccagagctgctaacgtgggttctactcagtcccagtgacttggccagaatagagctttgccaggtaactgccctgtgctaggtgaaaggggaaaagcagtagctggatatatttcaaatgaggttttgaacaagttcagaaagtggaacttgattgaaaagtgaacaagtgtagtagtgtgtgagaaaattcagatggtgtcggatgcagaagttaatattccacttaatgttatctgagcattaaaaatcatcagcatttaactgagaccccactatagagtttccttatcaagactttttggttttaaagttgtttttaatgcattgcaagttacaatagctattttgcttttagatttttcccagcactttgtatttattagctttcattaacttgcctccagtatacattccacttcgtgcttttcttaggtcatttctacatcccttattccttgttttcctgcagtgtaatggccctgaatgtcctctgagccttcagctccattatggacccaaactagactatacttggataagttaagctcttcttcgtgtactggtctataattagaaaaactgttttaaattagatgttcccattatttatttaaacagctttttgctgagaaagcttagtggattaatgaggcagagggtgttttgaaatccaataaatagttcccacaggctgggtgtggtggcttatgcctgtaatcccagcactttcggaggccgaggtgggtggatcatgaggtcaataaattgagaccatcctggccaacatggtgaaaccccatctctactaaaaacacaaaaattagctgggcgtggtggcgcacacctgtagtcccagctacttgggaggctgaggcaggagaatcactggaacctgggaggcagaggttgcagtgagccgagattgtgccactgcactccagcctggtgacagagcgagactccatcaaaaaaaaaaaaaaaaagttcccacagctcaccactacagaagcagggaagacaactatgcagaaaacagagttagtggcggtcagcaggaatgcagctggtcttttggacccctacgggatgggggcagtgcagaagacactggtgaagtcctttatactgaagacctgtggttgggagcaggggtagtccatgggtctgctgattttttttccctatttagtactaatgtgtgtgtgatctttgttttacaaacagtaccttttgggttttctgcatattttataatttttgtacagttttgaattctatagattgtcttggaaggatactgtgtgatgggtcaggcacacagtaattggagacttttaatgtatgtaatatttcatagattgcatgctattaatcatctgtgagggtagtattttttgttttattgtaagtttccctctttttttataaattaaaagatggttggtattaggaatttcaaatgaatgcagaaaatcttacatgctgtgtactattaatattataacagacgatccaagtccaaaatctgaccaataaagcaaccattttatcaagatagagggattctaatgggagaggggattcttccctcctgaagtttgtgtgtccagtccccttaaaaaaaatgaatagttgtcttttcttgtcatattaatactcgaaagtccatggtggtattaatgaaagtacactttattgttgcctttgaacttacggccaaggcaataaatcagaaacaaaaatagtgccaatgtgtcaaaatcgacatctgagagattcagcctcccatttggaataaatatgaatcttctaagctatcttgtttaatattttccatcatttagctacttcctatctccctcagaggcgcctgctgttcccattttagagttgacagtggcctgctaattttgctatgttcctaaaagttactgggtgtgagacattttcatcccctcctttttcctactgctggtgtttattatccagctagacaatattttatgcatatttaccgtgatgtctggaccgtacctgtgctccttggcagtttatgttgaagataactaaagatttttctctttgggaggcatcaaaatgatggtagtttgcttttatctttttatgttcattttcttttagtaggtgacctttctgcattaagaactgtttttatcttttactaccttttcttttctcctttgtggagacagcatgacatgtcctgaaggtcacctttgcctttgaaaaaggtttgatggaggaattcacaggtgactgacaagtctttgaaaagaatgggatctgctcacttctggtctttttggccgggaactcctgattggtgttaaggtggtaatttcccccatataagatttagaatcactgagtttgagctagatgaaatttttaaaatttctggttgtctcattagactgatgaggtgagttttcttcttcatatgaacagctagttaataacagcagagttctcactcagtgctcagtacttaattttccactgcaccacaactgtcttaactaaatgtgctgtatttttctttaaaagttaagagttctatttggtgttttcaggaatatacgtgaaaagacatgccatgttttggtaaataccatcagagttgtgtaaaggcgtgtactaagtgcaatcttaatttgtggaaataatcttcatttacccctcctaaaactacactcagtataaacactttcccataaggtgtgtgcagtaaaaatgttatattactccaacactggcaggagcacagcacagcagccttattggagagagccttataaaagtgattaaatggaggcattgagctcattacctttaagtttactttgtgctgacctttgttcctgttttgagaatctcatataattattaaaaaaaaaaaacaattaaaacgaaacggcggggcctagctgtgtataaatgatccttgctgaatatcttaaggttttttgtaagaaaaaagaaaaaccaacaaaaaaagcttattttcacattaaaatgaaacctcttttgcaacttaagaattctatggaaaagcagtttttatcatattttgtgtccatgcaccatttttcttaaaatggcttacaaaaaagaatgtaaacaatttgtgatctggccagttgtacttttagctcccagagggagagttggtggtattatgagttgagtaaaaaccatccaggggaacttgagggagcagtctgttgccagtaatgttccttgtgtgccattaaaccacctccagatgagtggaggaacatcactttttaattttttaattgtatttggaattgttgccgtgtactaagaacttgacctaaataaaatcccacaaagtatattca

SEQ ID NO: 102975 - DNA, 1542 bp, Artificial Sequence
  derived and/or modified sequence
atggccgagctgcagatgctgctggaggaggagatccccggcggcagaagagccctgttcgacagctacaccaacctggagagagtggccgactactgcgagaacaactacatccagagcgccgacaagcagagagccctggaggagaccaaggcctacaccacccagagcctggccagcgtggcctacctgatcaacaccctggccaacaacgtgctgcagatgctggacatccaggccagccagctgagaagaatggagagcagcatcaaccacatcagccagaccgtggacatccacaaggagaaggtggccagaagagagatcggcatcctgaccaccaacaagaacaccagcagaacccacaagatcatcgcccccgccaacctggagagacccgtgagatacatcagaaagcccatcgactacaccatcctggacgacatcggccacggcgtgaagtggctgctgagattcaaggtgagcacccagaacatgaagatgggcggcctgcccagaaccaccccccccacccagaagccccccagcccccccatgagcggcaagggcaccctgggcagacacagcccctacagaaccctggagcccgtgagaccccccgtggtgcccaacgactacgtgcccagccccaccagaaacatggcccccagccagcagagccccgtgagaaccgccagcgtgaaccagagaaacagaacctacagcagcagcggcagcagcggcggcagccaccccagcagcagaagcagcagcagagagaacagcggcagcggcagcgtgggcgtgcccatcgccgtgcccacccccagcccccccagcgtgttccccgcccccgccggcagcgccggcaccccccccctgcccgccaccagcgccagcgcccccgcccccctggtgcccgccaccgtgcccagcagcaccgcccccgacgccgccgccggcggcgcccagaccctggccgacggcttcaccagccccaccccccccgtggtgagcagcaccccccccaccggccaccccgtgcagttctacagcatgaacagacccgccagcagacacaccccccccaccatcggcggcagcctgccctacagaagaccccccagcatcaccagccagaccagcctgcagaaccagatgaacggcggccccttctacagccagaaccccgtgagcgacaccccccccccccccccccccgtggaggagcccgtgttcgacgagagccccccccccccccccccccccgaggactacgaggaggaggaggccgccgtggtggagtacagcgacccctacgccgaggaggaccccccctgggcccccagaagctacctggagaaggtggtggccatctacgactacaccaaggacaaggaggacgagctgagcttccaggagggcgccatcatctacgtgatcaagaagaacgacgacggctggtacgagggcgtgatgaacggcgtgaccggcctgttccccggcaactacgtggagagcatcatgcactacagcgagtag

SEQ ID NO: 102976 - protein, 507 aa, Artificial Sequence
  derived and/or modified sequence
MAELQMLLEEEIPGGRRALFDSYTNLERVADYCENNYIQSADKQRALEETKAYTTQSLASVAYLINTLANNVLQMLDIQASQLRRMESSINHISQTVDIHKEKVARREIGILTTNKNTSRTHKIIAPANLERPVRYIRKPIDYTILDDIGHGVKVSTQNMKMGGLPRTTPPTQKPPSPPMSGKGTLGRHSPYRTLEPVRPPVVPNDYVPSPTRNMAPSQQSPVRTASVNQRNRTYSSSGSSGGSHPSSRSSSRENSGSGSVGVPIAVPTPSPPSVFPAPAGSAGTPPLPATSASAPAPLVPATVPSSTAPDAAAGGAQTLADGFTSPTPPVVSSTPPTGHPVQFYSMNRPASRHTPPTIGGSLPYRRPPSITSQTSLQNQMNGGPFYSQNPVSDTPPPPPPVEEPVFDESPPPPPPPEDYEEEEAAVVEYSDPYAEEDPPWAPRSYLEKVVAIYDYTKDKEDELSFQEGAIIYVIKKNDDGWYEGVMNGVTGLFPGNYVESIMHYSE

SEQ ID NO: 102977 - DNA, 1524 bp, Artificial Sequence
  derived and/or modified sequence
atggccgagctgcagatgctgctggaggaggagatccccggcggcagaagagccctgttcgacagctacaccaacctggagagagtggccgactactgcgagaacaactacatccagagcgccgacaagcagagagccctggaggagaccaaggcctacaccacccagagcctggccagcgtggcctacctgatcaacaccctggccaacaacgtgctgcagatgctggacatccaggccagccagctgagaagaatggagagcagcatcaaccacatcagccagaccgtggacatccacaaggagaaggtggccagaagagagatcggcatcctgaccaccaacaagaacaccagcagaacccacaagatcatcgcccccgccaacctggagagacccgtgagatacatcagaaagcccatcgactacaccatcctggacgacatcggccacggcgtgaaggtgagcacccagaacatgaagatgggcggcctgcccagaaccaccccccccacccagaagccccccagcccccccatgagcggcaagggcaccctgggcagacacagcccctacagaaccctggagcccgtgagaccccccgtggtgcccaacgactacgtgcccagccccaccagaaacatggcccccagccagcagagccccgtgagaaccgccagcgtgaaccagagaaacagaacctacagcagcagcggcagcagcggcggcagccaccccagcagcagaagcagcagcagagagaacagcggcagcggcagcgtgggcgtgcccatcgccgtgcccacccccagcccccccagcgtgttccccgcccccgccggcagcgccggcaccccccccctgcccgccaccagcgccagcgcccccgcccccctggtgcccgccaccgtgcccagcagcaccgcccccgacgccgccgccggcggcgcccagaccctggccgacggcttcaccagccccaccccccccgtggtgagcagcaccccccccaccggccaccccgtgcagttctacagcatgaacagacccgccagcagacacaccccccccaccatcggcggcagcctgccctacagaagaccccccagcatcaccagccagaccagcctgcagaaccagatgaacggcggccccttctacagccagaaccccgtgagcgacaccccccccccccccccccccgtggaggagcccgtgttcgacgagagccccccccccccccccccccccgaggactacgaggaggaggaggccgccgtggtggagtacagcgacccctacgccgaggaggaccccccctgggcccccagaagctacctggagaaggtggtggccatctacgactacaccaaggacaaggaggacgagctgagcttccaggagggcgccatcatctacgtgatcaagaagaacgacgacggctggtacgagggcgtgatgaacggcgtgaccggcctgttccccggcaactacgtggagagcatcatgcactacagcgagtag

SEQ ID NO: 102978 - DNA, 1524 bp, Artificial Sequence
  derived and/or modified sequence
atggctgagttacaaatgctactggaggaagaaatacctggaggcaggcgcgcgctgtttgattcctataccaatcttgagcgtgtggccgattattgtgaaaacaactatattcagagcgctgacaaacagcgagcactggaggagacgaaggcatacacaacacagtctctcgctagcgtggcctaccttattaacacgttagcgaacaacgtccttcagatgctagatattcaggcctctcaactgaggcggatggagtcctccatcaatcatatttcacagaccgttgatatacataaggagaaggttgctaggcgggagattggaatcctaacaaccaacaagaacacaagtcgaactcacaaaatcattgctcccgctaacctggagcgaccggtgcggtatatccggaaacctatcgattacaccatcctcgacgacatcggccacggggtgaaggtcagtactcagaacatgaagatgggaggcctcccgaggactaccccgccgacccagaaacccccttccccccccatgtccggaaagggtaccctgggaagacatagcccgtacaggactctggaacccgtccggccaccggtggttccaaacgactacgtgccctcgcctacccggaacatggctccctctcagcaatctcctgtacgaacggctagtgtcaaccagcggaatcgtacctactcgtcctctgggagcagtggcggatcgcatccaagctccaggtctagttctagagaaaattctggctctggctctgttggcgtcccaattgccgtcccaaccccatccccaccctcggtgttccccgcaccggctggttctgcgggcactccacccctgccagcgacaagtgcctcagcccccgctcccctggtccctgctactgtcccctcaagcacggctcccgatgcggccgctggcggggcccagacactggccgatggattcacatcacccactcctccggtggtatctagcactcctccgacaggacaccccgtgcagttctactccatgaatagacccgctagtcgacacacacccccaacgatcggagggtcattgccatacagacggcccccctccattacgagccagacatcactgcagaaccagatgaatggagggccattctattcgcaaaatccggtgagcgacacccctccaccaccgcctcctgtggaagagcctgtcttcgacgaaagccctccccccccaccgcctccagaggactatgaagaagaagaggcagcagtggtggagtattcggacccgtacgccgaagaagatccaccgtgggcccccaggtcctacctggagaaggtagtggctatctacgattacacgaaggataaggaagatgagctatcgttccaggaaggtgctatcatttatgtgatcaaaaaaaatgatgacggttggtacgagggggtcatgaatggggttaccggtctcttccctgggaactacgtggaaagcatcatgcactactctgagtag

SEQ ID NO: 102979 - DNA, 1524 bp, Artificial Sequence
  derived and/or modified sequence
atggccgagctgcagatgctgctggaggaggagatccctgggggccggcgggccctgtttgacagctacaccaacctggagcgggtggccgactactgtgagaacaactacatccagagcgctgacaagcagagggccctggaggagaccaaggcctacaccacccagagcctggcctctgtggcctacctgatcaacaccctggccaacaacgtgctgcagatgctggacatccaggccagccagctgcggaggatggagagcagcatcaaccacatcagccagacagtggacatccacaaggagaaggtggcccggcgggagatcggcatcctgaccaccaacaagaacaccagcaggacccacaagatcatcgccccagccaacctggagaggcctgtgcgctacatcaggaagcccatcgactacaccatcctggatgacattggacatggagtgaaggtgtccacccagaacatgaagatgggcggcctgcccaggaccaccccacccacccagaagccacccagcccccccatgtctgggaagggcaccctgggccgccacagcccctaccgcaccctggagcctgtgcggccccctgtggtgcccaatgactatgtgcccagccccaccaggaacatggcccccagccagcagagccctgtgaggacagcctctgtgaaccagaggaacagaacctacagcagcagcggcagcagcggcggcagccaccccagcagccgcagcagcagccgggagaacagcggcagcggctctgtgggcgtgcccatcgctgtgcccacccccagcccccccagcgtcttccctgccccagctggcagcgctggcaccccacccctgcctgccaccagcgccagcgccccagcccccctggtgcctgccaccgtgcccagcagcacagccccagatgctgctgctgggggcgcccagaccctggctgatggcttcaccagccccaccccacctgtggtgagcagcaccccacccaccggccaccctgtgcagttctacagcatgaacagacctgccagccgccacaccccacccaccatcggcggcagcctgccctaccgccggccccccagcatcaccagccagaccagcctgcagaaccagatgaatggaggccccttctacagccagaaccctgtgtctgacaccccacctcctcctcctcctgtggaggagcctgtgtttgatgagagccccccacctcctcctcctcctgaggactatgaggaggaggaggccgctgtggtggagtacagcgacccctatgcagaagaagatcctccctgggcccccaggagctacctggagaaggtggtggccatctatgactacaccaaggacaaggaggatgagctgtccttccaggagggcgccatcatctacgtgatcaagaagaatgatgatggctggtatgaaggagtgatgaatggagtgacaggcctcttccctggcaactacgtggagagcatcatgcactacagcgagtag

SEQ ID NO: 102980 - DNA, 1524 bp, Artificial Sequence
  derived and/or modified sequence
atggccgagctgcagatgctgctggaggaggagatccccggcggccgccgagcgctcttcgattcttacactaatctcgaaagagtagcagattactgtgagaataactatattcagtctgccgacaagcagagggctttagaagaaacaaaagcatacacgacacagtccctggcgtctgtcgcctatttaatcaatacactggctaacaacgtactgcagatgctcgatatccaggcttcccagctcaggcgaatggagtcaagcattaatcacattagccagactgttgatatccacaaagaaaaggtggcccgcagggaaatcggcatactgactaccaacaaaaacacctctagaacacacaagattatcgctccagctaacctcgagagaccagtgagatacattcgcaagcccattgactataccatcctagacgacattgggcacggggtcaaagtgagtacccaaaatatgaagatggggggactgccacggactacacctcccacccagaagcctccgagccctccaatgagtgggaagggaactctgggaaggcactcaccatataggacactcgagccggtgcggcctcctgtggtgccgaatgactacgttcccagccccactaggaacatggcaccatcccagcagagccctgtgagaacagcaagtgttaatcagagaaaccgaacctattctagttcaggatcttccggaggctcacaccctagcagcaggtcttcatcccgcgagaactcagggtctggctcagtaggagtgccaattgctgtgccaactccctcacctccgagcgtgtttcccgcaccagccgggtcagccggcacacctccacttccggctacaagcgctagtgccccagcacccctggtccccgctaccgtgcctagttcaaccgcccctgacgctgccgcagggggagcccagactcttgcggatggcttcacaagccctactcctcctgtcgtgagctccaccccgcctacaggtcaccccgttcaattctactccatgaataggcctgcgtcacgtcacacccctccaacaattggagggtccttgccatacaggcggcccccctcaataacatcccagacctcactccagaaccagatgaacggaggcccattttattctcaaaacccagtaagcgataccccccctccacctccccccgtggaagaacccgtgttcgacgaaagtccaccccctccacccccgcctgaagattacgaggaggaggaggccgctgtggtggaatatagcgatccttacgccgaggaggaccctccttgggccccgcggtcatatttggaaaaggtggttgcaatatacgattatacgaaagacaaggaagatgagttgtccttccaggagggtgctatcatttatgtgattaagaagaacgatgatggctggtacgaaggcgttatgaacggcgtaaccggactgtttcccgggaattacgtcgagagcatcatgcattactcggagtag

SEQ ID NO: 102981 - DNA, 2240 bp, Artificial Sequence
  derived and/or modified sequence
cttccgagttaccgccgccgtcgccgccgctcctcctctcccggtcctgggtttccttggcgctgcggccgccgctccctctgcgacctgtatgaggaggaggaggaggaggatgtgaagatggcggagctgcagatgctgctggaagaggaaatcccggggggccgccgggccctcttcgacagctacacaaatctggaacgggtggccgattactgcgagaacaactacatacagtcagcagataagcagagagccctagaagaaaccaaagcctacaccacccaatccttagcaagtgttgcctatctgataaacaccttggccaacaatgtcctgcagatgctggatatccaggcatcccagctacgaaggatggaatcttcaatcaatcatatttcacaaacagttgatattcataaagagaaagttgcaagaagagaaattggtattttgactaccaataaaaacacttcaaggacacataagattattgctccagccaaccttgaacgaccagttcgttatattagaaaacctattgactatacaattctagatgatattggacatggagtaaaggtgagtacccagaacatgaagatgggtgggctgccgcgtacaacacctccaactcagaagccccctagtccccctatgtcagggaaagggacacttgggcggcactccccctatcgcacactggagccagtgcgtcctccagtggtaccaaatgattacgtacctagcccaacccgtaatatggctccctcgcagcagagccctgtgaggacagcttctgtgaatcaaagaaatcgaacttacagcagcagtgggagtagtggagggagccacccaagtagtcggagcagcagtcgagagaacagtggaagtggtagtgtgggggttcctattgctgttcctactccatctcctcccagtgtctttccagcccctgctggctctgctggcactcctccccttcctgctacttctgcatctgcccctgctcctcttgttcctgctactgtcccttcctccactgccccagacgctgctgctgggggtgcccagacccttgctgatggcttcacttctccaactccccctgttgtttcttccactccccctacaggtcatcctgtacagttctacagcatgaataggcctgcctctcgccatactcccccaacaatagggggctcgttgccctatagacgccctccttccattacttcacaaacaagccttcagaatcagatgaatggaggacctttttatagccagaatccagtttcagatacaccacctccaccgccacctgtggaagaaccagtctttgatgagtctcccccacctcctcctcctccagaagattacgaagaggaggaagctgctgtggttgagtatagtgatccttatgctgaagaggacccaccgtgggctccacgttcttacttggaaaaggttgtggcaatttatgactatacaaaagacaaggaagatgagctgtcctttcaggaaggagccattatttatgtcatcaagaagaatgacgatggttggtatgagggagttatgaatggagtgactgggctttttcctgggaattacgttgagtctatcatgcattattctgagtaaagctcagcagggctgtgcttgcctcacaggaatagtcaggtcttcccagattatctgaaggccctggggattccactccagtaaagtagaatgaaggatacaaatgataaaaattacacttttttttttggtttattccccagtattaaaaacaaagcaagctgagtctgaacaaatggatctttctgccatcatttgtacaatgctgagctgtctggattgaaataaaatgaccatttttatgtatgtcaaaggtataacagcataactgtgtagccaaaacaaaatcagattaagactgattcagaaaaatctgggatctttctcaggaatactgtatacccttgggatttctcctcctgcagaatctgtggcattggatgttcttcattgcctgtgctaaggggttaacctcatggcccagtgggtaccctagccccttcttttcttccacttgtatgaagaggagggaaccaacatttaaataccacacttaaccatttttacaattatttcagatggcttttttcctctgtgacactgtaaattctgcattctctcagcacttgagtgcaccaaacgagtgaatgctgaac

SEQ ID NO: 102982 - DNA, 1524 bp, Artificial Sequence
  derived and/or modified sequence
atggccgaactgcagatgctcttggaggaggagattcctggagggagacgcgcactgtttgactcatacaccaatctcgagcgggttgccgattattgcgaaaataattatatccagagcgcagataagcagagggccttggaggagactaaggcctatactacccagagcctagcttctgtggcctacctgatcaatacactcgcaaataatgtcttgcaaatgctggacatccaggcctcccagctgagaagaatggaatcaagcatcaatcatatctctcagactgtggatatacacaaggaaaaagttgcccgtagagaaatcggcatcctgaccacaaacaaaaacacatctagaacccacaaaattatcgcgcctgcaaatctggagcgcccagtgagatatattcgaaagcctattgactacactatcttggatgacattggtcatggagtaaaagtctcaacccagaacatgaaaatggggggacttccccgaacgacacctcctacacagaaacctccctcccccccaatgagtggcaaaggcacgctgggcaggcactctccatatagaaccctcgagccagtcagacctcctgtggttccaaacgattatgtgccctcaccaacaaggaacatggccccttctcaacagtcgcccgtgaggaccgccagcgtcaatcaacgcaataggacatactcctcctcgggatccagcgggggatctcatcctagctcccgaagtagctccagggaaaattctggttctgggagcgtaggggtgcccatcgcagtgccaactccaagccctccatcggtgtttcccgcacctgccggatctgccggaacacccccactgcctgctactagtgcctctgcaccagcacctcttgtccctgccaccgtgccctcatctaccgccccagatgcggctgcaggcggagcgcagaccctcgcagatggattcacttccccaaccccacccgtagtgagcagcaccccaccgaccggtcacccagtgcagttctactccatgaatcggcctgcttctcgccacacccctccaaccataggaggctccctgccgtatcgcaggccaccttccataacctctcaaacgagcctccagaatcagatgaatggcggacccttttacagccagaaccccgtgtcagatacacccccaccccctcctcccgtggaggaaccggtgtttgacgagagcccccctccccctcccccacccgaggactatgaagaagaagaggccgctgtggtagagtactctgacccctacgccgaagaggaccccccatgggctccgcgatcctaccttgagaaagtggttgcaatatacgattacactaaagacaaggaggacgagctctcctttcaagaaggcgcaatcatctacgtgatcaagaagaatgatgacggttggtacgaaggcgtaatgaacggggtaacggggctcttcccagggaattatgtggagtccataatgcactactctgaatag

SEQ ID NO: 102983 - protein, 401 aa, Artificial Sequence
  derived and/or modified sequence
MSCRCWISRHPSYEGWNLQSIIFHKQIRGVDLESTFVTKFGNNCSLRLNETVDIHKEKVARREIGILTTNKNTSRTHKIIAPANLERPVRYIRKPIDYTILDDIGHGVKVSTQNMKMGGLPRTTPPTQKPPSPPMSGKGTLGRHSPYRTLEPVRPPVVPNDYVPSPTRNMAPSQQSPVRTASVNQRNRTYSSSGSSGGSHPSSRSSSRENSGSGSVGVPIAVPTPSPPSVFPGHPVQFYSMNRPASRHTPPTIGGSLPYRRPPSITSQTSLQNQMNGGPFYSQNPVSDTPPPPPPVEEPVFDESPPPPPPPEDYEEEEAAVVEYSDPYAEEDPPWAPRSYLEKVVAIYDYTKDKEDELSFQEGAIIYVIKKNDDGWYEGVMNGVTGLFPGNYVESIMHYSE

SEQ ID NO: 102984 - DNA, 1206 bp, Artificial Sequence
  derived and/or modified sequence
atgtcctgtcgctgctggatatctcggcatcctagctacgagggctggaatctccagtctattatctttcacaaacagattagaggagtcgatttggaatcaacttttgtaacaaagttcggcaataactgttccctgcggttaaatgagactgtagacattcacaaggagaaggtggctcgcagagaaatcgggattctgaccaccaacaaaaacacctctcggactcacaaaataatcgcaccggccaatctggaaaggccagtgcgatacatcaggaagccgatcgattatacgattcttgatgatatcggccacggcgtgaaagtgtccacccagaatatgaaaatgggagggctgccaaggacaaccccccccacacagaagccaccttcccctcctatgtctggcaagggcaccctcggccgtcacagtccatataggactctggaaccagtgaggccccccgtcgtgcccaatgattacgtccccagtcccacccgcaatatggccccttctcaacagagccctgtgcggacagcatcagtgaaccagcgaaatagaacgtacagtagcagtgggtccagcgggggaagccatccaagcagccgctcctcttcccgcgaaaatagtggatccgggtcagtgggcgtgccgattgcagttccgaccccgagtccacccagtgtctttcctggacacccagtccagttttattcgatgaaccggccagctagtagacacacccctccaacgataggcggttcccttccataccggcggccaccatctattacctcccaaactagcctgcagaatcagatgaacggaggaccattctactctcagaatcctgttagcgacacgcctccgccccccccacctgtagaggagcctgtgtttgatgagagcccgccccccccccctcctccggaagattatgaggaggaggaggcagccgtggtggagtactccgatccttacgccgaggaggacccaccttgggcgccccgtagctatttagagaaagtggttgcgatttatgactacacaaaggataaggaggacgaattatcattccaagagggagccattatatacgtgattaagaagaatgacgacggttggtacgagggcgtcatgaacggagtcacaggactatttcccggtaactatgttgagagtattatgcactatagcgagtag

SEQ ID NO: 102985 - DNA, 1206 bp, Artificial Sequence
  derived and/or modified sequence
atgagctgccgctgctggatcagccgccaccccagctatgagggctggaacctgcagagcatcatcttccacaagcagatccggggcgtggacctggagagcacctttgtgaccaagtttggaaacaactgcagcctgcggctgaatgaaacagtggacatccacaaggagaaggtggcccggcgggagatcggcatcctgaccaccaacaagaacaccagcaggacccacaagatcatcgccccagccaacctggagaggcctgtgcgctacatcaggaagcccatcgactacaccatcctggatgacatcggccacggcgtgaaggtgtccacccagaacatgaagatgggcggcctgcccaggaccaccccacccacccagaagccacccagcccccccatgtctgggaagggcaccctgggccgccacagcccctaccgcaccctggagcctgtgcggccccctgtggtgcccaatgactatgtgcccagccccaccaggaacatggcccccagccagcagagccctgtgaggacagcctctgtgaaccagaggaacagaacctacagcagcagcggcagcagcggcggcagccaccccagcagccgcagcagcagcagagaaaattctggcagcggctctgtgggcgtgcccatcgctgtgcccacccccagccccccatctgtgtttcctggccaccctgtgcagttctacagcatgaacagacctgccagccgccacaccccacccaccatcggcggcagcctgccctaccgccggccccccagcatcaccagccagaccagcctgcagaaccagatgaatggaggccccttctacagccagaaccctgtgtctgacaccccacctcctcctcctcctgtggaggagcctgtgtttgatgagagccccccacctcctcctcctcctgaggactatgaggaggaggaggccgctgtggtggagtacagcgacccctatgcagaagaagatcctccctgggcccccaggagctacctggagaaggtggtggccatctatgactacaccaaggacaaggaggatgagctgtccttccaggagggcgccatcatctacgtgatcaagaagaatgatgatggctggtatgaaggagtgatgaatggagtgacaggcctcttccctggcaactacgtggagagcatcatgcactacagcgagtag

SEQ ID NO: 102986 - DNA, 1206 bp, Artificial Sequence
  derived and/or modified sequence
atgagctgccggtgctggatcagccggcaccccagctacgagggctggaatctgcagtcaattatctttcataaacaaatcaggggcgtggacctggagtccacctttgtcacaaaattcgggaataactgcagtctccgcctgaatgaaacagtggatatccataaggagaaggttgcaagacgcgagatcggcattctgaccacgaataaaaacacctctagaacacacaaaatcatcgccccagctaacttagagcgccctgtccgctatatccggaagcccattgattacacaatcttggacgatatcggtcacggcgttaaggtgagcactcagaacatgaaaatgggcggattaccaagaactactccccccacgcagaagcccccttcgccaccgatgtctggtaaagggactctcggccgacactcgccctatcggacactcgaacctgttcggcctcctgtggtacctaatgactacgtcccaagtcccacccgcaacatggcacccagccagcagtctccggtgcgcacagcatcagtgaatcagcgaaacagaacgtactcttcttctggctcctctggtggttcacatcccagtagccgctccagctctagggaaaatagtgggagtggttccgtgggcgtgcccatcgcggtcccaacacccagcccacctagtgttttccctgggcaccccgtgcaattctactcaatgaacaggcccgccagccgccacaccccccctacaatcggcggtagcctcccttataggagacccccctcaatcacatcccagacgtcgcttcaaaatcagatgaatggaggtccattctactcccaaaacccggtgtctgacacaccccctcctccacccccggtggaagaacctgtctttgacgagagcccaccacctcccccccctcctgaggattatgaagaggaagaagccgctgtggtcgaatatagtgacccttacgcggaggaggatccgccctgggcgcctcgcagttatcttgagaaggtggtcgctatttatgactataccaaggataaagaagacgagttaagcttccaggaaggcgcgatcatttacgtgatcaagaagaacgatgacgggtggtacgaaggagtcatgaatggcgttacgggactgttccccgggaactacgtcgagagtatcatgcattatagcgagtag

SEQ ID NO: 102987 - DNA, 1206 bp, Artificial Sequence
  derived and/or modified sequence
atgtcatgcaggtgttggatcagcagacatccatcgtatgaagggtggaacttgcagtcaatcatttttcacaagcagattagaggcgtggatcttgagagcacatttgtcaccaagttcgggaacaactgttcactacgcctgaatgaaacagtggacatacacaaggagaaagtggccagaagagaaattggaatcctcaccacaaacaaaaataccagtagaacacataaaattatcgcacctgccaatctggagcgaccagtacgttacatcaggaaacctattgactacactatactagacgacatcggacacggggtaaaggtatcgacccagaacatgaaaatgggcggtctgcccaggactacacccccaacccagaaacctccttcgccccctatgagcggtaaaggcactctcggcagacactccccgtatcgcacacttgagcctgtcagaccccctgtggttccaaacgattatgtgccgagccccaccaggaatatggcacctagccagcagtccccagtgaggaccgcaagcgtgaaccaaaggaaccgtacatacagctcttctggatccagcggtggctcccacccttctagtcggtctagtagcagagagaatagtggttccggctctgtaggcgtccctatcgcggtcccgacgcctagtcccccttccgtcttccctggacacccagttcaattttatagcatgaacagaccagcttcacggcacaccccccctacaatcggaggttctctgccttacaggcgcccacctagcatcacgtcccaaacctccctgcaaaaccaaatgaatgggggaccattttattcacaaaaccctgtgtcagacacgcccccacctcctccacccgtggaagaacccgtcttcgacgaatcaccaccgcctccgccacctccagaggactacgaggaagaggaagctgccgtggttgaatactccgatccctatgctgaagaggatccgccatgggccccaagaagctacctggagaaggtggtggccatctatgattatacaaaagataaggaagacgaactctctttccaggagggggctatcatctacgtcatcaagaagaacgacgacggatggtacgaaggtgtgatgaacggggtcactgggctctttccaggaaactatgtcgaaagtatcatgcactactccgagtag

SEQ ID NO: 102988 - DNA, 2133 bp, Artificial Sequence
  derived and/or modified sequence
cttccgagttaccgccgccgtcgccgccgctcctcctctcccggtcctgggtttccttggcgctgcggccgccgctccctctgcgacctgtatgaggaggaggaggaggaggatgtgaagatggcggagctgcagatgctgctggaagaggaaatcccggggggccgccgggccctcttcgacagctacacaaatctggaacgggtggccgattactgcgagaacaactacatacagtcagcagataagcagagagccctagaagaaaccaaagcctacaccacccaatccttagcaagtgttgcctatctgataaacaccttggccaacaatgtcctgcagatgctggatatccaggcatcccagctacgaaggatggaatcttcaatcaatcatatttcacaagcaaattagaggcgttgatcttgagtcgacttttgtgaccaaatttggaaacaattgcagtttgagattgaatgagacagttgatattcataaagagaaagttgcaagaagagaaattggtattttgactaccaataaaaacacttcaaggacacataagattattgctccagccaaccttgaacgaccagttcgttatattagaaaacctattgactatacaattctagatgatattggacatggagtaaaggtgagtacccagaacatgaagatgggtgggctgccgcgtacaacacctccaactcagaagccccctagtccccctatgtcagggaaagggacacttgggcggcactccccctatcgcacactggagccagtgcgtcctccagtggtaccaaatgattacgtacctagcccaacccgtaatatggctccctcgcagcagagccctgtgaggacagcttctgtgaatcaaagaaatcgaacttacagcagcagtgggagtagtggagggagccacccaagtagtcggagcagcagtcgagagaacagtggaagtggtagtgtgggggttcctattgctgttcctactccatctcctcccagtgtctttccaggtcatcctgtacagttctacagcatgaataggcctgcctctcgccatactcccccaacaatagggggctcgttgccctatagacgccctccttccattacttcacaaacaagccttcagaatcagatgaatggaggacctttttatagccagaatccagtttcagatacaccacctccaccgccacctgtggaagaaccagtctttgatgagtctcccccacctcctcctcctccagaagattacgaagaggaggaagctgctgtggttgagtatagtgatccttatgctgaagaggacccaccgtgggctccacgttcttacttggaaaaggttgtggcaatttatgactatacaaaagacaaggaagatgagctgtcctttcaggaaggagccattatttatgtcatcaagaagaatgacgatggttggtatgagggagttatgaatggagtgactgggctttttcctgggaattacgttgagtctatcatgcattattctgagtaaagctcagcagggctgtgcttgcctcacaggaatagtcaggtcttcccagattatctgaaggccctggggattccactccagtaaagtagaatgaaggatacaaatgataaaaattacacttttttttttggtttattccccagtattaaaaacaaagcaagctgagtctgaacaaatggatctttctgccatcatttgtacaatgctgagctgtctggattgaaataaaatgaccatttttatgtatgtcaaaggtataacagcataactgtgtagccaaaacaaaatcagattaagactgattcagaaaaatctgggatctttctcaggaatactgtatacccttgggatttctcctcctgcagaatctgtggcattggatgttcttcattgcctgtgctaaggggttaacctcatggcccagtgggtaccctagccccttcttttcttccacttgtatgaagaggagggaaccaacatttaaataccacacttaaccatttttacaattatttcagatggcttttttcctctgtgacactgtaaattctgcattctctcagcacttgagtgcaccaaacgagtgaatgctgaac

SEQ ID NO: 102989 - DNA, 1206 bp, Artificial Sequence
  derived and/or modified sequence
atgagctgcagatgctggatcagcagacaccccagctacgagggctggaacctgcagagcatcatcttccacaagcagatcagaggcgtggacctggagagcaccttcgtgaccaagttcggcaacaactgcagcctgagactgaacgagaccgtggacatccacaaggagaaggtggccagaagagagatcggcatcctgaccaccaacaagaacaccagcagaacccacaagatcatcgcccccgccaacctggagagacccgtgagatacatcagaaagcccatcgactacaccatcctggacgacatcggccacggcgtgaaggtgagcacccagaacatgaagatgggcggcctgcccagaaccaccccccccacccagaagccccccagcccccccatgagcggcaagggcaccctgggcagacacagcccctacagaaccctggagcccgtgagaccccccgtggtgcccaacgactacgtgcccagccccaccagaaacatggcccccagccagcagagccccgtgagaaccgccagcgtgaaccagagaaacagaacctacagcagcagcggcagcagcggcggcagccaccccagcagcagaagcagcagcagagagaacagcggcagcggcagcgtgggcgtgcccatcgccgtgcccacccccagcccccccagcgtgttccccggccaccccgtgcagttctacagcatgaacagacccgccagcagacacaccccccccaccatcggcggcagcctgccctacagaagaccccccagcatcaccagccagaccagcctgcagaaccagatgaacggcggccccttctacagccagaaccccgtgagcgacaccccccccccccccccccccgtggaggagcccgtgttcgacgagagccccccccccccccccccccccgaggactacgaggaggaggaggccgccgtggtggagtacagcgacccctacgccgaggaggaccccccctgggcccccagaagctacctggagaaggtggtggccatctacgactacaccaaggacaaggaggacgagctgagcttccaggagggcgccatcatctacgtgatcaagaagaacgacgacggctggtacgagggcgtgatgaacggcgtgaccggcctgttccccggcaactacgtggagagcatcatgcactacagcgagtag

SEQ ID NO: 102990 - DNA, 492 bp, Artificial Sequence
  derived and/or modified sequence
atggagggccccagcctgagaggccccgccctgagactggccggcctgcccacccagcaggactgcaacatccaggagaagatcgacctggagatcagaatgagagagggcatctggaagctgctgagcctgagcacccagaaggaccaggtgctgcacgccgtgaagaacctgatggtgtgcaacgccagactgatggcctacaccagcgagctgcagaagctggaggagcagatcgccaaccagaccggcagatgcgacgtgaagttcgagagcaaggagagaaccgcctgcaagggcaagatcgccatcagcgacatcagaatccccctgatgtggaaggacagcgaccacttcagcaacaaggagagaagcagaagatacgccatcttctgcctgttcaagatgggcgccaacgtgttcgacaccgacgtggtgaacgtggacaagaccatcaccgacatctgcttcgagaacgtgaccatcctgtag

SEQ ID NO: 102991 - DNA, 492 bp, Artificial Sequence
  derived and/or modified sequence
atggagggccctagcctccgcggcccggctctccgactcgcgggactgcctacccagcaggactgcaacatccaggagaagatcgatctggaaatacgaatgagggaaggaatttggaagctgcttagcctgtccacacaaaaggaccaagtgttgcatgcagtaaaaaatttgatggtctgtaatgcacgcctcatggcatacacctcggaattgcaaaagctagaagagcagattgcaaaccagactgggagatgcgacgtaaaatttgagtccaaggaacgcaccgcatgcaagggtaaaatagccatctcagatatcagaatcccacttatgtggaaggacagcgaccatttttctaataaggagaggtctagacggtatgcgattttttgtctcttcaagatgggggccaacgtgtttgacaccgatgtcgtgaatgtcgacaaaacaattacagacatttgctttgagaacgtgacaatcctgtag

SEQ ID NO: 102992 - DNA, 492 bp, Artificial Sequence
  derived and/or modified sequence
atggagggccccagcctgcggggccctgccctgcggctggccggcctgcccacccagcaggactgcaacatccaggagaagattgacctggagatccgcatgagggagggcatctggaagctgctgagcctgagcacccagaaggaccaggtgctgcatgctgtgaagaacctgatggtgtgcaatgcccggctgatggcctacaccagcgagctgcagaagctggaggagcagatcgccaaccagacaggccgctgtgatgtgaagtttgagagcaaggagaggacagcctgcaagggcaagatcgccatcagtgacatccgcatccccctgatgtggaaggacagcgaccacttcagcaacaaggagaggagccgccgctatgccatcttctgcctcttcaagatgggcgccaacgtgtttgacacagatgtggtgaatgtggacaagaccatcacagacatctgctttgaaaatgtgaccatcctgtag

SEQ ID NO: 102993 - DNA, 492 bp, Artificial Sequence
  derived and/or modified sequence
atggagggccccagcctgcggggccccgccctgcggctggccggcctccctacccagcaggactgtaacattcaggaaaaaattgacctagaaatccggatgagggagggtatctggaagctactgtcattatcaactcagaaagaccaggtccttcatgcagtgaagaacttgatggtgtgcaatgctcgactgatggcttacacaagcgagctccagaagctcgaggagcaaattgccaaccagacaggaaggtgtgatgtaaagtttgagagcaaggaacggaccgcctgcaaagggaagattgctatctccgacatacgaattcccctgatgtggaaagatagcgatcacttttctaacaaagagaggtcgaggcggtacgccatcttctgtttgttcaagatgggcgccaacgtttttgatactgatgtcgttaacgttgacaaaacaattacggacatttgcttcgagaacgtcacgatcttatag

SEQ ID NO: 102994 - DNA, 492 bp, Artificial Sequence
  derived and/or modified sequence
atggaaggcccttctcttagaggccctgcactccgcctggccggattgcctacacagcaggattgtaatatccaggagaagatcgacttagaaatccgcatgcgggagggaatttggaagctcctcagtctgtccacccagaaggatcaggtcctgcatgccgtcaaaaatctgatggtttgcaatgctcggctgatggcatacacctctgaattgcagaaactggaagaacagatcgctaaccagaccggccgatgcgacgtcaaattcgagagcaaggaaagaactgcttgtaagggaaagattgcgatcagtgacatcagaattcctttgatgtggaaggattcagatcacttttcgaataaagagcggagtcggagatacgcgatcttctgtctcttcaagatgggtgccaacgtttttgatactgacgtcgtcaatgtggacaagacaatcaccgacatctgcttcgaaaacgtgaccattctgtag

SEQ ID NO: 102995 - DNA, 2076 bp, Artificial Sequence
  derived and/or modified sequence
ccgggcggttggcgtcctctgcggctcctgccaggggcgggcttttcaaatcttccctttgaaggagtggcgacggcccggacagttcgcgttggagatggaggggccgagcctgaggggtcctgcgctccgcctggcggggcttcccacccagcaggactgcaacattcaagaaaaaatagacttagaaattcgaatgcgagaaggaatatggaaactcctttctctgagcactcagaaagatcaagttttacatgcagttaagaatctcatggtgtgcaatgctcgactaatggcctatacatcggagctacagaaattagaagaacagattgcaaatcagactggaagatgtgatgtgaaatttgaaagtaaagaacgaacagcatgtaaaggaaagattgccatatcagatattcgaataccactaatgtggaaagactctgatcacttcagcaataaagaacgatcacgacgctatgccattttttgtttattcaaaatgggagctaatgtgtttgatactgatgtggtgaatgtggataaaacaatcacagatatatgttttgaaaatgtaaccatattgtaagtattttttaatcttcagagaataaaaataatttaaaattcttcttttttaaaagaaagttcttattattggttctttggattcattttatgtttaaatgtttaagtgatctttaaatgtttaatatgattttaaaaatcattttgttcagaagaagtccatttctctatctgcagttttctgatgtgaaataaaaatggaaatcttgtaattactattagcagtaaatatttgacttattagatatgacccatttttaaattgttaataaatatagttcagttattaacaaagctatgcatacaacagaatatcctgtaatgttatttgatatagagagaatttaagcataaaacaggatttttatctcatgtaggatatttggttgcagaaatactaaaatagtatagcaactttatttacaagatagtcctgaagtacatgctatataggaagagcactttgaaattttggggtgttctttttcttatggtgcacttctttcatgtacttcaaagcaataaaaaaaaatgggtgatctcagggctgtttttattgtccctgctcttttacaggctcattttattgtggtcataatacagaacaagaaggaactccttgggtagccatagaaatcatttttaactaacatagtttttcctgccctccttcaaaggttctatgtgcctaaatcagtgtgggatttgtattttagacttttaaagacacgatctttagatctaaatgttaatagctactaactattaatataaaaatccatgtgcatggtttttgccattttcagctatggagctagacaggtgagattttagaggcctagttttgccactcacataacattaaaaaaacctatagtaaaccatattttgtagcttctggtccagtgtctcatagtaatagtatagcctggaaaaataaaatgcattgttctgagttataagtagtaattcaggccttcttacaagctgtattgaaccaaaggaatttatttaggatccaaaacatatccccaaatgcttatataattgaggctaaaaaaattacttttttcttggttatctgaatacatttatttccattatcaactattgctagtgaacttttttttctgccaaaattaccagttgatgggcccttttcttcacatcattttgctattgtttgttttgatcatggagacaaaaatcagacttttttttccagggaaagaacaatagaagttactgaggaagacaacacatgatttataattttttgagaattctgtaaatattttaaattgtactaaaaataactgctgacaaatgttctacatgttgaaaaatgtgctttttgttatgatgattgtttttaataagtattcaatatttatgaatctctggtttttctctaaatattgacatttgttagtcattaccaggaatactgcatgtttaaaagttgccaaataataaactataaaaata

SEQ ID NO: 102996 - protein, 394 aa, Artificial Sequence
  derived and/or modified sequence
MKRNTLVELLTFWKNWHFRLLLDLTAKMKFCLRWKSMGVSVTARHQDEEVEMTRMAVQFELEDLNLRPDPEPLLTEMIHEAAYRENTVGLHRFCPTENVAKINREVLHSYLRNYYTPDRMVLAGVGVEHEHLVDCARKYLLGVQPAWGSAEAVDIDRSVAQYTGGIAKLERDMSNVSLGPTPIPELTHIMVGLESCSFLEEDFIPFAVLNMMMGGGGSFSAGGPGKGMFSRLYLNVLNRHHWMYNATSYHHSYEDTGLLCIHASADPRQVREMVEIITKEFILMGGTVDTVELERAKTQLTSMLMMNLESRPVIFEDVGRQVLATRSRKLPHELCTLIRNVKPEDVKRVASKMLRGKPAVAALGDLTDLPTYEHIQTALSSKDGRLPRTYRLFR

SEQ ID NO: 102997 - DNA, 1185 bp, Artificial Sequence
  derived and/or modified sequence
atgaagcgcaacactttggtggaactgttgacattctggaaaaattggcacttcagactgttgttggatttgacagccaagatgaaattttgcctcaggtggaagagcatgggcgtcagtgtgaccgccaggcatcaggatgaagaagtcgagatgacccggatggcagtccagtttgaactggaagacctgaacctacgtcccgatccagagccattgttgactgagatgattcacgaagccgcatatcgtgagaatacggtgggactgcataggttttgccctacggaaaatgttgccaaaattaacagagaggtgctgcacagttatctccgcaactactacacaccagatcgcatggttctggccggcgttggagttgagcatgagcacctggtcgactgcgctcgtaaatatctgcttggtgtccagcccgcctgggggagtgccgaggctgtggatatagatcggtcagtcgcccagtacacggggggcattgccaagctcgagagggatatgtctaacgtgtccttgggcccgaccccaatcccagagctcacccatattatggtgggtctggagtcctgttctttcttagaggaagacttcatccctttcgccgttctgaatatgatgatggggggtggggggtcattttccgccggcggccccggcaaaggcatgttttcacgtctctatctgaatgttcttaatagacatcattggatgtataacgctacatcctatcatcattcctacgaggacaccggactgctctgcatccacgcctccgccgatccccggcaggttagggagatggtggagattatcacgaaggagttcatcctcatgggcggcactgttgatacggtagaacttgagcgggcaaagacgcaattgacatccatgctcatgatgaatctggagagccggcccgtcattttcgaggacgttggacgtcaggtgctggcgaccaggtcccgtaagctgccacatgaactttgcactctcatccggaatgtgaagccagaggacgtaaagagggtggcttccaagatgctgaggggcaagcctgcagtcgcggcactgggggacttgacggatctcccgacctatgaacacatacagaccgcattgtcttctaaggatggacgtctgcctaggacctacaggctgtttagatag

SEQ ID NO: 102998 - DNA, 1185 bp, Artificial Sequence
  derived and/or modified sequence
atgaagaggaacaccctggtggagctgctgaccttctggaagaactggcacttccggctgctgctggacctgacagccaagatgaagttctgcctgcgctggaagtccatgggcgtgtctgtgacagcccggcaccaggatgaggaggtggagatgaccaggatggctgtgcagtttgagctggaggacctgaacctgcggccagaccctgagcccctgctgacagagatgattcatgaagctgcctacagagaaaatacagtgggcctgcaccgcttctgccccacagaaaatgtggccaagatcaaccgggaggtgctgcacagctacctgaggaactactacaccccagacaggatggtgctggccggcgtgggcgtggagcacgagcacctggtggactgtgccaggaagtacctgctgggcgtgcagcctgcctggggcagcgctgaggccgtggacatcgacagatctgtggcccagtacacaggaggcatcgccaagctggagcgggacatgagcaatgtgtccctgggccccacccccatccctgagctgacccacatcatggtgggcctggagagctgcagcttcctggaggaggacttcatcccctttgctgtgctgaacatgatgatgggcggcggcggcagcttctctgctgggggccctgggaagggcatgttcagccggctgtacctgaatgtgctgaacagacaccactggatgtacaatgccaccagctaccaccacagctatgaggacaccggcctgctgtgcatccacgccagcgctgacccccggcaggtgcgggagatggtggagatcatcaccaaggagttcatcctgatgggcggcaccgtggacacagtggagctggagcgggccaagacccagctgacctccatgctgatgatgaacctggagagcaggcctgtgatctttgaagatgtgggccggcaggtgctggccaccaggagcaggaagctgccccatgagctgtgcaccctcatcagaaatgtgaagccagaagatgtgaagagggtggccagcaagatgctgcggggcaagccagctgtggccgccctgggggacctgacagacctgcccacctatgagcacatccagacagccctgagcagcaaggatggccgcctgcccaggacctaccgcctcttcagatag

SEQ ID NO: 102999 - DNA, 1185 bp, Artificial Sequence
  derived and/or modified sequence
atgaagcggaacaccctggtggagctgctgaccttctggaagaactggcatttcagactcctgctggatctgacagcaaaaatgaagttctgtctgcggtggaaatcaatgggcgtgtcggtgacagccaggcaccaagacgaggaggttgagatgacccgtatggctgtgcagtttgaactggaagatctgaatctgcgacccgatcccgagcctttgttgacagaaatgatccacgaggctgcctacagagaaaatactgtggggctacataggttttgtccaaccgagaacgtggccaaaattaatagagaggttttgcacagttatctgcggaactattacacccctgatagaatggtccttgccggcgttggagttgaacacgagcacctcgtggactgtgcacgcaaatacttgctcggcgtacagcccgcttgggggtctgcagaggcggtggacatcgatcgatcggtggcccagtacactggtgggatagccaaactagagcgcgacatgtctaacgtgagcctgggtcccacccccattcccgagctcacccatatcatggtgggactcgaaagttgcagttttttggaggaggatttcatccccttcgcggtgctcaatatgatgatgggtggcggcggcagcttcagcgctggcggcccggggaagggtatgttttcccgcctttatctgaacgttctgaatcgccatcattggatgtacaacgccacctcttatcaccactcctacgaggacacgggattactctgcattcacgccagcgctgatccaagacaggttcgggagatggtggagattattactaaggagtttatactaatgggcggaaccgtcgatacagtggaattggaacgggcgaagacgcagcttacctcgatgctcatgatgaatctagagtcccggcccgtaatctttgaggacgtaggcaggcaggtccttgcgacacggtctagaaaacttccacacgaattgtgtacacttattcgtaacgtcaaacctgaagacgtcaaaagagtggcctctaagatgctgcggggtaagccagccgtagctgccctgggtgacctaactgacctgccaacctacgaacatatccaaaccgctcttagctccaaggacggaagactccctagaacatatcggttgttccgatag

SEQ ID NO: 103000 - DNA, 1987 bp, Artificial Sequence
  derived and/or modified sequence
gacgcaagatggcggctgtggtgctggcggcgacgcggttgctgcggggctcgggttcttggggctgttcgcggctgaggtttggacctcctgcgtacagacggtttagtagtggtggtgcctatcccaacatccccctctcttctcccttacctggagtacccaagcctgtttttgctacagttgatggacaggaaaagtttgaaaccaaagtaaccacattggataatgggcttcgcgtggcatctcagaataagtttggacagttttgtacagtaggaattcttatcaattcaggatcgagatatgaagcgaaataccttagtggaattgctcactttttggaaaaattggcattttcgtctactgctcgatttgacagcaaagatgaaattctgcttacgttggaaaagcatgggggtatctgtgactgccagacatcaagatgaagaagtcgagatgacgcggatggcggtccagtttgagctggaggacctgaacctgcggcctgacccagagccacttctcaccgagatgattcatgaagcggcttacagggagaacacagttggcctccaccgtttctgccccacagaaaacgtagcaaagatcaaccgagaggtgctgcattcctacctgaggaactactacactcccgaccgcatggtgctggccggcgtgggcgtggagcacgagcatctggtggactgtgcccggaagtacctcctgggggtccagccggcctgggggagcgcagaggccgtggatattgacagatctgtggcccagtacactggggggattgccaagctagaaagagacatgtccaatgtcagcctgggcccgacccccatccccgagctcacgcacatcatggttggactggagagctgctccttcctggaggaggacttcatcccctttgcagtgttgaacatgatgatgggcggaggtggctccttctcggctggtgggcccggcaagggcatgttctccaggctctacctcaacgtgctcaacaggcaccactggatgtataacgcgacctcctaccaccacagctacgaggacactggcctcctttgcatccatgccagcgccgacccaagacaggttcgagaaatggtagaaatcatcacaaaggagtttattttaatgggcggaaccgtggacacggtggagctggaacgagccaagacgcagctgacatcaatgctcatgatgaacctggaatccaggcctgtgatcttcgaggatgtggggaggcaggtgctggccactcgctccagaaagctgccgcacgagctgtgcacgctcatccgcaacgtgaagccggaagatgtgaagagagtcgcttctaagatgctccgagggaagccggcagtggccgccctgggtgacctgactgacctgcccacgtatgagcacatccagaccgccctgtcgagtaaggacgggcgcctgcccaggacgtaccggctcttccggtagaaccgctccccggcctgacagacccagggagctgcagctggagcccgttcccgtgcgtgttagtttggacacgaatttagtctaaaaagctgtctggttgtataaacggtgcaaacaatgtcgccacagcacccacgcggtttgcattcttttggaactcaatgtgccgatcagtggagtcagtatcgagcctgaccaccgcaagccaggaagcaggtgaagtgcccagcgctggagtgcagcgtgccacgaggagggcggtcggtgcttccctcctcgggctgtgggcacatggggccccgcaggttccttggaggagccctgagctgggaggcagcaaaggctgacctatcaaagcctcccggaggccaccgtgctgggtaccaggactcacctctgacaagcaggagaaggtaagggcccggtcagctccaaggagcgcgctccacgcgcgtgcacacagcttccctggtaataaagagctggcatctttctt

SEQ ID NO: 103001 - DNA, 1185 bp, Artificial Sequence
  derived and/or modified sequence
atgaaacgaaacactttagtggaacttcttaccttttggaaaaattggcactttcggctgcttctggacctcacagctaaaatgaagttctgcttgcggtggaaaagcatgggcgtttcggtgaccgcccgacaccaggatgaggaagttgaaatgacccgcatggcagtgcagttcgaactggaagaccttaaccttcgtcctgaccccgagcctctgttgactgagatgatacacgaggccgcatatagagagaacacggtcggattgcaccgtttctgccccactgagaacgtagccaaaataaacagagaagttctccattcttatctgcggaactactacacacccgataggatggtgctggccggtgttggagtcgagcatgaacaccttgtcgactgcgccagaaaatacctgctgggcgttcagcctgcttgggggtctgccgaggcagttgacattgaccgcagtgtcgctcagtacaccggtggcatcgcaaaattggagagggacatgtcaaatgtcagtctgggcccaactccaataccggaactgactcatatcatggtgggtctcgagagctgtagttttctcgaagaggatttcatacccttcgctgtattgaacatgatgatgggtggcggaggctcttttagcgcagggggaccaggaaaaggcatgttctctaggttgtacctgaatgttctgaatcgccaccattggatgtataatgctacatcttaccatcattcttacgaagatactggacttctgtgtattcacgcctctgcagacccacgccaggtgcgagaaatggtcgagattatcactaaagagttcattctcatgggaggaactgtggacacagttgagctggagagagcaaagactcagctgactagtatgttgatgatgaacctcgagagcaggcccgttatctttgaggacgtgggacgccaggtactcgctacaaggtctaggaagttgccccacgaattatgtacccttatccggaatgtcaaacccgaggatgtgaagagagtggccagtaaaatgttacgaggcaagccggctgtggccgctctgggcgatctcacagacttgccaacctacgaacatatacagactgccctctcttcgaaagatgggcgtcttcccaggacgtacagacttttccggtag

SEQ ID NO: 103002 - DNA, 1185 bp, Artificial Sequence
  derived and/or modified sequence
atgaagagaaacaccctggtggagctgctgaccttctggaagaactggcacttcagactgctgctggacctgaccgccaagatgaagttctgcctgagatggaagagcatgggcgtgagcgtgaccgccagacaccaggacgaggaggtggagatgaccagaatggccgtgcagttcgagctggaggacctgaacctgagacccgaccccgagcccctgctgaccgagatgatccacgaggccgcctacagagagaacaccgtgggcctgcacagattctgccccaccgagaacgtggccaagatcaacagagaggtgctgcacagctacctgagaaactactacacccccgacagaatggtgctggccggcgtgggcgtggagcacgagcacctggtggactgcgccagaaagtacctgctgggcgtgcagcccgcctggggcagcgccgaggccgtggacatcgacagaagcgtggcccagtacaccggcggcatcgccaagctggagagagacatgagcaacgtgagcctgggccccacccccatccccgagctgacccacatcatggtgggcctggagagctgcagcttcctggaggaggacttcatccccttcgccgtgctgaacatgatgatgggcggcggcggcagcttcagcgccggcggccccggcaagggcatgttcagcagactgtacctgaacgtgctgaacagacaccactggatgtacaacgccaccagctaccaccacagctacgaggacaccggcctgctgtgcatccacgccagcgccgaccccagacaggtgagagagatggtggagatcatcaccaaggagttcatcctgatgggcggcaccgtggacaccgtggagctggagagagccaagacccagctgaccagcatgctgatgatgaacctggagagcagacccgtgatcttcgaggacgtgggcagacaggtgctggccaccagaagcagaaagctgccccacgagctgtgcaccctgatcagaaacgtgaagcccgaggacgtgaagagagtggccagcaagatgctgagaggcaagcccgccgtggccgccctgggcgacctgaccgacctgcccacctacgagcacatccagaccgccctgagcagcaaggacggcagactgcccagaacctacagactgttcagatag

SEQ ID NO: 103003 - protein, 2358 aa, Artificial Sequence
  derived and/or modified sequence
MQGPYSLNGYRVRVYRQDSATQWFTGIITHHDLFTRTMIVMNDQVLEPQNVDPSMVQMTFLDDVVHSLLKGENIGITSRRRSRANQNVNAVHSHYTRAQANSPRPAMNSQAAVPKQNTHQQQQQRSIRPNKRKGSDSSIPDEEKMKEEKYDYISRGENPKGKNKHLMNKRRKPEEDEKKLNMKRLRTDNVSDFSESSDSENSNKRIIDNSSEQKPENELKNKNTSKINGEEGKPHNNEKAGEETLKNSQPPWDQIQEDKKHEEAEKRKSVDTQLQEDMIIHSSEQSTVSDHNSNDLLPQECNMDKTHTMELLPKEKFVSRPPTPKCVIDITNDTNLEKVAQENSSTFGLQTLQKMDPNVSDSKHSIANAKFLETAKKDSDQSWVSDVVKVDLTQSSVTNASSGNDHLNMEKEKYVSYISPLSAVSVMEDKLHKRSPPPETIKSKLNTSVDTHKIKSSPSPEVVKPKITHSPDSVKSKATYVNSQATGERRLANKIEHELSRCSFHPIPTRSSTLETTKSPLIIDKNEHFTVYRDPALIGSETGANHISPFLSQHPFPLHSSSHRTCLNPGTHHPALTPAPHLLAGSSSQTPLPTINTHPLTSGPHHAVHHPHLLPTVLPGVPTASLLGGHPRLESAHASSLSHLALAHQQQQQLLQHQSPHLLGQAHPSASYNQLGLYPIIWQYPNGTHAYSGLGLPSSKWVHPENAVNAEASLRRNSPSPWLHQPTPVTSADGIGLLSHIPVRPSSAEPHRPLKITAHSSPPLTKTLVDHHKEELERKAFMEPLRSVASTSAKNDLDLNRSQTGKDCHLHRHFVDPVLNQLQRPPQETGERLNKYKEEHRRILQESIDVAPFTTKIKGLEGERENYSRVASSSSSPKSHIIKQDMDVERSVSDLYKMKHSVPQSLPQSNYFTTLSNSVVNEPPRSYPSKEVSNIYGDKQSNALAAAAANPQTLTSFITSLSKPPPLIKHQPESEGLVGKIPEHLPHQIASHSVTTFRNDCRSPTHLTVSSTNTLRSMPALHRAPVFHPPIHHSLERKEGSYSSLSPPTLTPVMPVNAGGKVQESQKPPTLIPEPKDSQANFKSSSEQSLTEMWRPNNNLSKEKTEWHVEKSSGKLQAAMASVIVRPSSSTKTDSMPAMQLASKDRVSERSSAGAHKTDCLKLAEAGETGRIILPNVNSDSVHTKSEKNFQAVSQGSVPSSVMSAVNTMCNTKTDVITSAADTTSVSSWGGSEVISSLSNTILASTSSECVSSKSVSQPVAQKQECKVSTTAPVTLASSKTGSVVQPSSGFSGTTDFIHLKKHKAALAAAQYKSSNASETEPNAIKNQTLSASLPLDSTVICSTINKANSVGNGQASQTSQPNYHTKLKKAWLTRHSEEDKNTNKMENSGNSVSEIIKPCSVNLIASTSSDIQNSVDSKIIVDKYVKDDKVNRRKAKRTYESGSESGDSDESESKSEQRTKRQPKPTYKKKQNDLQKRKGEIEEDLKPNGVLSRSAKERSKLKLQSNSNTGIPRSVLKDWRKVKKLKQTGESFLQDDSCCEIGPNLQKCRECRLIRSKKGEEPAHSPVFCRFYYFRRLSFSKNGVVRIDGFSSPDQYDDEAMSLWTHENFEDDELDIETSKYILDIIGDKFCQLVTSEKTALSWVKKDAKIAWKRAVRGVREMCDACEATLFNIHWVCQKCGFVVCLDCYKAKERKSSRDKELYAWMKCVKGQPHDHKHLMPTQIIPGSVLTDLLDAMHTLREKYGIKSHCHCTNKQNLQVGNFPTMNGVSQVLQNVLNHSNKISLCMPESQQQNTPPKSEKNGGSSPESDVGTDNKLTPPESQSPLHWLADLAEQKAREEKKENKELTLENQIKEEREQDNSESPNGRTSPLVSQNNEQGSTLRDLLTTTAGKLRVGSTDAGIAFAPVYSMGAPSSKSGRTMPNILDDIIASVVENKIPPSKTSKINVKPELKEEPEESIISAVDENNKLYSDIPHSWICEKHILWLKDYKNSSNWKLFKECWKQGQPAVVSGVHKKMNISLWKAESISLDFGDHQADLLNCKDSIISNANVKEFWDGFEEVSKRQKNKSGETVVLKLKDWPSGEDFKTMMPARYEDLLKSLPLPEYCNPEGKFNLASHLPGFFVRPDLGPRLCSAYGVVAAKDHDIGTTNLHIEVSDVVNILVYVGIAKGNGILSKAGILKKFEEEDLDDILRKRLKDSSEIPGALWHIYAGKDVDKIREFLQKISKEQGLEVLPEHDPIRDQSWYVNKKLRQRLLEEYGVRTCTLIQFLGDAIVLPAGALHQVQNFHSCIQVTEDFVSPEHLVESFHLTQELRLLKEEINYDDKLQVKNILYHAVKEMVRALKIHEDEVEDMEEN

SEQ ID NO: 103004 - DNA, 8415 bp, Artificial Sequence
  derived and/or modified sequence
tcgttctcatttgggtgtctgcactgttggaagctactgcactgtgtttccacgcagacagagtacagtgggaaaggctttctccagctgatggatggctgttctctttatttggagtatcttactggttatgtaagcgacctcgagagaaattatcctgacccagatcggaggatgcagtagtgcttcagctgcaggatttcttagtcgttaacaccacagtgctgatgacaaagagcgagttgtaatcctcatcactgccagggctgagccagagcagacagaaaatcgtcatttgctcgttggagacttgttaggttacagctcctgcttcgttctgtggtcttggcttttcttcctatacaatgacgccgctgcaagtgagctcagaaatgcttggtttgagagccatttgcctgtgatttttgaagactaaagaagtatttacactagatactcttccagaacaaaatagaaatttcagcaaatacttactgacctttaaagccttgttgtggatttctgagatttaaagatactttaaaattctcaagaacaaagtccttattccttaaatggatacagagtgagagtatatagacaagactctgccacccagtggtttactggcataattactcatcatgatctcttcacccgcaccatgatcgttatgaatgatcaggtactagaaccacagaatgtcgatccttctatggttcaaatgacctttctagatgatgttgttcactctttgttaaaaggtgaaaatattggcattacatcacgacgcaggtctcgtgccaatcaaaacgtcaacgctgttcacagccattatacacgtgcccaagcaaatagtcccagaccagcaatgaactcccaagctgctgtaccaaaacagaatacacaccagcaacagcaacaaagaagtatccgtccaaataagaggaagggctcagatagcagtataccagatgaagagaagatgaaggaggaaaaatatgattatatatcacgaggagaaaatcctaaaggtaaaaacaaacacttgatgaataaaagaaggaaacctgaggaggatgaaaagaaactaaatatgaaaagacttcgaactgacaatgtttcagacttttctgagagcagtgactcagaaaattcaaataagagaataatagataattcctcagaacagaagccagagaatgaattgaaaaataaaaatacttcaaaaataaatggagaagaaggaaaaccccataataatgagaaggcaggagaagagaccctaaaaaatagccagcctccctgggatcaaatacaggaagataaaaaacatgaagaagcagagaagcggaagtctgttgacactcagcttcaagaagatatgattattcattcgtcagaacagtccacagtttctgatcataattctaatgatttacttcctcaggaatgcaatatggataaaacacataccatggaattgctaccaaaggagaagtttgtatccagaccacccacaccaaaatgtgttattgatattacaaatgacactaatttagaaaaggtggctcaggaaaactcaagtacctttggccttcagacacttcagaaaatggatcctaatgttagtgattcaaaacactctattgcaaatgcaaaattcttggaaacagcaaaaaaagattctgaccagagctgggtcagtgatgtagttaaagtggatctaacccaatcaagtgttacaaatgcttcttcaggaaatgatcacttgaacatggaaaaagagaagtatgtctcttacatttctcctttaagtgcagtttctgtcatggaagataagctgcataagcgaagtccacctccagagactataaaatctaaacttaatacttcagtagatactcacaagataaaatccagcccatcacctgaagttgttaaacccaaaataactcattctcctgattctgtaaagtctaaggccacttatgtgaacagccaagctactggtgaaagaagattggcaaataagatagaacatgagctatcaagatgcagttttcatccaattcctactcgaagcagtacattagaaactacaaagagtcctcttatcattgataaaaatgagcattttacagtttacagagatcctgcacttattgggtcagaaacaggagctaatcatatttcacctttcctaagccagcatccttttcctcttcactcctcatctcatagaacctgtttaaatccaggtacccatcatcctgccttaactcctgcaccccatttactagccggatcatctagtcaaactccattacctaccattaacactcatcctctgactagtggtccacaccatgctgttcatcaccctcatttacttcccactgtgttacctggagtgcctactgcctccttacttggtggccacccacgactagagagtgctcatgccagcagcttgagccacttagcgctagcacaccagcaacaacaacagttgttacagcaccagtcacctcatcttcttggacaagcccatccttctgcttcatataatcagcttggactttatccaattatttggcagtatccaaatggaacacatgcatactcaggacttggtttgccttcttctaagtgggttcacccagaaaatgcagttaatgctgaagcttcattaaggaggaattctcccagtccttggctacatcagcccacccctgtgacctcagcagatggtattggattacttagtcacattcctgtcagaccttccagtgcagagcctcatcggcctcttaaaattacagcccattccagtccaccattgacaaaaactttagtagatcatcataaggaagaattagaaagaaaagcttttatggaaccattacggtctgttgcatccacatcagccaaaaatgacctggatctaaataggtcacagactggaaaagattgtcacttacataggcattttgtggatccagtattaaatcagttacagaggccaccccaggagactggagagaggttaaacaaatacaaagaggaacaccgtcgaattcttcaagaaagtattgatgttgctccctttacaactaaaatcaagggacttgagggtgagagagagaattattccagagtggcatcatcatcttccagtcctaaaagccatatcatcaaacaagatatggatgtagaacgctcagtatcagatctttataaaatgaagcactcagtgcctcagagtttaccccaaagtaactatttcactacattgtctaatagtgtggtcaatgaaccaccaagatcatacccatccaaagaagtttcaaatatttacggtgataaacagagtaatgcccttgcagcggcagcagctaatcctcaaactctgacttcatttataacatctctttcaaagcctccacctttgattaaacaccaaccagaaagtgaaggtttagtaggcaagataccagaacatcttccacatcagattgcatctcactcagtaacaaccttcagaaatgattgtaggagtcctacccatttgacagtttcttctacaaatacactccgcagtatgcctgcattacatagagcaccagtatttcacccaccaatccatcacagcctggaaagaaaggaaggcagctatagtagtctttcccctccaactttaactccggtgatgccagtaaatgctggtggtaaagttcaagaatcacagaagcctccaactctaatacccgaaccaaaagactcccaggcaaattttaagagttcttcagaacagagtttgacggagatgtggagacctaataataacctcagcaaagagaaaactgaatggcatgtggagaaaagcagcggaaagttacaggctgctatggcatctgtcattgtgcgtccatcttctagtacaaaaactgatagtatgccagcaatgcagttagcttctaaagatcgagttagtgaaagatcttcagctggggcacataaaacagattgcctcaaactagcagaagccggagaaactggaagaatcattttgccaaatgtgaattcagacagtgttcacacaaaatctgaaaaaaactttcaggctgtctcacagggcagtgttcccagttcagtcatgtctgctgtaaatacgatgtgtaataccaaaacggatgtaatcacatctgctgccgatactaccagtgtttccagctggggtggttcagaagtaatttcctctttatcaaataccattttggcctctacatcatcagaatgtgtatcttcaaaaagtgtcagtcagccagtggctcaaaaacaagaatgcaaggtcagcaccacagcaccagttacattagccagtagtaagacaggaagtgttgttcaacccagttctgggttctcaggcacaactgattttatccatttaaaaaagcacaaggcagcattggctgcagctcagtataaaagtagtaatgccagtgagactgaacctaatgctataaaaaatcagacactttcagcctcccttcctctggatagcactgtaatctgtagtacaattaacaaagcaaactctgtaggaaatgggcaagcttcccagacaagtcaaccaaactaccatactaaactgaaaaaggcctggctcaccagacactcagaagaagataaaaatactaataaaatggaaaattcagggaattctgtatcagaaattattaagccatgttctgtcaacttaatagcctctacatctagtgatatacaaaatagtgtagatagtaagatcatagttgataaatatgtaaaagatgataaagtcaacaggagaaaagccaaaagaacttatgaatctggctctgaaagtggagactcagatgaaagtgaaagcaagtcagagcaaaggactaaaagacaacctaagccaacttacaaaaagaagcaaaatgatttgcaaaagagaaaaggtgaaatagaagaagatttgaaacccaatggagttctcagcaggagtgccaaagaaagaagtaaactgaagttgcaaagcaacagtaatactggcattcctcgttcagtattgaaagattggcgtaaagtcaagaagctgaagcaaactggggaatcctttttacaggatgactcctgctgtgagatagggcctaatttacaaaagtgtcgagaatgtagacttattcgcagtaaaaaaggagaagaaccagctcactcaccagtattttgtagattttactactttagacggttgtcatttagtaaaaacggagtagttagaatagatggtttctcttctcctgaccaatatgatgatgaagctatgagtttgtggacacatgaaaattttgaagatgatgaactagatatagagacttctaaatatatcttggatataataggtgataagttctgtcaattagtaacatctgaaaaaacagctttgtcctgggtgaaaaaggatgccaaaattgcctggaaaagagcagtgagaggagtccgggagatgtgtgatgcatgtgaagcaacattgtttaacattcactgggtctgccaaaaatgtggatttgtggtctgcttagattgttacaaggcaaaggaaaggaagagttctagagataaagaactatatgcttggatgaagtgtgtgaagggacagcctcatgatcacaaacatttaatgccaacccaaattatacctggttctgttttgacagatcttctagatgccatgcacactcttagggaaaaatatggtattaaatcccattgtcattgtactaacaaacagaatttacaagttggaaattttcctacaatgaatggtgtatctcaatctcagcagcaaaatactcctccgaagtctgagaaaaatggtggcagcagcccagagagtgatgtaggcacagataacaagttaactcctccagaatcccagtcaccactgcactggttagcagatcttgcagagcaaaaagccagagaggaaaaaaaagaaaacaaagaacttacccttgaaaaccaaattaaagaagaaagagaacaagacaactctgaatctccaaatggcagaacatcacctcttgtgtcccagaataatgaacaaggctcaaccttacgggatttgctgactacaacagctggaaagctacgtgtggggtctacagatgctggcattgcctttgccccagtatattcaatgggagccccaagtagcaaaagtggacggactatgcctaacattcttgatgacataattgcttcagttgttgaaaacaaaattccaccaagtaaaacctccaagataaatgtaaaaccagagcttaaagaagagcctgaagaaagcataatatctgcagtggatgaaaataataaattatacagtgatataccacattcttggatctgtgagaagcatattttatggcttaaggattataagaatagcagtaattggaagcttttcaaagaatgttggaaacaaggacagcctgcagtggtttctggtgtgcataagaaaatgaacattagcctatggaaggcggaatcaattagtcttgattttggagaccaccaagctgatctcctgaactgcaaagatagcatcatttcaaatgccaatgttaaggaattctgggatggttttgaagaagtttcaaaacggcagaaaaacaagagtggagaaacagttgttttaaaattgaaagactggccttcaggagaagacttcaagactatgatgccagcaagatacgaagatcttttaaaaagtctgccattgccagaatattgtaatccagaaggaaaattcaatttggcctctcatttgccaggattttttgtacgtcctgatctaggacccaggttgtgcagtgcctatggtgtagttgctgctaaagatcatgatataggaacaacaaatctccatattgaagtttctgatgttgtaaatatactagtttatgttggcatagcaaaaggaaatggcattctctcaaaagcaggaattctcaagaaatttgaggaagaagatttggatgacattttaaggaaaagattgaaggactcaagtgaaatacctggtgctctgtggcatatttatgctgggaaagatgttgacaagataagggaatttcttcaaaagatttcaaaagaacaaggccttgaagttctaccagaacatgatccaatacgtgaccaaagttggtatgtgaacaaaaagctccgtcaaaggctgcttgaagaatatggagtcagaacctgtactcttattcagttccttggtgatgctattgttttgccagcgggagcacttcatcaggttcagaattttcacagctgtattcaggtaactgaagattttgtgtctccagaacatcttgtagagtcatttcatttaacacaggaactgagacttttgaaggaagaaatcaattatgatgataaactacaggttaaaaatattttgtatcatgcagtcaaagaaatggtgagagccttgaagatacacgaggatgaagtagaggatatggaagaaaattaagtgtgatccagtttgatatttttaggttgttgaactgggattacttaaccttgaatgatgatatgtatgcacactgactttaagcttcataaaaccatcagtgccaagaaattctctttgtagtaattacttgttactgacaccacagcagtatagcatatgtcacagctcctgtgattcaatgttataaaacaagcagaattttaaaagcagcactatatagctgttttgtattatagtgtatatgatgtttgtgaaaatgccagatttaaaatgatgtatttatttttggtaaaaaataaaaaattctatgctatattgttgatcaagtgtaaatgtgaccttgtacagtttactaaaattactgatatttttcactacattgagacagttactgtgagaataggacacaaacaccagctattgcctgcatctgggaaattgctgaatcgcacagcagtcatgtcataatcagaaaattactgccaaataattgtaaaatttgtaaagtataaagtatataaagtagatactaaatacagacacttcaatattttgttgaagctattgactgtacaattaaacattttcaaaaggtgtaatttatttaaaattgtctcattttggtaaaatttatgtgaacttttaaagctaaatattaaacttaatatgctatgtaaatatatacatatatacatttaatgatgtatttttttaaaacattggcttgcttttgttaaagtgcaagtgttacatatggctttgtacattaaagttgaaaggggttttacattttccattaaaaggactttatcaaaaaaaaaaaaaaaaaaaaaaaa

SEQ ID NO: 103005 - DNA, 8391 bp, Artificial Sequence
  derived and/or modified sequence
tcgttctcatttgggtgtctgcactgttggaagctactgcactgtgtttccacgcagacagagtacagtgggaaaggctttctccagctgatggatggctgttctctttatttggagtatcttactggttatgtaagcgacctcgagagaaattatcctgacccagatcggaggatgcagtagtgcttcagctgcaggatttcttagtcgttaacaccacagtgctgatgacaaagagcgagttgtaatcctcatcactgccagggctgagccagagcagacagaaaatcgtcatttgctcgttggagacttgttaggttacagctcctgcttcgttctgtggtcttggcttttcttcctatacaatgacgccgctgcaagtgagctcagaaatgcttggtttgagagccatttgcctgtgatttttgaagactaaagaagtatttacactagatactcttccagaacaaaatagaaatttcagcaaatacttactgacctttaaagccttgttgtggatttctgagatttaaagatactttaaaattctcaagaacaaagtccttattccttaaatggatacagagtgagagtatatagacaagactctgccacccagtggtttactggcataattactcatcatgatctcttcacccgcaccatgatcgttatgaatgatcaggtactagaaccacagaatgtcgatccttctatggttcaaatgacctttctagatgatgttgttcactctttgttaaaaggtgaaaatattggcattacatcacgacgcaggtctcgtgccaatcaaaacgtcaacgctgttcacagccattatacacgtgcccaagcaaatagtcccagaccagcaatgaactcccaagctgctgtaccaaaacagaatacacaccagcaacagcaacaaagaagtatccgtccaaataagaggaagggctcagatagcagtataccagatgaagagaagatgaaggaggaaaaatatgattatatatcacgaggagaaaatcctaaaggtaaaaacaaacacttgatgaataaaagaaggaaacctgaggaggatgaaaagaaactaaatatgaaaagacttcgaactgacaatgtttcagacttttctgagagcagtgactcagaaaattcaaataagagaataatagataattcctcagaacagaagccagagaatgaattgaaaaataaaaatacttcaaaaataaatggagaagaaggaaaaccccataataatgagaaggcaggagaagagaccctaaaaaatagccagcctccctgggatcaaatacaggaagataaaaaacatgaagaagcagagaagcggaagtctgttgacactcagcttcaagaagatatgattattcattcgtcagaacagtccacagtttctgatcataattctaatgatttacttcctcaggaatgcaatatggataaaacacataccatggaattgctaccaaaggagaagtttgtatccagaccacccacaccaaaatgtgttattgatattacaaatgacactaatttagaaaaggtggctcaggaaaactcaagtacctttggccttcagacacttcagaaaatggatcctaatgttagtgattcaaaacactctattgcaaatgcaaaattcttggaaacagcaaaaaaagattctgaccagagctgggtcagtgatgtagttaaagtggatctaacccaatcaagtgttacaaatgcttcttcaggaaatgatcacttgaacatggaaaaagagaagtatgtctcttacatttctcctttaagtgcagtttctgtcatggaagataagctgcataagcgaagtccacctccagagactataaaatctaaacttaatacttcagtagatactcacaagataaaatccagcccatcacctgaagttgttaaacccaaaataactcattctcctgattctgtaaagtctaaggccacttatgtgaacagccaagctactggtgaaagaagattggcaaataagatagaacatgagctatcaagatgcagttttcatccaattcctactcgaagcagtacattagaaactacaaagagtcctcttatcattgataaaaatgagcattttacagtttacagagatcctgcacttattgggtcagaaacaggagctaatcatatttcacctttcctaagccagcatccttttcctcttcactcctcatctcatagaacctgtttaaatccaggtacccatcatcctgccttaactcctgcaccccatttactagccggatcatctagtcaaactccattacctaccattaacactcatcctctgactagtggtccacaccatgctgttcatcaccctcatttacttcccactgtgttacctggagtgcctactgcctccttacttggtggccacccacgactagagagtgctcatgccagcagcttgagccacttagcgctagcacaccagcaacaacaacagttgttacagcaccagtcacctcatcttcttggacaagcccatccttctgcttcatataatcagcttggactttatccaattatttggcagtatccaaatggaacacatgcatactcaggacttggtttgccttcttctaagtgggttcacccagaaaatgcagttaatgctgaagcttcattaaggaggaattctcccagtccttggctacatcagcccacccctgtgacctcagcagatggtattggattacttagtcacattcctgtcagaccttccagtgcagagcctcatcggcctcttaaaattacagcccattccagtccaccattgacaaaaactttagtagatcatcataaggaagaattagaaagaaaagcttttatggaaccattacggtctgttgcatccacatcagccaaaaatgacctggatctaaataggtcacagactggaaaagattgtcacttacataggcattttgtggatccagtattaaatcagttacagaggccaccccaggagactggagagaggttaaacaaatacaaagaggaacaccgtcgaattcttcaagaaagtattgatgttgctccctttacaactaaaatcaagggacttgagggtgagagagagaattattccagagtggcatcatcatcttccagtcctaaaagccatatcatcaaacaagatatggatgtagaacgctcagtatcagatctttataaaatgaagcactcagtgcctcagagtttaccccaaagtaactatttcactacattgtctaatagtgtggtcaatgaaccaccaagatcatacccatccaaagaagtttcaaatatttacggtgataaacagagtaatgcccttgcagcggcagcagctaatcctcaaactctgacttcatttataacatctctttcaaagcctccacctttgattaaacaccaaccagaaagtgaaggtttagtaggcaagataccagaacatcttccacatcagattgcatctcactcagtaacaaccttcagaaatgattgtaggagtcctacccatttgacagtttcttctacaaatacactccgcagtatgcctgcattacatagagcaccagtatttcacccaccaatccatcacagcctggaaagaaaggaaggcagctatagtagtctttcccctccaactttaactccggtgatgccagtaaatgctggtggtaaagttcaagaatcacagaagcctccaactctaatacccgaaccaaaagactcccaggcaaattttaagagttcttcagaacagagtttgacggagatgtggagacctaataataacctcagcaaagagaaaactgaatggcatgtggagaaaagcagcggaaagttacaggctgctatggcatctgtcattgtgcgtccatcttctagtacaaaaactgatagtatgccagcaatgcagttagcttctaaagatcgtgttagtgaaagatcttcagctggggcacataaaacagattgcctcaaactagcagaagccggagaaactggaagaatcattttgccaaatgtgaattcagacagtgttcacacaaaatctgaaaaaaactttcaggctgtctcacagggcagtgttcccagttcagtcatgtctgctgtaaatacgatgtgtaataccaaaacggatgtaatcacatctgctgccgatactaccagtgtttccagctggggtggttcagaagtaatttcctctttatcaaataccattttggcctctacatcatcagaatgtgtatcttcaaaaagtgtcagtcagccagtggctcaaaaacaagaatgcaaggtcagcaccacagcaccagttacattagccagtagtaagacaggaagtgttgttcaacccagttctgggttctcaggcacaactgattttatccatttaaaaaagcacaaggcagcattggctgcagctcagtataaaagtagtaatgccagtgagactgaacctaatgctataaaaaatcagacactttcagcctcccttcctctggatagcactgtaatctgtagtacaattaacaaagcaaactctgtaggaaatgggcaagcttcccagacaagtcaaccaaactaccatactaaactgaaaaaggcctggctcaccagacactcagaagaagataaaaatactaataaaatggaaaattcagggaattctgtatcagaaattattaagccatgttctgtcaacttaatagcctctacatctagtgatatacaaaatagtgtagatagtaagatcatagttgataaatatgtaaaagatgataaagtcaacaggagaaaagccaaaagaacttatgaatctggctctgaaagtggagactcagatgaaagtgaaagcaagtcagagcaaaggactaaaagacaacctaagccaacttacaaaaagaagcaaaatgatttgcaaaagagaaaaggtgaaatagaagaagatttgaaacccaatggagttctcagcaggagtgccaaagaaagaagtaaactgaagttgcaaagcaacagtaatactggcattcctcgttcagtattgaaagattggcgtaaagtcaagaagctgaagcaaactggggaatcctttttacaggatgactcctgctgtgagatagggcctaatttacaaaagtgtcgagaatgtagacttattcgcagtaaaaaaggagaagaaccagctcactcaccagtattttgtagattttactactttagacggttgtcatttagtaaaaacggagtagttagaatagatggtttctcttctcctgaccaatatgatgatgaagctatgagtttgtggacacatgaaaattttgaagatgatgaactagatatagagacttctaaatatatcttggatataataggtgataagttctgtcaattagtaacatctgaaaaaacagctttgtcctgggtgaaaaaggatgccaaaattgcctggaaaagagcagtgagaggagtccgggagatgtgtgatgcatgtgaagcaacattgtttaacattcactgggtctgccaaaaatgtggatttgtggtctgcttagattgttacaaggcaaaggaaaggaagagttctagagataaagaactatatgcttggatgaagtgtgtgaagggacagcctcatgatcacaaacatttaatgccaacccaaattatacctggttctgttttgacagatcttctagatgccatgcacactcttagggaaaaatatggtattaaatcccattgtcattgtactaacaaacagaatttacaagttggaaattttcctacaatgaatggtgtatctcaatctcagcagcaaaatactcctccgaagtctgagaaaaatggtggcagcagcccagagagtgatgtaggcacagataacaagttaactcctccagaatcccagtcaccactgcactggttagcagatcttgcagagcaaaaagccagagaggaaaaaaaagaaaacaaagaacttacccttgaaaaccaaattaaagaagaaagagaacaagacaactctgaatctccaaatggcagaacatcacctcttgtgtcccagaataatgaacaaggctcaaccttacgggatttgctgactacaacagctggaaagctacgtgtggggtctacagatgctggcattgcctttgccccagtatattcaatgggagccccaagtagcaaaagtggacggactatgcctaacattcttgatgacataattgcttcagttgttgaaaacaaaattccaccaagtaaaacctccaagataaatgtaaaaccagagcttaaagaagagcctgaagaaagcataatatctgcagtggatgaaaataataaattatacagtgatataccacattcttggatctgtgagaagcatattttatggcttaaggattataagaatagcagtaattggaagcttttcaaagaatgttggaaacaaggacagcctgcagtggtttctggtgtgcataagaaaatgaacattagcctatggaaggcggaatcaattagtcttgattttggagaccaccaagctgatctcctgaactgcaaagatagcatcatttcaaatgccaatgttaaggaattctgggatggttttgaagaagtttcaaaacggcagaaaaacaagagtggagaaacagttgttttaaaattgaaagactggccttcaggagaagacttcaagactatgatgccagcaagatacgaagatcttttaaaaagtctgccattgccagaatattgtaatccagaaggaaaattcaatttggcctctcatttgccaggattttttgtacgtcctgatctaggacccaggttgtgcagtgcctatggtgtagttgctgctaaagatcatgatataggaacaacaaatctccatattgaagtttctgatgttgtaaatatactagtttatgttggcatagcaaaaggaaatggcattctctcaaaagcaggaattctcaagaaatttgaggaagaagatttggatgacattttaaggaaaagattgaaggactcaagtgaaatacctggtgctctgtggcatatttatgctgggaaagatgttgacaagataagggaatttcttcaaaagatttcaaaagaacaaggccttgaagttctaccagaacatgatccaatacgtgaccaaagttggtatgtgaacaaaaagctccgtcaaaggctgcttgaagaatatggagtcagaacctgtactcttattcagttccttggtgatgctattgttttgccagcgggagcacttcatcaggttcagaattttcacagctgtattcaggtaactgaagattttgtgtctccagaacatcttgtagagtcatttcatttaacacaggaactgagacttttgaaggaagaaatcaattatgatgataaactacaggttaaaaatattttgtatcatgcagtcaaagaaatggtgagagccttgaagatacacgaggatgaagtagaggatatggaagaaaattaagtgtgatccagtttgatatttttaggttgttgaactgggattacttaaccttgaatgatgatatgtatgcacactgactttaagcttcataaaaccatcagtgccaagaaattctctttgtagtaattacttgttactgacaccacagcagtatagcatatgtcacagctcctgtgattcaatgttataaaacaagcagaattttaaaagcagcactatatagctgttttgtattatagtgtatatgatgtttgtgaaaatgccagatttaaaatgatgtatttatttttggtaaaaaataaaaaattctatgctatattgttgatcaagtgtaaatgtgaccttgtacagtttactaaaattactgatatttttcactacattgagacagttactgtgagaataggacacaaacaccagctattgcctgcatctgggaaattgctgaatcgcacagcagtcatgtcataatcagaaaattactgccaaataattgtaaaatttgtaaagtataaagtatataaagtagatactaaatacagacacttcaatattttgttgaagctattgactgtacaattaaacattttcaaaaggtgtaatttatttaaaattgtctcattttggtaaaatttatgtgaacttttaaagctaaatattaaacttaatatgctatgtaaatatatacatatatacatttaatgatgtatttttttaaaacattggcttgcttttgttaaagtgcaagtgttacatatggctttgtacattaaagttgaaaggggttttacattttccattaaaaggactttatc

SEQ ID NO: 103006 - DNA, 6912 bp, Artificial Sequence
  derived and/or modified sequence
atgattgttatgaacgatcaagttctggagccacagaatgtcgatccttccatggtgcagatgacatttctggacgacgttgttcactccctcctcaagggagagaatattggcatcacaagccggagaaggagtcgtgctaaccagaatgtaaacgctgtgcacagccactacacgcgcgctcaagcgaactctcctcgcccggccatgaatagccaggccgctgtgcctaaacagaatacccatcagcaacagcaacagcgctccatccgtccaaataaaagaaaaggcagcgattctagtattcccgacgaggagaaaatgaaggaagagaagtatgattacatctcacgcggggagaatcctaagggcaagaacaaacatctcatgaacaagagaagaaagccggaggaggatgagaagaagctcaatatgaagcggctacggacggacaacgtctcagatttttcggagagctccgattctgaaaacagcaacaagcgcattatcgacaactctagcgaacagaaacctgaaaacgagctgaaaaacaaaaacacttctaagattaacggagaagaggggaagccccacaacaatgaaaaagctggcgaagagactctaaagaatagccaacccccctgggaccaaattcaggaagataaaaagcacgaggaggcagagaaaaggaagagtgtggatactcaactacaggaagatatgatcatccatagctcagaacaaagcaccgtgtcagatcataactctaatgacctgctgccccaggagtgcaacatggacaagacacacactatggaacttctgccaaaggagaagtttgtgtcgcgcccccctacgcctaagtgcgtcatcgacattaccaacgataccaacttggagaaggttgcacaggaaaacagttccactttcggactccaaaccctgcagaagatggatcctaacgtttcagactccaaacatagcatcgctaatgcaaaattcttggagacagccaaaaaagacagcgatcaaagttgggtgagcgatgtcgttaaagtggatcttacacagagctccgttacaaatgcttcaagcgggaatgaccatcttaatatggaaaaagaaaaatatgtgtcttacatctcccccttgtctgcagtctcggtgatggaggataaactgcataaacgatcaccacccccggagacaatcaaatcaaagctgaacaccagtgttgacacccataagattaagtcaagcccctccccggaagtggtcaaaccaaaaattactcatagccctgattccgtgaaatcgaaggcaacatacgttaatagccaggccacaggggagcgaaggcttgcaaataagattgagcacgagttatcacgctgtagcttccatccaatcccgaccagaagctccactctcgaaaccacaaagtcacccctgataatagataagaatgaacactttaccgtttacagagacccggcattgatcgggtcagagaccggtgcaaatcacattagccctttcctctctcaacatccgtttccgcttcatagctcttctcatcgtacatgtctgaaccccggtacccaccaccctgctcttacgccggccccccaccttctggccgggtcttcatcccaaactccgctgccgactatcaatacacacccgctcacctctggcccccaccatgccgtgcatcacccacaccttctgcccacagtgttgcctggcgtgccaactgccagtctccttggcgggcatccgcgacttgaaagcgcccacgctagcagtctatctcacttggccctcgcacatcagcaacaacagcaactgcttcagcaccagtcacctcacctgctgggtcaggcccatccttccgcttcttacaatcagctaggcctatatccaattatatggcagtacccaaacgggactcacgcttatagcggactcggactgccatctagcaagtgggtgcacccggaaaatgcagtgaatgctgaagcatcactccggcggaatagcccttctccatggctgcaccagcctactcccgtgacctctgccgatggcatcggcctgctatcacatattcctgtacgtccttcttcggctgaaccccacagacctctaaaaatcaccgcccattcatctccccctctaacaaagactctagtggaccaccataaggaagagctggaaagaaaggcatttatggagccgttaagaagtgtggccagcacctctgccaagaatgacctcgatctgaatcgatctcagactggaaaagactgtcacctgcacagacattttgtcgaccccgtgcttaaccagctgcagagacctccccaggagaccggagagagactcaacaaatacaaggaagagcataggcgaattctgcaggagagcatcgatgtggccccttttaccaccaagatcaaaggcctagaaggcgagcgagagaactactctcgcgtggcttccagctcatcatcccccaagtcccacattatcaaacaggacatggacgtcgaacgctcggtatcagacttgtacaaaatgaagcactccgtgccccagtctttgccccagtctaactatttcactaccctgtctaatagcgtggttaacgaacctccccggtcatacccatccaaggaggtcagtaatatctatggggacaagcagagcaatgccctcgcagccgcagccgccaacccccagacattaacatcatttataacttcgttgagtaaacctccgcctctgataaagcatcagccagagtctgaaggactcgtgggcaaaatccctgagcacctaccccaccagatcgcaagtcactccgtcaccaccttcagaaatgactgcaggtcccccacgcaccttacagtttcctcgaccaatacactgaggtcgatgccagccctccacagggcccccgtgttccaccctccaatccatcatagcctggaaagaaaggaaggcagctactcctccctctcaccacctacgctgacccccgtaatgccagtaaatgccggcggaaaggtccaagagagccaaaaaccacctacactgatacctgaacccaaggattctcaggcaaactttaagagctcctctgagcaatctttaacagaaatgtggcgacctaataataatctcagcaaagagaaaactgaatggcacgtcgaaaagagctctggaaaattacaggccgcaatggctagcgtgatcgtgcgcccgtcatccagcaccaagacagatagcatgccggctatgcagctggcaagcaaggatcgggttagcgaaaggagcagtgctggcgcacacaaaaccgactgcctcaaacttgcggaagccggagagacaggccgtatcatcctccccaacgttaatagtgattcggtgcacacaaaatctgagaaaaacttccaggcggttagtcagggctctgtgccttcctccgtgatgagcgccgtcaatacaatgtgtaatactaaaacggatgtgattacatccgctgcagacacaacctcagtgtccagttggggcggttccgaggtcatctcaagcctcagtaacaccattctggccagcacaagctccgaatgcgtgtcatcaaaatccgtctcacaacctgtggcccagaaacaggaatgtaaggtgagtactactgcgcccgtgactctcgccagctctaaaacaggcagcgtggtgcaaccttcttccggcttcagtgggactaccgacttcatacatctgaaaaagcacaaagctgccctcgcggcagctcagtataaatcctcaaatgctagtgagacagaacccaatgccattaagaatcaaaccctgtcagccagtttaccacttgatagcaccgtcatttgtagtacaataaacaaagccaacagtgttggcaatgggcaagctagtcagacgtctcagccaaattaccacaccaaactgaagaaggcctggctgacacggcacagtgaagaggataagaacactaacaagatggaaaactcaggaaactctgtttcagaaattattaaaccctgttctgttaacctcatcgcttcaacctcctccgacatccaaaattcagtcgactcaaaaatcattgtagataagtacgttaaggacgataaagtgaaccgaagaaaagccaagagaacctatgaaagcggatccgagtcaggagactctgatgagtctgagtcaaaaagcgaacagaggactaagagacagcccaaaccaacgtacaagaagaagcagaacgatttgcagaagcgtaaaggcgagatcgaggaggacctgaaacccaatggggtgctgagcaggtctgccaaggagagaagcaaacttaagcttcagtccaatagtaatactggcatcccacgcagtgtgctcaaagattggaggaaggttaaaaagctcaagcagacaggtgagtcattcctgcaggatgatagttgttgcgagatcggccccaatttacaaaagtgccgcgagtgccgcctgattcgcagcaagaagggagaggaacccgcacattctcccgtgttctgccggttctactacttccggcgcctcagcttttctaagaacggagtggttaggatagacggcttttcaagtcccgatcaatatgacgatgaggctatgtccctctggacccacgagaacttcgaggatgatgagcttgacatcgagacttcaaagtatatattggacatcatcggcgataaattctgccagctggtgacttctgagaaaacagcgctttcctgggtcaagaaggatgccaagatcgcatggaagcgggctgtgcgcggcgttcgagagatgtgtgacgcctgcgaggccactctcttcaatatccattgggtctgtcagaaatgcggatttgttgtttgtctggactgttacaaagctaaggaacgtaaatctagtagagacaaggaactgtatgcctggatgaaatgtgttaaagggcaacctcacgatcataagcatctaatgcctactcagattatccctggaagtgtgctgacagacctgttggacgcgatgcacaccctgagagagaagtatgggatcaagtcacactgtcattgcacgaacaagcagaatttgcaggtcggcaactttcctacaatgaacggggtgtctcagtcccagcagcagaacacgcctccgaagtctgagaagaatggggggtcatctcccgagagcgatgttggaaccgacaataagctgacacccccagagtctcagtctccgttgcattggctcgccgatctcgcggaacagaaagccagagaggagaagaaagagaataaggaattgaccttagagaatcaaattaaggaggaacgggaacaggataatagtgagtcccccaacgggagaacatcacctctggtgagtcagaacaacgaacaaggaagcacccttagagatctgctgacaacaaccgcgggaaagttgagagtcgggtcaaccgacgctggaatcgctttcgctccagtttacagcatgggcgccccctcgtcaaaatccggaagaacaatgccaaatattctggacgacattatcgccagtgtggtcgagaacaagatcccgcctagcaaaacctctaagatcaatgtgaagcccgagcttaaggaggagccagaagaaagcatcatttctgccgtggacgagaataacaagctctacagcgatattcctcattcctggatttgtgaaaaacatatcctgtggctgaaggactataaaaatagcagcaactggaagctgttcaaggaatgttggaagcaagggcagcctgccgtggtctctggcgtgcacaaaaagatgaacattagcttgtggaaggccgaaagcatatcattggacttcggagaccatcaggcagacctgctcaactgtaaggactcaataatcagcaatgctaacgtgaaagagttctgggacggctttgaagaggtgtctaagagacaaaagaataagtcaggagaaaccgtggttttgaagctgaaagattggcctagcggcgaggattttaagaccatgatgccagctaggtacgaggatcttcttaagtccttacctctgccagagtattgcaatccagaagggaaatttaatctggccagtcatctgcctggcttcttcgtgaggcctgatctgggaccacgcctctgtagtgcatatggtgttgtggctgctaaagaccatgacatcggaacaacaaacttacacatagaagtgtctgacgtggtgaacattctcgtatacgtgggtattgcaaaagggaatgggatcctgagtaaggccgggatactgaagaagttcgaggaagaagatctcgacgacattctaaggaagcgcttaaaggactcatctgagattccaggcgctttgtggcacatctatgccgggaaggatgtagacaagattcgcgaatttctccagaagatttctaaagagcagggtctagaagttcttccggagcatgaccctatcagggaccagagctggtatgtgaataagaaactcagacagcgattactggaagaatatggagtgaggacatgcaccctcattcagttcttaggcgatgccattgtcctgccagccggtgctctccatcaggtgcaaaattttcactcctgcatccaggttaccgaagacttcgttagtcccgagcatctggtcgagtcatttcacctgacccaggagctgcgattattgaaggaagagataaactatgacgacaagcttcaggtaaagaatatcctgtaccatgcagtgaaagagatggtgcgtgctctaaaaatccatgaagatgaagtcgaagatatggaggagaactag

SEQ ID NO: 103007 - DNA, 7077 bp, Artificial Sequence
  derived and/or modified sequence
atgcagggaccgtactcgctgaacggttatagggtgagggtctatcgtcaggattccgctactcaatggtttaccgggatcattacacaccatgacttgttcacacgaacgatgatagtaatgaacgaccaagtgttggaaccgcagaacgtcgaccctagcatggtgcagatgacctttctcgatgatgttgtgcattctttactcaagggagaaaacataggcattaccagtcgcagacgttccagagcaaatcagaatgtgaacgccgtgcatagtcattacacacgggctcaggcgaattcaccacgaccagcaatgaattcacaggctgcagtaccaaaacagaacacacaccagcagcagcagcagagatcaatcagacccaataagcgcaaaggtagtgatagctctataccagacgaagaaaagatgaaggaagagaaatatgactatatctcccggggcgagaacccaaaaggcaaaaataagcacctaatgaataagcggagaaaacccgaagaggacgaaaaaaagctgaatatgaaaagactgcgcaccgataatgtctctgacttcagcgaatcaagtgattccgagaactctaataaacgtatcattgacaactcgtctgagcagaagccagagaacgagcttaagaataagaacacatccaagattaacggcgaagaaggaaagcctcacaataacgaaaaggctggggaagaaaccctgaaaaactcacaacccccttgggaccagatccaggaggacaagaagcacgaggaggccgaaaaacgtaagtccgtggacacacagctccaggaggacatgattatccactcgtctgaacaaagtacagtgtccgatcacaacagcaacgacctcttgccacaggagtgcaacatggacaaaactcatacaatggagttactgcccaaggaaaagtttgtgtctcggcccccaaccccaaagtgtgttatagacataaccaacgacacaaatctggaaaaggtcgcacaagagaattcctccacgtttggacttcagacactccagaaaatggaccccaacgtgagcgacagtaaacactcaattgcaaacgcaaagtttctcgaaactgcaaagaaagatagcgatcaaagctgggtgtctgacgtggtgaaagtggatctcacccaaagcagtgtcactaacgcgagcagcggaaatgaccatctcaacatggaaaaggagaaatatgtgtcttatattagccccctgagcgcagtaagtgttatggaggacaaactgcataaaagatcccctccccccgaaacaataaagagcaagctaaacacatcagtggatacacataaaatcaagtcctccccaagcccagaagtggtcaaacccaagattacccattctccggacagcgtcaagagtaaagccacatatgtgaattcccaggcaaccggagaacgtagactcgccaacaaaattgaacatgagttgtcacgttgcagttttcacccaatccctacgcggagcagcaccctagaaactacaaaatctcctttaataattgataagaatgagcatttcacggtttacagagatccggccctgataggttccgaaaccggtgctaaccatataagtccctttctatcccagcatccgtttcctttgcacagcagctcccatcggacctgtctgaatcctgggacacaccatccggcattaactcctgcacctcacctactcgctggctcctccagtcagacaccattgccaactatcaatacccaccccctcacgagcggtcctcatcatgctgttcaccacccccatcttctccccacagtgctccccggagtccccactgcttcattactgggtgggcaccctagactagaaagcgcacacgccagtagtctctcacacctggccctggctcatcagcagcagcagcagctactccagcaccagagcccccacctgttggggcaggctcacccctccgcgtcttacaaccaactaggtctgtatccgataatctggcagtacccgaatggcactcacgcctacagtggactggggctcccatccagtaagtgggtgcatccagaaaacgccgtgaacgcagaggcaagtctcagacgcaactccccatcgccgtggcttcatcaacctaccccagtaacaagcgcagatgggatcggcctgctgtctcatattcctgtgaggcctagttctgccgaaccccaccgtcctttaaagatcacggctcacagcagcccacccctgacaaaaactctcgttgaccatcacaaagaggaattggagaggaaagcgttcatggaaccacttcggtccgtggccagtacctcagccaagaatgatcttgacctgaaccggtctcagacgggaaaagactgccacttacatcgacatttcgtcgaccccgtcctaaaccagctgcagcgccctcctcaggaaacaggggagcgcctgaacaaatataaagaggagcataggcgaattctgcaggaatctatcgacgttgccccttttaccacgaagataaagggactggaaggggaacgagagaactatagccgggtcgcttcctcatccagtagtcctaaatcccatattattaagcaggatatggatgttgaaaggagtgtgtcagatctctacaaaatgaagcactcagtgccacagtcgctgccacagtctaactactttacaacactgtcaaatagcgtggtgaacgaacccccccgatcatatcccagcaaggaggtgagcaatatctatggcgataaacagtccaacgccctggccgccgcagccgccaatccacaaacattgacatcttttatcactagtctgtctaagccccctcccctgatcaagcatcagccagagtccgagggtttagtgggaaaaattccagaacacctgcctcatcaaatagcctctcacagcgtaacaaccttccggaatgattgtcggtcgcctacacacttaaccgtaagtagcaccaatacactgcgatctatgcctgctttgcacagggcacctgtctttcacccccccatccatcactcactggagaggaaggaaggctcatattcatccctgtcgcccccaactctgactcccgttatgcctgttaatgccgggggtaaggtccaggagtcacagaagccgcccaccctgattccggaacctaaagattcccaggccaactttaaaagcagtagcgaacaatcccttaccgagatgtggagaccaaataacaatctgtctaaagaaaaaactgagtggcatgtcgaaaaaagcagcggaaagctgcaagccgccatggcgagcgtgatagtccgccctagtagtagcaccaagacagattcaatgcccgccatgcagctggcctctaaggatagagtatcggagcggtccagcgctggcgcacataagacagattgtctgaaactcgccgaagctggagaaacagggagaatcatcctgcccaacgtgaattccgatagtgttcacactaagtccgaaaaaaatttccaagccgtgtcccagggcagcgtgccaagctccgtgatgagtgctgtcaacaccatgtgtaataccaaaactgacgtaattacttctgctgcggacacaacaagcgtaagctcatggggtggctccgaagtgatttcatctcttagtaacaccatactggcttccacatcttccgagtgcgtaagctcgaagagcgtgagccagcccgtcgcacaaaagcaggagtgtaaagtatctaccacagctccggtgactctagcctcttctaagaccggaagtgtggtgcagccctcctccggtttttctggcaccaccgattttattcacttaaaaaagcacaaggcggctctagccgctgctcagtataagagttctaacgccagcgaaactgagcccaatgcgataaaaaatcagacactctcggcctccctgcctctggattctactgtgatttgcagcacgataaacaaggcaaattccgttggtaacggtcaggcctcacagacctcccaacctaattatcataccaaactcaagaaggcctggctgaccaggcattctgaggaagacaagaatactaacaaaatggaaaactccggaaactctgtgtctgagataattaaaccctgctctgtgaatctcattgccagtaccagtagtgatatccaaaattccgtggattccaagattatcgtggataaatatgttaaagacgacaaggtgaataggcgtaaggcaaagcggacctacgaaagcgggtccgagtcaggtgactcagacgagtctgaaagcaagagcgagcagcggacaaagcgacaacccaagccgacttataagaagaagcagaacgatctccagaagaggaagggcgagatcgaggaagacctcaaacctaacggggtcctcagccgctcagctaaggagcgctctaaactcaagctgcaaagcaacagtaacaccgggattccacggtccgtgctgaaggactggcgtaaagtaaagaaattgaagcaaaccggggagtcctttttgcaagatgactcttgctgcgaaatagggcccaatctgcaaaagtgcagggaatgcagacttatcaggtctaagaagggagaggagccagctcatagccctgtcttctgcagattctattattttcgacggctctctttttctaaaaatggtgtggtgcgcattgatggcttttccagtcctgaccagtacgatgacgaagccatgtctttatggacacacgagaattttgaagacgatgagctcgacatcgagaccagtaagtatattctggatatcatcggtgacaaattctgtcagttagtcacatctgagaagacagctttgtcatgggtgaaaaaggacgcaaaaatagcatggaagcgggccgtgagaggagtaagggagatgtgcgatgcgtgtgaggccacactatttaacattcactgggtatgccagaagtgtggatttgttgtctgcctcgactgttacaaagcaaaagaacgcaagtcttcacgggataaagaactttacgcgtggatgaaatgtgtgaagggacagccgcacgaccacaagcatttgatgcctactcagatcatccctggatcagtcctgacagacctgcttgacgccatgcatacattaagagagaagtacggaatcaaaagtcactgccactgtacaaacaagcagaatttgcaggtgggcaactttccgaccatgaacggggtttcacaggtgttgcagaacgtcctgaatcactccaataaaatcagtctgtgtatgcctgagtcacagcagcagaacaccccacccaagtccgaaaagaatggtggaagcagtccagaatcggacgttggcacagataacaagctcaccccccccgagagccagtcacctctccactggctggcagacttagccgaacagaaggctcgcgaggaaaagaaggaaaacaaggaactgacactggagaatcaaatcaaagaggaacgggagcaggataactccgagtcgccaaatggccgtacctctcccttggtctcccagaataacgagcaggggtccactctgagggatctactgacaaccaccgccgggaagctgcgggtagggagtacagacgccgggatcgccttcgctcccgtatattcaatgggggccccctctagcaagtccggcaggacaatgcccaacattctggacgacatcattgcgtcagtagttgaaaataaaatcccaccgtcgaaaacatctaaaataaatgtgaaacccgagctcaaggaagaaccagaggagtcaataatctcagcagtggacgagaataataagttgtactccgatatccctcacagttggatttgcgagaaacatatcctgtggttaaaggattataagaattcaagtaattggaaactgtttaaggagtgttggaaacagggacaacctgccgtcgtttcaggcgtccataaaaagatgaatatatcgctctggaaagcagagtctatctcacttgacttcggggatcatcaagctgatttgctaaattgcaaagatagcataattagcaatgccaacgtcaaggagttctgggacgggttcgaagaagtcagtaaaaggcagaaaaacaagtctggcgagaccgtggtcttaaaactgaaggactggccttccggggaggactttaagaccatgatgcccgcccggtatgaggacctgctaaaatctctgcccctgcctgagtactgtaatccagaaggtaagttcaatttggccagccacttgccaggcttcttcgtgcgtcccgatctcggaccccggctgtgcagtgcctatggcgtggtggcagccaaggaccatgatatcggcaccaccaatctgcacatcgaagtttccgatgtagttaatatcctggtttatgtgggtatcgctaaagggaacggcattctatctaaagccgggatcttaaaaaagtttgaggaagaagaccttgacgacattctgagaaaaaggctcaaggactcgagtgaaatccccggcgcgctgtggcatatatacgccgggaaagatgttgataagattagggaatttcttcaaaagatcagcaaagagcaaggcctcgaggtccttccagagcatgatcctatcagagatcagagttggtatgtgaacaaaaaactccggcagaggctcctggaggagtacggtgttcgaacctgcacgctgatacaatttctaggcgacgctatagtcctgcctgcaggggcattacaccaggtgcagaacttccacagctgcatccaggtcacggaggactttgtcagtccagagcatttggtcgaatcattccacctaacacaggagctgcgattattgaaagaggagatcaactacgatgataagcttcaagtaaaaaatattctttaccatgcggtcaaggagatggtgcgcgctctgaaaattcatgaagacgaagtggaggacatggaggaaaattag

SEQ ID NO: 103008 - DNA, 6912 bp, Artificial Sequence
  derived and/or modified sequence
atgattgtgatgaatgaccaggtgctggagccccagaatgtggaccccagcatggtgcagatgaccttcctggatgatgtggtgcacagcctgctgaagggagaaaatattggcatcaccagcagaagaagaagccgggccaaccagaatgtgaatgctgtgcacagccactacacccgggcccaggccaacagccccaggcctgccatgaacagccaggccgctgtgcccaagcagaacacccaccagcagcagcagcagaggagcatccggcccaacaagaggaagggcagtgacagcagcatcccagatgaggagaagatgaaggaggagaagtatgactacatcagcagaggagagaaccccaagggcaagaacaagcacctgatgaacaagaggaggaagccagaggaggatgagaagaagctgaacatgaagaggctgaggacagacaacgtgtctgacttcagcgagagcagtgacagcgagaacagcaacaagaggatcatcgacaacagcagcgagcagaagccagaaaatgagctgaagaacaagaacaccagcaagatcaatggagaggagggcaagccccacaacaatgagaaggccggggaggagaccctgaagaacagccagcccccctgggaccagatccaggaggacaagaagcatgaggaggccgagaagaggaagtctgtggacacccagctgcaggaggacatgatcatccacagcagcgagcagagcacagtgtctgaccacaacagcaatgacctgctgccccaggagtgcaacatggacaagacccacaccatggagctgctgcccaaggagaagtttgtgtcccggccccccacccccaagtgtgtgattgacatcaccaatgacaccaacctggagaaggtggcccaggagaacagcagcaccttcggcctgcagaccctgcagaagatggaccccaacgtgtctgacagcaagcacagcatcgccaatgccaagttcctggagacagccaagaaggacagcgaccagagctgggtgtctgatgtggtgaaggtggacctgacccagagctctgtgaccaatgccagcagtggaaatgaccacctgaacatggagaaggagaagtatgtgtcctacatcagccccctgtctgctgtgtctgtgatggaggacaagctgcacaagaggagccccccacctgagaccatcaagagcaagctgaacacctctgtggacacccacaagatcaagagcagccccagccctgaggtggtgaagcccaagatcacccacagcccagacagcgtgaagagcaaggccacctacgtgaacagccaggccactggagagcggcggctggccaacaagattgagcacgagctgagccgctgcagcttccaccccatccccaccaggagcagcaccctggagaccaccaagagccccctcatcatcgacaagaatgagcacttcaccgtgtacagagatcctgccctgattggcagcgagactggagccaaccacatcagccccttcctgagccagcaccccttccccctgcacagcagcagccacaggacctgcctgaaccctggcacccaccacccagccctgaccccagccccccacctgctggccggcagcagcagccagacccccctgcccaccatcaacacccaccccctgaccagcggcccccaccacgctgtgcaccacccccacctgctgcccaccgtgctgcccggggtgcccacagccagcctgctgggcggccacccccggctggagagcgcccacgccagcagcctgagccacctggccctggcccaccagcagcagcagcagctgctgcagcaccagagcccccacctgctgggccaggcccaccccagcgccagctacaaccagctgggcctgtaccccatcatctggcagtacccaaatggcacccacgcctacagcggcctgggcctgcccagcagcaagtgggtgcacccagaaaatgctgtgaatgctgaggccagcctgcggaggaacagccccagcccctggctgcaccagcccacccctgtgaccagcgcagatggcatcggcctgctgagccacatccctgtgcggcccagcagcgctgagccccaccggcccctgaagatcacagcccacagcagcccccccctgaccaagaccctggtggaccaccacaaggaggagctggagaggaaggccttcatggagcccctgcggtctgtggccagcaccagcgccaagaatgacctggacctgaacagaagccagacaggcaaggactgccacctgcaccgccactttgtggaccctgtgctgaaccagctgcagaggcctccccaggagaccggggagcggctgaacaagtacaaggaggagcaccggcgcatcctgcaggagagcattgatgtggcccccttcaccaccaagatcaagggcctggagggggagcgggagaactacagccgggtggccagcagcagcagcagccccaagagccacatcatcaagcaggacatggatgtggagaggtctgtgtctgacctgtacaagatgaagcacagcgtgccccagagcctgccccagagcaactacttcaccaccctgagcaacagcgtggtgaatgagccccccaggagctaccccagcaaggaggtgagcaacatctatggagacaagcagagcaatgccctggccgctgctgctgccaacccccagaccctgaccagcttcatcaccagcctgagcaagcccccacccctcatcaagcaccagcctgagagcgagggcctggtgggcaagatccctgagcacctgccccaccagatcgccagccacagcgtgaccaccttcagaaatgactgccgcagccccacccacctgactgtgagcagcaccaacaccctgcgctccatgcctgccctgcaccgggcccctgtgttccacccccccatccaccacagcctggagaggaaggagggcagctacagcagcctgagcccccccaccctgacccctgtgatgcctgtgaatgccggcggcaaggtgcaggagagccagaagccacccaccctcatccctgagcccaaggacagccaggccaacttcaagagcagcagcgagcagagcctgacagagatgtggaggcccaacaacaacctgagcaaggagaagacagagtggcacgtggagaagagcagcggcaagctgcaggccgccatggcctctgtgattgtgcggcccagcagcagcaccaagacagacagcatgcctgccatgcagctggccagcaaggacagagtgtctgagaggagcagcgctggggcccacaagacagactgcctgaagctggccgaggccggggagaccggccgcatcatcctgcccaacgtgaacagcgacagcgtgcacaccaagtctgagaagaacttccaggccgtgtcccagggctctgtgcccagctctgtgatgtctgctgtgaacaccatgtgcaacaccaagacagatgtgatcaccagcgctgctgacaccacctctgtgtcctcctggggcggcagcgaggtgatcagcagcctgagcaacaccatcctggccagcaccagcagtgaatgtgtgagcagcaagtctgtgtcccagcctgtggcccagaagcaggagtgcaaggtgtccaccacagcccctgtgaccctggccagcagcaagacaggctctgtggtgcagcccagcagcggcttcagcggcaccacagacttcatccacctgaagaagcacaaggccgccctggccgccgcccagtacaagagcagcaatgccagcgagacagagcccaatgccatcaagaaccagaccctgagcgccagcctgcccctggacagcaccgtcatctgcagcaccatcaacaaggccaacagcgtgggcaatggccaggccagccagaccagccagcccaactaccacaccaagctgaagaaggcctggctgaccaggcacagcgaggaggacaagaacaccaacaagatggagaacagcggcaacagcgtgtctgagatcatcaagccctgcagcgtgaacctgattgccagcaccagcagtgacatccagaacagcgtggacagcaagatcatcgtggacaagtatgtgaaggatgacaaggtgaacagaaggaaggccaagaggacctatgaaagtggcagcgagagcggggacagtgatgaaagtgagagcaagtctgagcagaggaccaagaggcagcccaagcccacctacaagaagaagcagaatgacctgcagaagaggaagggggagattgaggaggacctgaagcccaacggggtgctgagccgcagcgccaaggagaggagcaagctgaagctgcagagcaacagcaacacaggcatccccaggtctgtgctgaaggactggaggaaggtgaagaagctgaagcagacaggagagagcttcctgcaggatgacagctgctgtgaaattggccccaacctgcagaagtgccgggagtgccgcctcatccgcagcaagaagggggaggagcccgcccacagccctgtgttctgccgcttctactacttccggcggctgtccttcagcaagaatggagtggtgagaattgatggcttcagcagcccagaccagtatgatgatgaggccatgagcctgtggacccatgaaaattttgaagatgatgagctggacatcgagaccagcaagtacatcctggacatcatcggggacaagttctgccagctggtgaccagcgagaagacagccctgtcctgggtgaagaaggatgccaagatcgcctggaagagagctgtgcggggcgtgcgggagatgtgtgatgcctgtgaggccaccctcttcaacatccactgggtgtgccagaagtgtggctttgtggtgtgcctggactgctacaaggccaaggagaggaagagcagccgggacaaggagctgtatgcctggatgaagtgtgtgaagggccagccccatgaccacaagcacctgatgcccacccagatcatccctggctctgtgctgacagacctgctggatgccatgcacaccctgcgggagaagtatggcatcaagagccactgccactgcaccaacaagcagaacctgcaggtgggcaacttccccaccatgaatggagtgtcccagagccagcagcagaacaccccacccaagtctgagaagaatggaggcagcagccctgagagtgatgtgggcacagacaacaagctgaccccacctgagagccagagccccctgcactggctggccgacctggccgagcagaaggcccgggaggagaagaaggagaacaaggagctgaccctggagaaccagatcaaggaggagcgggagcaggacaacagcgagagccccaacggccgcaccagccccctggtgtcccagaacaatgagcagggcagcaccctgcgggacctgctgaccaccacagctgggaagctgcgggtgggcagcacagatgctggcatcgcctttgcccctgtgtacagcatgggcgcccccagcagcaagagcggccgcaccatgcccaacatcctggatgacatcatcgcctctgtggtggagaacaagatcccccccagcaagaccagcaagatcaacgtgaagccagagctgaaggaggagcctgaggagagcatcatctctgctgtggatgagaacaacaagctgtacagcgacatcccccacagctggatctgtgagaagcacatcctgtggctgaaggactacaagaacagcagcaactggaagctgttcaaggagtgctggaagcagggccagcctgctgtggtgtctggagtgcacaagaagatgaacatcagcctgtggaaggccgagagcatcagcctggactttggagaccaccaggccgacctgctgaactgcaaggacagcatcatcagcaatgccaacgtgaaggagttctgggatggctttgaggaggtgtccaagaggcagaagaacaagagcggggagaccgtggtgctgaagctgaaggactggcccagcggggaggacttcaagaccatgatgcctgcccgctatgaggacctgctgaagagcctgcccctgcctgagtactgcaaccctgagggcaagttcaacctggccagccacctgcccggcttctttgtgcggccagacctgggcccccggctgtgcagcgcctatggagtggtggccgccaaggaccatgacatcggcaccaccaacctgcacatcgaggtgtctgatgtggtgaacatcctggtgtatgtgggcatcgccaagggaaatggcatcctgagcaaggccggcatcctgaagaagtttgaggaggaggacctggatgacatcctgaggaagaggctgaaggacagcagcgagatccctggggccctgtggcacatctatgctgggaaggatgtggacaagatccgggagttcctgcagaagatcagcaaggagcagggcctggaggtgctgcctgagcatgaccccatccgggaccagagctggtacgtgaacaagaagctgcggcagaggctgctggaggagtatggagtgaggacctgcaccctcatccagttcctgggagatgccatcgtgctgcctgctggggccctgcaccaggtgcagaacttccacagctgcatccaggtgacagaggactttgtgtccccagagcacctggtggagagcttccacctgacccaggagctgcggctgctgaaggaggagatcaactatgatgacaagctgcaggtgaagaacatcctgtaccacgctgtgaaggagatggtgcgggccctgaagatccatgaagatgaggtggaggacatggaggagaactag

SEQ ID NO: 103009 - DNA, 7077 bp, Artificial Sequence
  derived and/or modified sequence
atgcagggcccctacagcctgaatggctacagagtgcgggtgtaccggcaggacagcgccacccagtggttcaccggcatcatcacccaccacgacctcttcaccaggaccatgattgtgatgaatgaccaggtgctggagccccagaatgtggaccccagcatggtgcagatgaccttcctggatgatgtggtgcacagcctgctgaagggggagaacatcggcatcaccagcagaagaagaagccgggccaaccagaatgtgaatgctgtgcacagccactacacccgggcccaggccaacagccccaggcctgccatgaacagccaggccgctgtgcccaagcagaacacccaccagcagcagcagcagaggagcatccggcccaacaagaggaaaggaagtgacagcagcatcccagatgaggagaagatgaaggaggagaagtatgactacatcagcagaggagagaaccccaagggcaagaacaagcacctgatgaacaagaggaggaagccagaagaagatgagaagaagctgaacatgaagaggctgaggacagacaacgtgtctgacttcagcgagagcagtgacagcgagaacagcaacaagaggatcatcgacaacagcagcgagcagaagccagaaaatgagctgaagaacaagaacaccagcaagatcaacggggaggagggcaagccccacaacaatgagaaggccggggaggagaccctgaagaacagccagcccccctgggaccagatccaggaggacaagaagcatgaggaggccgagaagaggaagtctgtggacacccagctgcaggaggacatgatcatccacagcagcgagcagagcacagtgtctgaccacaacagcaatgacctgctgccccaggagtgcaacatggacaagacccacaccatggagctgctgcccaaggagaagtttgtgtccaggcctcccacccccaagtgtgtgattgacatcaccaatgacaccaacctggagaaggtggcccaggagaacagcagcaccttcggcctgcagaccctgcagaagatggaccccaacgtgtctgacagcaagcacagcatcgccaatgccaagttcctggagacagccaagaaggacagcgaccagagctgggtgtctgatgtggtgaaggtggacctgacccagagctctgtgaccaatgccagcagtggaaatgaccacctgaacatggagaaggagaagtatgtgtcctacatcagccccctgtctgctgtgtctgtgatggaggacaagctgcacaagaggagccccccacctgagaccatcaagagcaagctgaacacctctgtggacacccacaagatcaagagcagccccagccctgaggtggtgaagcccaagatcacccacagcccagattctgtgaagagcaaggccacctacgtgaacagccaggccaccggggagcggcggctggccaacaagattgaacatgagctgagccgctgcagcttccaccccatccccaccaggagcagcaccctggagaccaccaagagccccctcatcatcgacaagaatgagcacttcaccgtgtacagagatcctgccctgattggcagcgagaccggggccaaccacatcagccccttcctgagccagcaccccttccccctgcacagcagcagccacaggacctgcctgaaccctggcacccaccacccagccctgaccccagccccccacctgctggccggcagcagcagccagacccccctgcccaccatcaacacccaccccctgaccagcggcccccaccacgctgtgcaccacccccacctgctgcccaccgtgctgcccggggtgcccacagccagcctgctgggcggccacccccggctggagagcgcccacgccagcagcctgagccacctggccctggcccaccagcagcagcagcagctgctgcagcaccagagcccccacctgctgggccaggcccaccccagcgccagctacaaccagctgggcctgtaccccatcatctggcagtaccccaacggcacccacgcctacagcggcctgggcctgcccagcagcaagtgggtgcacccagaaaatgctgtgaatgctgaggccagcctgcggaggaacagccccagcccctggctgcaccagcccacccctgtgaccagcgcagatggcatcggcctgctgagccacatccctgtgcggcccagcagcgctgagccccaccggcccctgaagatcacagcccacagcagcccccccctgaccaagaccctggtggaccaccacaaggaggagctggagaggaaggccttcatggagcccctgcggtctgtggccagcaccagcgccaagaatgacctggacctgaacagaagccagacaggcaaggactgccacctgcaccgccactttgtggaccctgtgctgaaccagctgcagaggcctccccaggagactggagagcggctgaacaagtacaaggaggagcaccggcgcatcctgcaggagagcattgatgtggcccccttcaccaccaagatcaagggcctggagggggagcgggagaactacagccgggtggccagcagcagcagcagccccaagagccacatcatcaagcaggacatggatgtggagaggtctgtgtctgacctgtacaagatgaagcacagcgtgccccagagcctgccccagagcaactacttcaccaccctgagcaacagcgtggtgaatgaaccacccaggagctaccccagcaaggaggtgagcaacatctacggggacaagcagagcaatgccctggccgctgctgctgccaacccccagaccctgaccagcttcatcaccagcctgagcaagcccccacccctcatcaagcaccagcctgagagcgagggcctggtgggcaagatccctgagcacctgccccaccagatcgccagccacagcgtgaccaccttcagaaatgactgccgcagccccacccacctgactgtgagcagcaccaacaccctgcgctccatgcctgccctgcaccgggcccctgtgttccacccccccatccaccacagcctggagaggaaggagggcagctacagcagcctgagcccccccaccctgacccctgtgatgcctgtgaatgctgggggcaaggtgcaggagagccagaagccacccaccctcatccctgagcccaaggacagccaggccaacttcaagagcagcagcgagcagagcctgacagagatgtggaggcccaacaacaacctgagcaaggagaagacagagtggcacgtggagaagagcagcggcaagctgcaggccgccatggccagcgtcatcgtgcggcccagcagcagcaccaagacagacagcatgcctgccatgcagctggccagcaaggacagagtgtctgagaggagcagcgctggggcccacaagacagactgcctgaagctggccgaggccggggagaccggccgcatcatcctgcccaacgtgaacagcgacagcgtgcacaccaagtctgagaagaacttccaggccgtgtcccagggctctgtgcccagctctgtgatgtctgctgtgaacaccatgtgcaacaccaagacagatgtgatcaccagcgctgctgacaccacctctgtgtcctcctggggcggcagcgaggtgatcagcagcctgagcaacaccatcctggccagcaccagcagtgaatgtgtgagcagcaagtctgtgtcccagcctgtggcccagaagcaggagtgcaaggtgtccaccacagcccctgtgaccctggccagcagcaagacaggctctgtggtgcagcccagcagcggcttcagcggcaccacagacttcatccacctgaagaagcacaaggccgccctggccgccgcccagtacaagagcagcaatgccagcgagacagagcccaatgccatcaagaaccagaccctgagcgccagcctgcccctggacagcaccgtcatctgcagcaccatcaacaaggccaacagcgtgggcaatggccaggccagccagaccagccagcccaactaccacaccaagctgaagaaggcctggctgaccaggcacagcgaggaggacaagaacaccaacaagatggagaacagcggcaacagcgtgtctgagatcatcaagccctgcagcgtgaacctgattgccagcaccagcagtgacatccagaacagcgtggacagcaagatcatcgtggacaagtatgtgaaggatgacaaggtgaacagaaggaaggccaagaggacctatgagagcggcagcgagagcggggacagtgatgagagcgagagcaagtctgagcagaggaccaagaggcagcccaagcccacctacaagaagaagcagaatgacctgcagaagaggaaaggagaaattgaggaggacctgaagcccaatggagtgctgagccgcagcgccaaggagaggagcaagctgaagctgcagagcaacagcaacacaggcatccccaggtctgtgctgaaggactggaggaaggtgaagaagctgaagcagacaggagagagcttcctgcaggatgacagctgctgtgagatcggccccaacctgcagaagtgcagagaatgtcgcctcatccgcagcaagaagggggaggagcccgcccacagccctgtgttctgccgcttctactacttccggcggctgtccttcagcaagaatggagtggtgagaattgatggcttcagcagcccagaccagtatgatgatgaggccatgagcctgtggacccatgagaactttgaagatgatgagctggacatcgagaccagcaagtacatcctggacatcattggagacaagttctgccagctggtgaccagcgagaagacagccctgtcctgggtgaagaaggatgccaagatcgcctggaagagagctgtgcggggcgtgcgggagatgtgtgatgcctgtgaggccaccctcttcaacatccactgggtgtgccagaagtgtggctttgtggtgtgcctggactgctacaaggccaaggagaggaagagcagccgggacaaggagctgtatgcctggatgaagtgtgtgaagggccagccccatgaccacaagcacctgatgcccacccagatcatccctggctctgtgctgacagacctgctggatgccatgcacaccctgcgggagaagtatggcatcaagagccactgccactgcaccaacaagcagaacctgcaggtgggcaacttccccaccatgaatggagtgtcccaggtgctgcagaatgtgctgaaccacagcaacaagatcagcctgtgcatgcctgagagccagcagcagaacaccccacccaagtctgagaagaatggaggcagcagccctgagagtgatgtgggcacagacaacaagctgaccccacctgagagccagagccccctgcactggctggccgacctggccgagcagaaggcccgggaggagaagaaggagaacaaggagctgaccctggagaaccagatcaaggaggagcgggagcaggacaacagcgagagccccaatggaagaaccagccccctggtgtcccagaacaatgagcagggcagcaccctgcgggacctgctgaccaccacagctgggaagctgcgggtgggcagcacagatgctggcatcgcctttgcccctgtgtacagcatgggcgcccccagcagcaagagcggccgcaccatgcccaacatcctggatgacatcatcgcctctgtggtggagaacaagatcccccccagcaagaccagcaagatcaacgtgaagccagagctgaaggaggagcctgaggagagcatcatctctgctgtggatgagaacaacaagctgtacagcgacatcccccacagctggatctgtgagaagcacatcctgtggctgaaggactacaagaacagcagcaactggaagctgttcaaggagtgctggaagcagggccagcctgctgtggtgtctggagtgcacaagaagatgaacatcagcctgtggaaggccgagagcatcagcctggactttggagaccaccaggccgacctgctgaactgcaaggacagcatcatcagcaatgccaacgtgaaggagttctgggatggctttgaggaggtgtccaagaggcagaagaacaagtctggagagaccgtggtgctgaagctgaaggactggcccagcggggaggacttcaagaccatgatgcctgcccgctatgaggacctgctgaagagcctgcccctgcctgagtactgcaaccctgagggcaagttcaacctggccagccacctgcccggcttctttgtgcggccagacctgggcccccggctgtgcagcgcctacggcgtggtggccgccaaggaccatgacatcggcaccaccaacctgcacatcgaggtgtctgatgtggtgaacatcctggtgtatgtgggcatcgccaagggaaatggcatcctgagcaaggccggcatcctgaagaagtttgaggaggaggacctggatgacatcctgaggaagaggctgaaggacagcagcgagatccctggggccctgtggcacatctatgccggcaaggatgtggacaagatccgggagttcctgcagaagatcagcaaggagcagggcctggaggtgctgcctgagcatgaccccatccgggaccagagctggtacgtgaacaagaagctgcggcagaggctgctggaggagtatggagtgaggacctgcaccctcatccagttcctgggagatgccatcgtgctgcctgctggggccctgcaccaggtgcagaacttccacagctgcatccaggtgacagaagattttgtgtccccagagcacctggtggagagcttccacctgacccaggagctgcggctgctgaaggaggagatcaactatgatgacaagctgcaggtgaagaacatcctgtaccacgctgtgaaggagatggtgcgggccctgaagatccatgaagatgaggtggaggacatggaggagaactag

SEQ ID NO: 103010 - DNA, 6912 bp, Artificial Sequence
  derived and/or modified sequence
atgatcgtgatgaacgaccaggtgctggagccccagaacgtggacccgagcatggtccagatgacattcctggacgatgttgtccacagtctgttgaaaggagagaatattgggattacctctcgtcgcagaagtagggcgaaccaaaatgtgaacgccgtgcactcccattacacaagggctcaagccaatagtccccggcccgccatgaactcccaagctgctgtacctaaacaaaacactcaccagcaacaacagcagagaagcatccgtccaaataaacgcaagggatccgatagtagcattccagatgaagagaagatgaaggaagaaaaatacgactatattagccgcggagagaaccctaaaggtaagaacaaacacctgatgaataagcgacgcaagccagaggaagacgaaaagaagttgaacatgaagagactgcgaactgacaatgtctctgacttctctgagagctccgactccgagaattccaacaagaggatcattgacaatagcagtgagcagaaacctgagaatgaactcaagaacaaaaataccagcaagattaacggcgaggaggggaagccccacaataacgaaaaagccggagaggaaaccctgaaaaattcccagcccccatgggaccagatccaggaggacaagaagcatgaagaagccgagaagcgcaaaagcgtggatacccagctgcaggaggatatgatcatccactctagcgagcagtcaaccgtatctgaccataattctaatgatcttcttccccaggagtgtaacatggataagacccacactatggagctgttgccaaaagagaagtttgtctcccgccccccaacccctaagtgcgtgatcgatataaccaatgatacgaacctggagaaagtagcccaagagaacagcagtacgtttgggttgcaaactctccagaagatggatccaaacgtgtcagacagcaaacactccatcgccaacgctaagttcctggagacagccaaaaaagacagtgaccagagttgggtgagcgatgtggtcaaggtggacctgacgcaaagtagcgtgacaaacgcatcctctggcaatgatcacttgaacatggagaaggaaaagtacgtgtcttacattagtccactgagcgcagtgtccgtgatggaggataaactgcacaaacgcagtccacctcctgagacaatcaagtcaaagctcaatacgagtgtagacacccacaagattaagtcctcccctagcccagaggtagtcaaaccaaagataacccattcacccgattcggtcaaatccaaagctacatatgttaatagccaagcgaccggagagagacggctggctaataaaatagaacatgaactttcgcggtgctccttccaccctatacctaccaggagttctactcttgagactacgaaatcacccctcatcatagataagaacgagcatttcaccgtgtaccgagatccagctctgatcggctctgagacaggggccaaccacatctcacccttcctttcgcagcaccccttccctttacattcttctagtcacaggacgtgcctgaacccaggtacacatcacccagctcttacacctgcacctcacttgctggcaggatcttctagccagacccctctccccacgataaacacccatcctctgacgtctggcccacatcacgctgtgcatcatccacacctcttgcccaccgtgttgccaggtgttccgacagcgtctctgttaggaggacacccgcgcctggagagcgctcatgcatcgtcactctctcaccttgctctcgcccaccagcagcagcagcagttgttgcagcaccaatcacctcatttgctcggccaggcacacccctcggcttcatacaatcagttgggcctttacccaatcatctggcagtatcctaatggaacccatgcttactccggacttggcctgccaagctcgaaatgggtgcacccagagaacgctgtgaatgctgaggcttcactgcgacgtaactcacctagtccctggctgcatcaaccaacccctgtgacgagcgctgatggtatcggtctgctctcccatataccagtgcggcccagttccgctgaaccccaccgccctcttaagattaccgcccactcatcgcctcctttaaccaagacccttgtggaccatcacaaggaggagctagaaaggaaggcctttatggagccactgaggtcagtggcttccacgtccgccaaaaacgaccttgatctgaaccgcagtcagactgggaaggattgccacctccatcggcactttgtggaccccgtgctgaatcaactgcagaggccaccccaggagaccggcgagcgcctgaataagtataaggaagaacaccgtaggatcctgcaggagtctatcgacgtggcaccattcaccactaaaataaaggggctcgaaggggagagagagaattacagtcgagtggcttcctccagtagttcccccaagagtcatatcattaaacaggacatggatgtcgagaggtctgtaagcgatttgtataaaatgaagcattcggtgccccaatccctgccacagagcaattattttaccaccctatccaatagcgtagtaaatgagccgccccgttcttatccttctaaggaagtgagtaacatctatggggacaagcaaagtaatgccctagcagcagctgcggctaatccccagacactaacttcttttattacgtcactctccaagcctccccctctcatcaagcaccagccggaatcagagggcctggtgggtaagatcccagagcatctgccccaccagatcgccagtcacagcgttactacttttcgaaacgactgtcggagccctacccacttgactgtgagcagcaccaacactctgaggagcatgcctgcgcttcaccgggcccccgtgttccacccacccatccatcactccctggaacgcaaggaaggatcctacagctctcttagtccccccacactgaccccagttatgcctgttaacgcaggtggcaaagtgcaagagtcgcaaaaaccaccaacgctcattcccgagcctaaggattcacaggcgaacttcaagtcctcctcggaacaatccctgacagagatgtggaggcccaataataacttgagcaaggagaaaaccgaatggcatgtggaaaaaagttcaggcaagctgcaggccgccatggccagtgtaatcgtccggccaagctcttctacaaagacagattcaatgcctgcaatgcagctggcgtcaaaagaccgtgtgtctgagaggagctccgcaggagcacacaagaccgactgtctgaagctggcagaggccggggagacaggccgcattatcctgcccaatgttaactctgattccgtccacactaaatccgagaaaaatttccaagccgtgagtcaggggagcgtcccttcctccgtaatgtccgccgtgaacaccatgtgcaacaccaaaacagatgtcatcacttcagctgcggacactacgagcgtgagttcctggggcgggtccgaagtgatcagctccctgtctaacactatcctcgcatccacaagttctgagtgcgtctcatcaaagtccgtgtcacagcctgtcgctcagaagcaggagtgtaaggtctctaccaccgctccggtgacattagcgtcaagtaaaacaggctccgtggtgcagccttcttccggattcagcgggactacagactttatccacctgaagaaacacaaggctgccttagccgccgctcagtacaagagctcaaacgcctccgaaactgaaccaaatgccattaagaatcagacactgtctgcctctctcccactggacagcactgttatttgctccacgattaacaaggccaattcagtgggcaacggccaggcctcccagacctctcagcccaactaccataccaagttgaagaaagcctggttaacccggcattccgaagaagataaaaacactaacaaaatggaaaacagtgggaactctgtctccgaaattattaagccttgtagcgttaacttgatcgcgtctacaagttcggatatccagaacagcgtagactctaagatcattgtagataaatatgttaaggacgataaagtcaacagacgaaaggccaagagaacctatgagagtggatcagagagcggcgatagcgacgaatcagaatccaaatccgagcagcgcacaaagcgccagcctaagcccacttacaaaaagaaacagaacgatctccagaaaagaaagggggaaatcgaggaggatttgaaacccaatggcgtcctgagccgcagcgccaaagagaggagcaaattaaagttgcaatcaaattcaaacaccggcattcccaggtctgttctcaaagattggaggaaggtgaaaaagcttaagcagactggtgaatcattccttcaggatgacagttgctgtgagatcggtccaaacctgcagaagtgccgcgaatgcagattgataagatcaaaaaagggcgaagaacccgcgcacagcccagttttctgtcggttttattattttcgccgcctcagctttagcaagaacggagtggtaagaattgatgggttttcaagccccgatcaatatgacgacgaggcaatgagtctctggacgcatgaaaattttgaggacgacgagctggacatagagacaagtaaatacatactggatattattggcgataaattttgccaactggtgacaagcgagaaaaccgcactttcttgggtcaaaaaggatgcgaagatagcctggaagagagccgtgcgcggagtgagggagatgtgcgacgcatgtgaagcgactctttttaatatccactgggtatgccaaaagtgtggtttcgtggtatgcttagattgctacaaggctaaagagcgcaagtccagcagagataaggagctctatgcatggatgaaatgcgtaaagggacaaccccacgatcacaagcacttgatgcccacccagatcattcccggtagtgtactgaccgatctgcttgatgccatgcatacattacgggagaagtatggaattaaatcacactgccactgcactaataaacaaaaccttcaggtcggtaattttccaactatgaacggagtttcccaatcacaacagcagaatacgccccctaaaagtgaaaagaacggcgggagctctccagaatccgatgttgggaccgataataagcttacgcctcccgagagccagtctccactgcattggctagctgacctggcagaacagaaggcacgggaggaaaaaaaggaaaataaagaacttaccctggagaaccagattaaggaggaaagggaacaggacaatagcgagtccccaaacggtaggacatcccctctggtatcccaaaacaacgagcagggcagtacactcagggacttgctgaccaccactgcgggaaagctaagagtgggctctactgacgccggcattgctttcgccccagtctacagcatgggcgctccgagcagcaagagcggccggacaatgccaaatattctcgatgacattatagccagcgtggtggaaaataaaatcccaccatcgaagactagcaagattaacgtgaaaccagaacttaaggaagaacctgaagagtctattattagtgctgtagatgagaataacaaactctattcagatatccctcatagctggatttgtgaaaagcatattttatggttgaaagactacaaaaactcctccaactggaaactctttaaagagtgctggaaacaggggcaacctgctgtcgtgagcggggtgcataagaagatgaacatctctctatggaaggccgaatcaatatctctagatttcggggatcaccaggccgacctgctgaactgcaaagattctatcataagcaatgcaaacgttaaggaattctgggatggcttcgaggaagtgtcaaaacgccagaagaacaagagcggcgaaactgtcgtgttaaagctgaaagactggccatctggagaggacttcaagaccatgatgcccgcaaggtacgaagacctgctcaagtccctgcccctgcctgagtattgcaacccagagggcaaatttaacctcgcatcacaccttccagggttctttgtgaggccagacctggggcctaggctgtgctctgcctacggcgtcgtcgctgccaaggatcatgacattggtacaacgaacctgcatatcgaggttagcgatgtggtcaacatactggtgtacgtgggtatagcaaaaggcaacggaatactgtcaaaggctggaattttaaaaaagttcgaagaagaagatctcgatgatattctccgcaagcggcttaaggattctagtgagatacccggggccctgtggcatatctacgcgggcaaggacgtcgacaagattagagagttcctccagaaaatcagcaaggagcaaggcctggaggtgttgcctgaacacgaccccatcagagatcagagctggtacgtaaataagaaacttagacagagactgcttgaggaatatggagttcgcacatgtactctgattcagttcctgggagacgctatcgtgctgccagccggcgctctccaccaggtccaaaattttcacagttgcatccaagtaactgaagatttcgtcagcccggagcatctcgttgagtctttccaccttactcaggaactcagactcctgaaggaagaaatcaactatgatgacaagctacaggtcaagaacatactgtaccatgcagtgaaagagatggtccgtgctttgaagattcacgaagacgaggttgaggacatggaagaaaactag

SEQ ID NO: 103011 - DNA, 7077 bp, Artificial Sequence
  derived and/or modified sequence
atgcagggcccctacagcctgaacggctaccgggtgcgggtgtaccgccaggacagcgctacccaatggttcaccggtataattacccaccacgatctcttcactagaacaatgatcgtcatgaacgatcaggtccttgagccacagaatgtggatccttctatggtgcagatgaccttcctggatgacgtcgtgcactcattactcaagggagaaaacataggcatcacctccagaagacgatctagagccaaccagaacgtcaatgctgtccatagtcactacaccagagcccaagcaaactccccccgccccgcaatgaactcccaagcggctgttccgaaacaaaatacccaccagcagcagcagcagcggtccatccggccaaacaagagaaaaggatctgactccagcattccagatgaagaaaagatgaaggaagaaaagtacgattatatttcgagaggtgagaaccccaaaggcaaaaataagcacctaatgaataaacgacgtaagccagaggaggacgaaaagaaactcaatatgaagaggttgagaaccgataacgttagcgacttttctgagtcctccgattccgaaaactccaataaacgcatcatcgacaacagtagcgagcagaagcccgaaaatgagctgaagaacaagaatacatccaaaataaacggcgaagagggtaagccacacaataatgaaaaggctggggaagaaaccctgaagaactcccagccgccatgggatcagatccaagaagacaaaaagcacgaagaggctgagaagcgcaagtccgtggatactcagctgcaggaggacatgatcatacattcctctgaacagtcaacagtgagcgatcacaatagcaatgacctgctaccacaggagtgcaacatggataaaacacataccatggagctgctgcctaaagagaagttcgtgtcacgtcccccaacaccaaagtgcgttatagacataacaaacgacacgaatctcgagaaagtggcgcaggagaactcaagtacttttggtcttcagactctgcaaaagatggaccctaacgtgagcgattctaagcacagcatcgcaaatgccaaattcttggaaaccgccaagaaagactctgaccagagctgggttagcgatgtagtaaaggtggacctgacacaatcctcagtgaccaacgccagcagcgggaatgatcacctgaacatggaaaaggagaaatatgtcagctatattagccctctgagcgcagtttcagtgatggaggataagctgcacaagaggagcccgcctcctgaaacaatcaagtcaaaactcaacacatctgtggacactcataagatcaaatcgtcaccgtctcccgaggtggtcaaacccaagatcactcacagcccggatagcgtgaagtccaaggcgacgtacgttaactctcaggcaacaggggagcgccgtctggcgaacaagatagaacacgagctctccaggtgctcattccaccccatccctactcgcagctccaccctcgaaactacaaagagtcccctgatcattgataaaaacgagcactttactgtctacagagatcccgccttgatcgggagcgagacgggcgcaaatcatatctcacccttcctgtcccagcatcctttcccattgcattcttcatctcatcgtacttgcctgaatcccggaacccaccacccagctctaacacccgccccccacctgctggccggaagctcctctcagacacctctgcccaccattaacacccatcccctaacatccggccctcaccacgctgtgcatcatccgcatctgctgcccaccgtgttacccggcgtgcccaccgccagcctacttggcgggcatcccagactcgaatcagcccatgctagctcattgagtcacctggctctggcccatcaacagcaacaacaactcctccagcaccagtctccccacctcctcgggcaagcgcacccctcagccagctataaccaactaggactgtatccaattatctggcaatatcctaacggcacccacgcctatagcgggcttggcttgccatcgagtaagtgggtccaccctgagaacgccgtaaacgcggaggccagcctgagacggaatagccccagcccctggcttcaccagcccacacccgtaacttcggccgatgggattggacttctgagtcacatcccagttcggccttcttcggccgaaccccaccgaccactgaagattactgcccactcatccccgcctttgacaaagaccctggtggaccaccataaagaagaattggaacggaaggcattcatggagccactgcgctctgtggcaagcaccagtgcaaagaacgatctggatttgaaccgatcacagaccggcaaagattgccacctgcacagacatttcgtagaccccgtgctaaatcagctacagagacctcctcaggagaccggtgagcgccttaataaatacaaggaggagcatagacgaatccttcaggagagcatcgacgtggccccctttactactaagatcaaaggccttgagggggagcgcgaaaattacagccgcgtcgcatccagctcatctagccccaaatcacatatcattaaacaggatatggacgtggagaggtccgtctcagacctttataagatgaagcatagtgtgccgcagtccttgccacagtcaaactactttaccaccctttctaattccgtggtaaatgagccccccaggagttacccgagcaaagaggtcagcaacatatatggcgacaaacaaagcaatgccctggctgctgctgccgctaacccccagacactcacatcctttatcacaagccttagtaaaccccccccactgattaaacatcagccagagtccgaagggctggtgggaaagatcccagagcacttgccccaccagattgcaagtcacagcgttactacattcagaaacgactgccgcagtcctacccacctgacagtgtccagcacaaatacgctgcgaagtatgcctgccctgcatcgagcaccagtgttccaccctcctattcaccactccctcgagcgcaaggagggctcttactctagcctgtctccacctacattaaccccagtgatgcccgtgaacgcgggaggaaaagtccaagaaagccaaaagccgcccaccctcattccagagcctaaagattcccaagctaatttcaaatcttcatctgagcagtccttgacagagatgtggcgccccaacaataatctgagtaaggaaaagactgaatggcatgtcgagaaaagcagtggcaaattgcaggccgctatggcctcagtgattgtgcgtccttcttcttccactaaaactgacagcatgcctgccatgcaactcgcctcgaaagaccgagtgtccgaaaggtccagcgctggagctcataagacagactgtctcaagctggccgaggcgggtgagaccgggcgcattatattgcctaatgttaattctgacagtgttcacaccaagagcgaaaagaattttcaagccgtaagccaaggctctgtccctagctcagtgatgtcagcggtgaacaccatgtgcaacacaaaaaccgatgttatcacgagcgccgccgacaccacctctgtcagcagctggggaggctcagaggtgattagtagtcttagcaatactatactggctagtacgagttccgaatgcgtaagttcaaaaagcgtttcccagccagtggcacaaaaacaggaatgtaaggttagtactaccgcccctgtcacgcttgcttcttctaagactggatctgtggtgcagccatcttccgggttttcagggacgaccgactttatacacttgaaaaaacacaaggccgccctggctgcagcccagtataagtcgagcaatgcttctgagacagaacccaacgccatcaagaaccagacactgagtgccagcctcccactggacagcactgtgatctgctccaccatcaacaaggcaaacagtgtgggcaacggccaggccagtcagacgagtcagcctaactatcacaccaagcttaagaaggcatggctgaccaggcattccgaggaggataagaatacaaataaaatggaaaattccggcaattctgtgagcgagatcattaaaccctgtagcgttaacctgattgcctctacatcatctgacattcagaactccgtcgactctaagattatcgtggataaatacgtgaaagatgataaagtgaacagacgcaaagccaaacggacatatgagtccggctccgagagtggcgactcagacgagagcgagtctaaatccgagcagcgcacgaaaaggcagccaaaacccacgtacaagaaaaaacagaacgacttgcaaaaacgcaaaggcgaaatcgaagaggacctcaagcccaatggcgtactctcaaggtcagccaaagagcgctccaaactgaaattgcagagcaattctaacactggcattcctcgctcagtgctgaaggactggaggaaggtgaagaaactgaagcaaaccggagagagctttctgcaggacgactcatgctgcgagatcggtcctaacctgcagaagtgcagagagtgtaggttgattcgctctaaaaaaggggaagaacccgcccactctcccgtgttctgtaggttttactacttccgaagattgtctttttctaagaatggtgtagtgagaatcgacggcttctctagcccggatcagtatgacgacgaagcaatgagtctatggacccatgagaatttcgaggacgacgagctggatattgaaacaagcaagtacatactggacataatcggagacaaattctgccaacttgtgaccagcgaaaagacggctctgagctgggttaaaaaggacgccaagatcgcttggaaaagagcagtccggggcgtgcgggaaatgtgcgacgcctgcgaagcaaccctgttcaacatccactgggtatgccaaaaatgtggcttcgtagtgtgcctggactgctataaggccaaggaaagaaaaagttccagagacaaggagctctacgcctggatgaaatgcgtgaagggtcagcctcacgaccataaacatcttatgcctacccaaattattcccggctctgtccttactgatttgctggacgctatgcacacactcagagagaaatacggaatcaagtcacactgccactgtactaataaacagaacctccaggtcggcaattttcccacaatgaacggggtgagccaggttctgcagaatgtgctcaatcattcaaataagatctccctgtgtatgcccgaatctcaacagcagaacacaccccctaagtccgagaaaaatggaggaagttctcccgagtctgacgtaggcaccgacaacaagctgaccccccccgagagtcagagccctctgcattggcttgctgatctggccgaacagaaggcccgcgaagaaaagaaggagaacaaagagctgaccctggagaatcagattaaggaggaaagggagcaggacaactccgagagtccgaatggccgaacttcccccctcgtctcccagaacaatgaacaggggtcgacgctgagagacctgctcactaccacagctggaaaactgcgcgttggatcaacagatgccggtatcgccttcgctcctgtctacagcatgggcgctccatcttctaagtcaggcagaacaatgcctaacatcctcgatgacattatcgcgagcgttgttgagaataaaatccccccatcaaaaacatctaaaattaacgttaagcctgagctcaaagaggagcctgaagaatcgattatctcagcagttgacgagaataacaagctgtattctgatataccacatagctggatttgcgaaaagcacattttgtggctcaaggattataagaacagtagtaactggaaactgttcaaggagtgttggaagcagggtcaacccgctgtggtaagtggcgtacacaagaaaatgaatataagtctctggaaggctgaatccatctcactggattttggggaccaccaggcagacctgttgaattgtaaggattccatcattagcaacgcgaacgtgaaagaattctgggacggtttcgaggaggtaagcaaacgccaaaaaaataagtcaggggaaaccgtggttcttaagctgaaggattggccgtccggcgaggatttcaaaacgatgatgcctgctagatatgaggatctgcttaaaagtctacctctgcctgagtattgtaaccccgaggggaaatttaatttggcttcacacttgcccggtttcttcgtccgccccgacctcggccctcggctctgttcagcctacggcgttgtggcggccaaagaccatgatattggtacaaccaatctgcatattgaggtatctgatgtcgtcaatattcttgtctacgtgggaatagcgaaaggcaatgggattctttctaaggcaggtatcctgaagaagttcgaagaggaagatctagatgatatcttgagaaaaaggctgaaggactccagtgagatcccaggcgcgctatggcatatctacgcgggtaaagacgtcgacaaaatccgagaatttctccagaagattagcaaagagcagggattggaagtgctgccagagcatgacccaatccgagaccagtcttggtatgtcaataagaaactgaggcaaaggctgctggaagagtacggcgtgcgaacctgcaccctcatccaatttctcggcgatgccatcgtgctccctgccggagcactgcatcaggtgcagaatttccactcttgcatccaagttacggaagacttcgtaagtcccgagcatttggtggagtcatttcatctcactcaggagctcaggctccttaaggaggaaatcaattatgacgataagttgcaggtcaaaaacattctgtaccacgcggtcaaggagatggttagggcactgaaaatccacgaagatgaagtagaagacatggaagagaattag

SEQ ID NO: 103012 - DNA, 6911 bp, Artificial Sequence
  derived and/or modified sequence
atgatcgtcatgaacgaccaagttctggaacctcagaatgtggaccctagcatggttcagatgacctttttggacgatgtggtgcattctctgctgaaaggcgaaaatattggaataacaagtagaagacgtagtcgggctaatcagaatgtcaatgcagtgcacagtcattatactcgcgcacaggccaactctcctagacccgcaatgaactcccaggcagctgtccccaaacaaaacactcatcagcaacagcagcaacggagtatcagacctaacaagaggaagggctccgattcctctattccggatgaggaaaagatgaaggaagaaaaatacgactatatttcccgaggcgaaaaccccaagggcaaaaacaagcacctgatgaacaagcgcaggaagccagaggaggatgagaaaaagctgaacatgaagagactcaggaccgataacgtcagcgactttagcgaaagttctgattccgagaatagcaacaaaagaataatcgacaatagttctgagcaaaagccagaaaacgagctgaagaacaaaaatacaagcaagattaatggtgaggagggcaagccccacaataacgagaaggcaggggaagaaacactcaagaacagccagcccccatgggatcagattcaagaggataaaaaacatgaagaggccgaaaaacgaaaaagtgtggacacgcagttgcaggaagacatgattatccacagcagtgaacaaagcactgtttctgatcataattcaaacgacttactcccacaagagtgtaacatggacaaaacccatacaatggaactcctccccaaggagaaattcgtgagtcggcctccaacccccaagtgcgtgatcgatattaccaatgatacaaacttggagaaggtcgcacaggagaactcctccacatttggactccaaactttacagaagatggatcctaacgtttcagactctaaacactcaatagccaatgccaaattcctggaaactgccaagaaagattccgatcagtcatgggtgagtgatgtggtgaaagtagacctgacccagagtagtgtgacaaatgccagctcagggaatgaccaccttaacatggagaaggagaagtatgtgtcctacatctccccgctctctgcagtcagtgtcatggaggacaaattgcacaagcggtcacctccccctgaaacgatcaagagtaaactgaatacctccgtggatactcataagatcaagtcttccccttcgcccgaggttgtgaaacccaagatcacgcactcaccagattccgttaaatcaaaggccacctatgtgaatagccaagctactggggagagacgcctggcaaataagatagagcacgaactctctagatgttcattccatccgatacctacgcgctcaagcacgctggaaaccaccaagtcacccctgatcattgataagaacgagcacttcacggtgtaccgagatcctgcactgatcggaagcgaaactggagctaatcatatctcccctttcctctcccagcacccctttcccctgcattcctcttctcaccgcacttgtctgaatccaggtacccaccaccccgctttaacacctgccccacatctgttggctggtagtagtagccagactccgttacccactataaatactcacccattgacctctggacctcatcacgccgtccatcacccccatttgctaccgacggtgctgcctggcgtgcctacagcctctctgcttggaggacatcctaggcttgaatctgcgcatgcctcctcactttctcacctcgcattagcacatcagcagcagcagcagctgctccagcaccaaagtccccatttgctcggacaggcacatcccagcgcctcttataaccagttaggcttgtatcccattatctggcagtatcccaacgggacacacgcctattctggattggggctgccgagttcaaaatgggtccaccctgagaacgcagtaaatgcggaggcatctttgcgcaggaacagtccgagcccttggctccatcagccaactcccgtgacctccgctgacggcattggtctgctctctcatattccagtgcgcccaagctctgcagagcctcaccgcccacttaagataacggcccacagctctccgccacttaccaagaccctggtggatcaccataaagaggagttggaaagaaaggcattcatggagcctttgagatctgtcgcctctacatccgccaaaaatgacctggacctcaataggtcgcagacaggcaaggattgccacctccaccgccactttgtggaccctgtactaaaccagctgcagcggcctccacaagaaaccggtgaaagactgaataaatataaggaggaacaccggaggattctccaggaatccatcgatgtggcccctttcaccactaagatcaagggattggaaggagagcgggaaaattacagtcgcgtggctagtagcagtagctctcctaaatctcacatcattaaacaagatatggacgttgagcgatccgtatctgatctctacaagatgaaacactcagttccacagtccctcccgcagtctaattactttaccaccttgtcaaactccgtggtgaatgaacccccacgcagttacccttcaaaagaagtgtcaaatatctacggcgacaaacagagtaatgccctagccgctgccgctgccaatccacagacactgacgtcctttatcaccagcctgagcaaacctccgcctctcatcaagcatcaacctgagtccgaaggcctggtggggaagataccagagcatctgccccatcagatcgcatcacacagcgttaccacctttcggaacgactgtaggagtccaacccatctcaccgtctcctcaacaaatacactgagatccatgcccgcactacatcgggcaccggtttttcatccaccaatccaccatagcctcgagcgcaaagaaggaagctactcctctttgtccccgccaactctgactcccgtgatgccagtgaacgctgggggaaaagtacaggagtcacagaaaccgcctacgttgattccagagccaaaggactcgcaggccaactttaagtccagcagcgaacagtccttaacagagatgtggaggccaaataataatttgtctaaagagaagacagaatggcacgtcgagaaatcatccggcaaacttcaagctgccatggctagcgtgatcgtacgaccttcctcttcaaccaaaacagattccatgcccgctatgcaactcgcctctaaggatcgggtgagcgaaagatctagtgcgggagcacacaagaccgattgcttaaaactcgccgaggcaggagagaccggcaggatcatcttgccaaacgtgaacagcgactccgttcacaccaaaagtgagaagaatttccaggctgtgtcccaaggaagcgtgccctctagcgtgatgtctgcagtcaacacaatgtgcaacaccaagacagatgtgatcacatccgctgcggatacaaccagcgtcagctcgtggggaggcagcgaagttatctcgagcttgtccaacaccatactagcctcaacatctagcgagtgtgtctcttcaaagagcgtgagccagcccgtcgctcagaaacaggaatgcaaagttagcactaccgccccagtgacgctggcctcttctaaaaccgggagcgtagttcagccttcaagcgggtttagcggaactacagactttatccacctaaagaagcataaggccgctctagccgctgcgcagtataagtcgagtaatgcaagcgaaactgagcccaacgcaatcaaaaaccagactttaagcgcctcccttcctcttgatagcacagttatttgcagcactataaataaggcgaattccgtcgggaacggccaggcctcacaaacctcacagccaaactatcacacgaagctgaagaaagcctggcttacccggcactcagaagaagacaaaaatactaacaaaatggaaaattccggcaattctgtgtctgagatcatcaaaccttgttcggtcaatctgatagcatccacatcctccgatatacagaacagtgtggactccaagattattgttgataagtacgtcaaggatgacaaggtgaacagacgaaaagcgaagcgcacttacgagagcgggtcggaaagtggagacagtgacgagtcagagtctaaatccgaacagagaaccaagcgtcagcctaaacccacttataaaaagaagcagaacgacctgcagaaacgcaagggcgaaattgaagaggatctgaaacctaacggcgtgctttcccggagcgcaaaggaacgcagtaaactgaagctgcaatctaactccaacacagggatccctcgttcagttctgaaggattggaggaaggtaaagaagctgaagcagaccggtgagagctttttgcaggacgattcatgttgcgaaattgggcctaatttgcaaaagtgccgcgaatgccgcctcatccgctcgaagaagggtgaagaacctgctcactcacctgtgttctgtcggttctactacttccggagattgtcttttagtaaaaatggagttgtgagaatcgatggcttttcaagccctgaccagtatgatgacgaagcgatgtctctgtggactcatgaaaattttgaggacgatgaacttgacattgagacaagcaagtatatactagatattatcggcgataagttttgccagcttgtgacaagcgagaagactgcgctgtcatgggttaaaaaagatgccaagatcgcctggaagagggccgtaaggggggtgagagaaatgtgtgacgcctgcgaagcaaccttgtttaatatccattgggtgtgccagaagtgcgggtttgtagtgtgtttggactgctacaaggccaaggagcggaagtccagcagagacaaagagttatatgcctggatgaagtgcgtcaaaggccagccccatgatcataagcatctgatgcctacacagattatacctggtagtgtgctgacagatctgctcgacgctatgcatacactgagagagaaatatggaatcaaatcacactgccattgcacgaataagcaaaacctccaagttgggaatttccctacgatgaacggtgtctctcaatcgcagcagcagaatacccctcctaaatccgaaaaaaacggcggtagttcccctgaatctgatgtgggaaccgacaacaaactgacacccccagaatctcaatctccactgcattggttggccgatctggccgagcagaaagccagggaagaaaagaaagagaacaaggaactcaccctggagaaccagatcaaggaggaacgggaacaggacaatagcgagagtccaaacggcagaactagtcccctggtgagtcagaataacgagcaaggctccaccctgagggatctcctgacaaccactgcgggaaagctcagagttggatccacagatgctgggatcgctttcgctcctgtttattctatgggggcaccgtcaagcaagtctggcaggaccatgccgaatattctggatgatataatcgcatcagtcgtagaaaacaagatcccaccttctaagacaagcaaaatcaatgtcaagccagaattaaaagaggagcctgaggagtcaatcatttccgcagttgacgaaaataacaagctatattcggatatacctcactcgtggatctgtgaaaagcacattctgtggctgaaagactataagaactcaagcaattggaaactttttaaggagtgttggaagcaaggccagcctgccgttgtgagcggcgtccacaagaaaatgaacatcagcctgtggaaggccgagtctatatctctggacttcggggaccatcaggccgacctgctcaattgtaaagacagtatcataagcaatgcaaacgtcaaggagttctgggacggctttgaagaagtgtcgaaacgccagaagaacaagtcaggtgaaacagtggtgctgaaactcaaagactggcccagcggcgaagactttaagacgatgatgcctgcgagatacgaggacttactcaagtctctccccttaccagaatactgtaatccagaaggcaagttcaaccttgcttcccacctgcccggattttttgtcaggcccgatctaggccctcgactttgctccgcctacggagtggtcgccgctaaagatcacgacattggtaccaccaatttacatattgaagtgtcagacgtagtcaacatcttagtttatgtcggcatcgcgaaggggaatgggatattgagcaaggccggtattcttaaaaaattcgaagaggaggatctcgatgacatcttgcggaagcggttgaaggatagctctgagatccccggagcactctggcatatttacgctggcaaagacgtggacaagattcgcgagtttctgcagaaaatttcaaaagagcaaggattagaggtcctgccggaacacgatccaatcagggaccagtcttggtacgtaaacaagaaacttcggcaacgtcttctggaagaatatggcgtacgaacttgcacgttgatccaattcctgggggacgcaattgtcctgcctgcaggcgctcttcaccaggtccaaaatttccattcgtgtatacaggtcaccgaagattttgttagtcccgagcatctggttgaatctttccatctgacccaggagcttaggttgctgaaagaagaaatcaattacgatgacaaactgcaggtgaaaaacattttatatcacgcagtcaaagagatggtccgggcactgaagatccatgaagacgaggtagaggatatggaggaaaacta

SEQ ID NO: 103013 - DNA, 7076 bp, Artificial Sequence
  derived and/or modified sequence
atgcagggtccctattctctaaacggctaccgggtccgggtctaccgccaggacagcgccacacagtggttcactggcatcatcacccaccatgacctgtttactaggaccatgattgtgatgaatgaccaggtgctggagcctcaaaacgtggatccgagcatggttcagatgacgtttctggacgatgtagtgcatagcctgctgaagggggaaaatatcggaattaccagccgcagaaggtccagggcgaatcagaatgtgaatgcggtgcatagccattacacaagagcccaagctaactccccaagaccagccatgaattcccaggcagcggtacctaagcagaacacacaccagcagcagcagcagcggtccatacgcccaaacaagcgcaaggggtccgactcctcaattccagacgaagaaaagatgaaggaggaaaaatacgactacattagtcgcggagagaacccaaaaggaaagaacaagcatctgatgaacaaaagacgcaagcctgaagaagatgagaaaaagctgaacatgaaaaggctacgcacagataacgtgtcagatttcagtgaatcctcggactccgagaactctaacaagagaatcattgacaactcgagtgagcagaagcccgagaacgaactgaaaaataagaatacaagtaagatcaatggcgaggaagggaagcctcacaacaacgaaaaagcaggcgaggagacactgaagaatagccagccaccttgggaccagattcaggaggataaaaaacatgaggaagctgaaaagaggaagtcggtggatacacagcttcaagaggatatgattatacactcctctgaacagagcacagtgtccgatcataattctaatgatcttttgccacaagagtgtaacatggacaaaacccatacaatggagttgttgccgaaagagaagtttgtcagccgaccgccaactccaaaatgtgtaatcgacatcacaaatgatacaaatctcgaaaaagtggctcaagagaactcatctaccttcggcttgcagaccctgcaaaagatggatcctaatgtatccgattcaaagcactcgatagccaatgcaaagtttctcgagaccgctaaaaaagatagcgatcagagctgggtgtcggacgttgttaaagtggatttaactcaaagctcggtgaccaatgcttcctcaggaaatgaccaccttaatatggaaaaggagaagtatgtgagctacatttcaccactaagcgccgtctcagtgatggaggacaagctccacaaacggtctcctcctccagagacaattaaatcaaagctgaataccagcgtagatactcacaaaattaagtcctccccctccccagaggttgtcaagccaaaaatcactcattctcccgattctgttaaaagcaaggccacgtacgtaaacagccaagccacaggcgagagaaggttagctaacaaaattgaacacgaactgagccggtgctcattccacccaattcctactagatcttcaacattggaaacaacaaagtctcccctcattatagataagaacgagcattttaccgtgtatagggatcccgcattaattgggtcagaaacgggtgctaatcacatcagcccttttctgtcgcagcatccttttcccctacactcgtcctcgcatcgcacctgtctaaacccaggaactcatcacccggcacttacgccggctcctcacctattggccggtagctcaagccagactcccctgcccaccattaacacacatccactcacttctggcccacatcacgcagtccatcacccccatctactacctactgtcttacccggtgtgccaaccgcctccctgttgggcggtcatccacgccttgaaagtgctcacgctagcagtctatctcatctagccctcgctcatcaacagcaacagcagctgctgcaacatcaatccccccatctgctcggtcaggctcatccaagtgccagttataaccagctgggtctgtacccaatcatctggcagtaccctaacggaacccacgcttacagcggccttgggctgccctcttcaaagtgggtacatccagagaacgcagttaatgcggaagctagtctgcgcagaaacagtccctccccatggctgcaccagccaactcctgtgacaagcgccgatgggatcggcctcctttcacacatccctgtgaggccctcctcagcagaaccccacaggcctctaaagataacagcacactcttcacccccactgaccaagaccctagtggaccaccataaagaggagctggagcggaaggcttttatggagcccctgaggagcgtggcttccaccagcgccaagaacgatcttgatcttaacagatctcagacaggtaaagactgccaccttcacagacactttgtcgatccagtcctgaaccagctgcagcggccacctcaggaaacaggtgaaaggttgaataaatacaaggaagaacacaggaggattctgcaggagtcaatcgatgttgctccatttacaaccaagataaaaggacttgagggggaacgggaaaactattctagagtggcctcatccagctcatcacctaaaagtcacattataaagcaggacatggacgtggagcgatccgtctcagatctctataagatgaaacactcagtgcctcagagcttacctcagagcaattacttcacaaccttatccaatagcgtggtgaacgaacctcctaggtcctatccttccaaggaagtaagtaatatttacggagacaaacagagcaacgcattagctgccgctgccgctaacccacaaactctgacctcttttatcacaagtctatcaaagccccctccattgattaaacaccaacctgagagtgaggggctggttggcaagataccggagcacctcccacaccaaatagctagccacagcgtgacaacctttaggaacgattgccgctctccaacccatcttaccgtgtcctctacaaatacgctcagatctatgcccgctctccacagggccccagtgttccaccctcctatccaccattcacttgaacgtaaggagggatcctactcgagtctgagccccccaacgctgacaccagtgatgcccgtgaatgcaggaggcaaggtccaggagtcacagaagccgccaactcttattcccgagcctaaagactcccaggccaatttcaagagcagctcagagcagtccctgacggagatgtggcggcctaataacaatctctctaaggagaaaacagaatggcacgtggagaagtcgtccggaaagttgcaagcagctatggcctctgtcatcgttcgaccatcaagcagtaccaagactgatagtatgccagcgatgcagttggcgtcaaaagatcgcgtgagcgagcgctctagtgctggagcgcacaaaactgactgtttgaagctcgcggaagcaggagagaccggaaggatcattttaccgaacgtcaactcagattcagtacatacaaagtctgaaaagaatttccaagccgtcagccagggttcagtgccatcaagtgtcatgagcgccgtcaacaccatgtgcaacactaagaccgacgtcatcacatcggcggctgacacaaccagtgttagtagctggggaggttcggaagttatcagcagcttatccaacacaatcctagcctcgacctcttctgaatgcgtgagttcaaagtcagtcagtcaacctgtggcccagaaacaggaatgcaaagtcagcacaaccgcaccagtcacactggcctcctcaaagacagggtcagtggtccagccctcaagtggcttctcgggcacgacagactttattcatctgaaaaaacacaaagcagctctggctgcggctcagtacaagagttcaaacgccagcgagaccgaaccaaatgccataaaaaatcagaccttatctgcctctctacccctggactccactgtgatctgcagtaccattaataaagccaattccgttggcaacggccaggccagtcagacctctcagcctaattatcacacgaaactaaaaaaagcttggctaacacgccactccgaggaagataagaacacaaataagatggagaattcgggcaattccgtgtctgagatcatcaagccatgttccgtcaaccttatcgctagcaccagctccgatattcaaaatagtgtcgatagcaagattatagtagacaaatacgtgaaggacgacaaggtcaaccggagaaaagcaaagcgtacatatgaatctggtagtgaaagcggagactcggatgagagcgagtccaagtctgaacagcgtactaagcgacagcccaaaccaacctacaaaaagaaacagaatgacctgcaaaagaggaaaggcgagatcgaggaagatttaaaacccaacggcgtacttagtagatccgctaaggagagatccaagctgaaactacagtccaactctaatactggaatccccaggagtgttctgaaggactggagaaaagtgaagaagctgaaacaaactggggaatcattccttcaggacgattcatgctgtgaaatcggtcctaacctccagaagtgccgggaatgcaggctaattcgctctaaaaagggagaagaacccgcacattcccccgtcttctgtaggttttattacttccgacggctcagtttttctaaaaatggcgtcgtacggatcgacggcttttcctcacctgaccagtatgatgatgaggccatgtcgctgtggacacacgagaacttcgaggacgatgagctggatatcgagaccagcaaatacatcctcgatattatcggcgataagttctgccagctggtaacctccgagaagaccgctctaagctgggtgaaaaaagatgcaaagatcgcttggaagagagccgtccgcggagtacgcgaaatgtgcgacgcttgcgaggccacactcttcaacattcactgggtgtgtcagaaatgtggattcgtggtgtgcttggactgttacaaggcaaaggaacgtaagtctagtcgggacaaagaactgtacgcttggatgaagtgtgttaagggacagccacacgaccacaagcatttgatgcccacccaaatcatcccaggaagtgtcttaaccgacttgctggatgctatgcatacgcttcgcgaaaaatatggtataaagtcacattgccactgtactaataagcagaaccttcaagttggcaatttccctacaatgaatggcgtgtcacaggtgttacagaacgtcctcaaccacagtaacaagataagtttgtgtatgccagaatcacagcaacaaaacacaccccctaaaagtgaaaaaaacggtgggtcttctccagaatcggacgtgggaactgataacaaactgacaccaccagaaagccagtccccgctgcactggctggccgacctggctgagcagaaggctcgcgaagagaaaaaggagaacaaagagctcacgttggaaaatcagattaaggaggaacgcgaacaggacaattccgagtccccaaacgggagaaccagtcccctcgtcagccaaaacaacgagcagggttctacacttcgagatttgctcaccacgacagctgggaagctgcgtgtgggctcaacagatgccggaatcgcattcgcacctgtgtattctatgggagctccgtccagtaaaagtggaaggaccatgcccaacattctcgatgacatcatcgcaagtgtcgtcgaaaataagataccaccctccaagacgtcgaaaattaacgtcaaaccagaattgaaggaggagcccgaagagagtatcatcagcgcagtcgacgagaacaacaagttatattcagatatacctcattcctggatctgtgagaaacacatattatggctgaaagactataagaattcaagtaactggaagttgtttaaggagtgttggaagcaggggcagccagcagtggtgagtggggtccataaaaagatgaatatctctctgtggaaagcagaatctatcagccttgacttcggcgaccatcaggcagatctgctgaactgcaaggattccatcatttctaacgccaacgtgaaggagttttgggatgggtttgaggaggtcagcaaacgccagaagaataagtctggagaaacggtggtattgaagctgaaagattggccatcaggagaagattttaagaccatgatgccagcacggtacgaagacctcctgaagagtctgccactgccggagtactgcaatcccgaaggtaagttcaatctggctagccatcttcctggcttcttcgtgagaccagacttaggaccgagattgtgcagcgcttacggcgtagtcgcagctaaggaccatgacataggaaccactaacctgcacatcgaggtgtccgacgtggtaaatatcctcgtgtatgtggggatcgccaagggaaatggcattctatctaaagcaggtatcctgaaaaaattcgaagaagaagatctggatgacatactgaggaaacgccttaaagatagtagtgaaattcctggcgctctgtggcacatatacgctggcaaggatgtggacaagattcgcgagttcttgcagaagatcagtaaagagcagggcttggaagtcctgcccgaacacgacccaataagagaccagtcttggtacgtaaataagaagttgagacagcggcttttagaagagtacggcgtgagaacgtgcactctcatccaattcctaggcgatgcgattgtcctgccagccggtgctctgcaccaggtgcagaattttcacagttgcattcaagtgactgaggacttcgtgtcccccgagcacctagtcgagagtttccatctgacccaggagctgagactattaaaagaggaaattaactacgacgacaaactgcaggtcaaaaatattctctaccatgctgtaaaggagatggtgagggcactcaaaattcacgaggatgaggtggaggatatggaggagaacta

SEQ ID NO: 103014 - DNA, 6912 bp, Artificial Sequence
  derived and/or modified sequence
atgatcgtgatgaacgaccaggtgctggagccccagaacgtggaccccagcatggtgcagatgaccttcctggacgacgtggtgcacagcctgctgaagggcgagaacatcggcatcaccagcagaagaagaagcagagccaaccagaacgtgaacgccgtgcacagccactacaccagagcccaggccaacagccccagacccgccatgaacagccaggccgccgtgcccaagcagaacacccaccagcagcagcagcagagaagcatcagacccaacaagagaaagggcagcgacagcagcatccccgacgaggagaagatgaaggaggagaagtacgactacatcagcagaggcgagaaccccaagggcaagaacaagcacctgatgaacaagagaagaaagcccgaggaggacgagaagaagctgaacatgaagagactgagaaccgacaacgtgagcgacttcagcgagagcagcgacagcgagaacagcaacaagagaatcatcgacaacagcagcgagcagaagcccgagaacgagctgaagaacaagaacaccagcaagatcaacggcgaggagggcaagccccacaacaacgagaaggccggcgaggagaccctgaagaacagccagcccccctgggaccagatccaggaggacaagaagcacgaggaggccgagaagagaaagagcgtggacacccagctgcaggaggacatgatcatccacagcagcgagcagagcaccgtgagcgaccacaacagcaacgacctgctgccccaggagtgcaacatggacaagacccacaccatggagctgctgcccaaggagaagttcgtgagcagaccccccacccccaagtgcgtgatcgacatcaccaacgacaccaacctggagaaggtggcccaggagaacagcagcaccttcggcctgcagaccctgcagaagatggaccccaacgtgagcgacagcaagcacagcatcgccaacgccaagttcctggagaccgccaagaaggacagcgaccagagctgggtgagcgacgtggtgaaggtggacctgacccagagcagcgtgaccaacgccagcagcggcaacgaccacctgaacatggagaaggagaagtacgtgagctacatcagccccctgagcgccgtgagcgtgatggaggacaagctgcacaagagaagccccccccccgagaccatcaagagcaagctgaacaccagcgtggacacccacaagatcaagagcagccccagccccgaggtggtgaagcccaagatcacccacagccccgacagcgtgaagagcaaggccacctacgtgaacagccaggccaccggcgagagaagactggccaacaagatcgagcacgagctgagcagatgcagcttccaccccatccccaccagaagcagcaccctggagaccaccaagagccccctgatcatcgacaagaacgagcacttcaccgtgtacagagaccccgccctgatcggcagcgagaccggcgccaaccacatcagccccttcctgagccagcaccccttccccctgcacagcagcagccacagaacctgcctgaaccccggcacccaccaccccgccctgacccccgccccccacctgctggccggcagcagcagccagacccccctgcccaccatcaacacccaccccctgaccagcggcccccaccacgccgtgcaccacccccacctgctgcccaccgtgctgcccggcgtgcccaccgccagcctgctgggcggccaccccagactggagagcgcccacgccagcagcctgagccacctggccctggcccaccagcagcagcagcagctgctgcagcaccagagcccccacctgctgggccaggcccaccccagcgccagctacaaccagctgggcctgtaccccatcatctggcagtaccccaacggcacccacgcctacagcggcctgggcctgcccagcagcaagtgggtgcaccccgagaacgccgtgaacgccgaggccagcctgagaagaaacagccccagcccctggctgcaccagcccacccccgtgaccagcgccgacggcatcggcctgctgagccacatccccgtgagacccagcagcgccgagccccacagacccctgaagatcaccgcccacagcagcccccccctgaccaagaccctggtggaccaccacaaggaggagctggagagaaaggccttcatggagcccctgagaagcgtggccagcaccagcgccaagaacgacctggacctgaacagaagccagaccggcaaggactgccacctgcacagacacttcgtggaccccgtgctgaaccagctgcagagacccccccaggagaccggcgagagactgaacaagtacaaggaggagcacagaagaatcctgcaggagagcatcgacgtggcccccttcaccaccaagatcaagggcctggagggcgagagagagaactacagcagagtggccagcagcagcagcagccccaagagccacatcatcaagcaggacatggacgtggagagaagcgtgagcgacctgtacaagatgaagcacagcgtgccccagagcctgccccagagcaactacttcaccaccctgagcaacagcgtggtgaacgagccccccagaagctaccccagcaaggaggtgagcaacatctacggcgacaagcagagcaacgccctggccgccgccgccgccaacccccagaccctgaccagcttcatcaccagcctgagcaagcccccccccctgatcaagcaccagcccgagagcgagggcctggtgggcaagatccccgagcacctgccccaccagatcgccagccacagcgtgaccaccttcagaaacgactgcagaagccccacccacctgaccgtgagcagcaccaacaccctgagaagcatgcccgccctgcacagagcccccgtgttccacccccccatccaccacagcctggagagaaaggagggcagctacagcagcctgagcccccccaccctgacccccgtgatgcccgtgaacgccggcggcaaggtgcaggagagccagaagccccccaccctgatccccgagcccaaggacagccaggccaacttcaagagcagcagcgagcagagcctgaccgagatgtggagacccaacaacaacctgagcaaggagaagaccgagtggcacgtggagaagagcagcggcaagctgcaggccgccatggccagcgtgatcgtgagacccagcagcagcaccaagaccgacagcatgcccgccatgcagctggccagcaaggacagagtgagcgagagaagcagcgccggcgcccacaagaccgactgcctgaagctggccgaggccggcgagaccggcagaatcatcctgcccaacgtgaacagcgacagcgtgcacaccaagagcgagaagaacttccaggccgtgagccagggcagcgtgcccagcagcgtgatgagcgccgtgaacaccatgtgcaacaccaagaccgacgtgatcaccagcgccgccgacaccaccagcgtgagcagctggggcggcagcgaggtgatcagcagcctgagcaacaccatcctggccagcaccagcagcgagtgcgtgagcagcaagagcgtgagccagcccgtggcccagaagcaggagtgcaaggtgagcaccaccgcccccgtgaccctggccagcagcaagaccggcagcgtggtgcagcccagcagcggcttcagcggcaccaccgacttcatccacctgaagaagcacaaggccgccctggccgccgcccagtacaagagcagcaacgccagcgagaccgagcccaacgccatcaagaaccagaccctgagcgccagcctgcccctggacagcaccgtgatctgcagcaccatcaacaaggccaacagcgtgggcaacggccaggccagccagaccagccagcccaactaccacaccaagctgaagaaggcctggctgaccagacacagcgaggaggacaagaacaccaacaagatggagaacagcggcaacagcgtgagcgagatcatcaagccctgcagcgtgaacctgatcgccagcaccagcagcgacatccagaacagcgtggacagcaagatcatcgtggacaagtacgtgaaggacgacaaggtgaacagaagaaaggccaagagaacctacgagagcggcagcgagagcggcgacagcgacgagagcgagagcaagagcgagcagagaaccaagagacagcccaagcccacctacaagaagaagcagaacgacctgcagaagagaaagggcgagatcgaggaggacctgaagcccaacggcgtgctgagcagaagcgccaaggagagaagcaagctgaagctgcagagcaacagcaacaccggcatccccagaagcgtgctgaaggactggagaaaggtgaagaagctgaagcagaccggcgagagcttcctgcaggacgacagctgctgcgagatcggccccaacctgcagaagtgcagagagtgcagactgatcagaagcaagaagggcgaggagcccgcccacagccccgtgttctgcagattctactacttcagaagactgagcttcagcaagaacggcgtggtgagaatcgacggcttcagcagccccgaccagtacgacgacgaggccatgagcctgtggacccacgagaacttcgaggacgacgagctggacatcgagaccagcaagtacatcctggacatcatcggcgacaagttctgccagctggtgaccagcgagaagaccgccctgagctgggtgaagaaggacgccaagatcgcctggaagagagccgtgagaggcgtgagagagatgtgcgacgcctgcgaggccaccctgttcaacatccactgggtgtgccagaagtgcggcttcgtggtgtgcctggactgctacaaggccaaggagagaaagagcagcagagacaaggagctgtacgcctggatgaagtgcgtgaagggccagccccacgaccacaagcacctgatgcccacccagatcatccccggcagcgtgctgaccgacctgctggacgccatgcacaccctgagagagaagtacggcatcaagagccactgccactgcaccaacaagcagaacctgcaggtgggcaacttccccaccatgaacggcgtgagccagagccagcagcagaacaccccccccaagagcgagaagaacggcggcagcagccccgagagcgacgtgggcaccgacaacaagctgaccccccccgagagccagagccccctgcactggctggccgacctggccgagcagaaggccagagaggagaagaaggagaacaaggagctgaccctggagaaccagatcaaggaggagagagagcaggacaacagcgagagccccaacggcagaaccagccccctggtgagccagaacaacgagcagggcagcaccctgagagacctgctgaccaccaccgccggcaagctgagagtgggcagcaccgacgccggcatcgccttcgcccccgtgtacagcatgggcgcccccagcagcaagagcggcagaaccatgcccaacatcctggacgacatcatcgccagcgtggtggagaacaagatcccccccagcaagaccagcaagatcaacgtgaagcccgagctgaaggaggagcccgaggagagcatcatcagcgccgtggacgagaacaacaagctgtacagcgacatcccccacagctggatctgcgagaagcacatcctgtggctgaaggactacaagaacagcagcaactggaagctgttcaaggagtgctggaagcagggccagcccgccgtggtgagcggcgtgcacaagaagatgaacatcagcctgtggaaggccgagagcatcagcctggacttcggcgaccaccaggccgacctgctgaactgcaaggacagcatcatcagcaacgccaacgtgaaggagttctgggacggcttcgaggaggtgagcaagagacagaagaacaagagcggcgagaccgtggtgctgaagctgaaggactggcccagcggcgaggacttcaagaccatgatgcccgccagatacgaggacctgctgaagagcctgcccctgcccgagtactgcaaccccgagggcaagttcaacctggccagccacctgcccggcttcttcgtgagacccgacctgggccccagactgtgcagcgcctacggcgtggtggccgccaaggaccacgacatcggcaccaccaacctgcacatcgaggtgagcgacgtggtgaacatcctggtgtacgtgggcatcgccaagggcaacggcatcctgagcaaggccggcatcctgaagaagttcgaggaggaggacctggacgacatcctgagaaagagactgaaggacagcagcgagatccccggcgccctgtggcacatctacgccggcaaggacgtggacaagatcagagagttcctgcagaagatcagcaaggagcagggcctggaggtgctgcccgagcacgaccccatcagagaccagagctggtacgtgaacaagaagctgagacagagactgctggaggagtacggcgtgagaacctgcaccctgatccagttcctgggcgacgccatcgtgctgcccgccggcgccctgcaccaggtgcagaacttccacagctgcatccaggtgaccgaggacttcgtgagccccgagcacctggtggagagcttccacctgacccaggagctgagactgctgaaggaggagatcaactacgacgacaagctgcaggtgaagaacatcctgtaccacgccgtgaaggagatggtgagagccctgaagatccacgaggacgaggtggaggacatggaggagaactag

SEQ ID NO: 103015 - DNA, 7077 bp, Artificial Sequence
  derived and/or modified sequence
atgcagggcccctacagcctgaacggctacagagtgagagtgtacagacaggacagcgccacccagtggttcaccggcatcatcacccaccacgacctgttcaccagaaccatgatcgtgatgaacgaccaggtgctggagccccagaacgtggaccccagcatggtgcagatgaccttcctggacgacgtggtgcacagcctgctgaagggcgagaacatcggcatcaccagcagaagaagaagcagagccaaccagaacgtgaacgccgtgcacagccactacaccagagcccaggccaacagccccagacccgccatgaacagccaggccgccgtgcccaagcagaacacccaccagcagcagcagcagagaagcatcagacccaacaagagaaagggcagcgacagcagcatccccgacgaggagaagatgaaggaggagaagtacgactacatcagcagaggcgagaaccccaagggcaagaacaagcacctgatgaacaagagaagaaagcccgaggaggacgagaagaagctgaacatgaagagactgagaaccgacaacgtgagcgacttcagcgagagcagcgacagcgagaacagcaacaagagaatcatcgacaacagcagcgagcagaagcccgagaacgagctgaagaacaagaacaccagcaagatcaacggcgaggagggcaagccccacaacaacgagaaggccggcgaggagaccctgaagaacagccagcccccctgggaccagatccaggaggacaagaagcacgaggaggccgagaagagaaagagcgtggacacccagctgcaggaggacatgatcatccacagcagcgagcagagcaccgtgagcgaccacaacagcaacgacctgctgccccaggagtgcaacatggacaagacccacaccatggagctgctgcccaaggagaagttcgtgagcagaccccccacccccaagtgcgtgatcgacatcaccaacgacaccaacctggagaaggtggcccaggagaacagcagcaccttcggcctgcagaccctgcagaagatggaccccaacgtgagcgacagcaagcacagcatcgccaacgccaagttcctggagaccgccaagaaggacagcgaccagagctgggtgagcgacgtggtgaaggtggacctgacccagagcagcgtgaccaacgccagcagcggcaacgaccacctgaacatggagaaggagaagtacgtgagctacatcagccccctgagcgccgtgagcgtgatggaggacaagctgcacaagagaagccccccccccgagaccatcaagagcaagctgaacaccagcgtggacacccacaagatcaagagcagccccagccccgaggtggtgaagcccaagatcacccacagccccgacagcgtgaagagcaaggccacctacgtgaacagccaggccaccggcgagagaagactggccaacaagatcgagcacgagctgagcagatgcagcttccaccccatccccaccagaagcagcaccctggagaccaccaagagccccctgatcatcgacaagaacgagcacttcaccgtgtacagagaccccgccctgatcggcagcgagaccggcgccaaccacatcagccccttcctgagccagcaccccttccccctgcacagcagcagccacagaacctgcctgaaccccggcacccaccaccccgccctgacccccgccccccacctgctggccggcagcagcagccagacccccctgcccaccatcaacacccaccccctgaccagcggcccccaccacgccgtgcaccacccccacctgctgcccaccgtgctgcccggcgtgcccaccgccagcctgctgggcggccaccccagactggagagcgcccacgccagcagcctgagccacctggccctggcccaccagcagcagcagcagctgctgcagcaccagagcccccacctgctgggccaggcccaccccagcgccagctacaaccagctgggcctgtaccccatcatctggcagtaccccaacggcacccacgcctacagcggcctgggcctgcccagcagcaagtgggtgcaccccgagaacgccgtgaacgccgaggccagcctgagaagaaacagccccagcccctggctgcaccagcccacccccgtgaccagcgccgacggcatcggcctgctgagccacatccccgtgagacccagcagcgccgagccccacagacccctgaagatcaccgcccacagcagcccccccctgaccaagaccctggtggaccaccacaaggaggagctggagagaaaggccttcatggagcccctgagaagcgtggccagcaccagcgccaagaacgacctggacctgaacagaagccagaccggcaaggactgccacctgcacagacacttcgtggaccccgtgctgaaccagctgcagagacccccccaggagaccggcgagagactgaacaagtacaaggaggagcacagaagaatcctgcaggagagcatcgacgtggcccccttcaccaccaagatcaagggcctggagggcgagagagagaactacagcagagtggccagcagcagcagcagccccaagagccacatcatcaagcaggacatggacgtggagagaagcgtgagcgacctgtacaagatgaagcacagcgtgccccagagcctgccccagagcaactacttcaccaccctgagcaacagcgtggtgaacgagccccccagaagctaccccagcaaggaggtgagcaacatctacggcgacaagcagagcaacgccctggccgccgccgccgccaacccccagaccctgaccagcttcatcaccagcctgagcaagcccccccccctgatcaagcaccagcccgagagcgagggcctggtgggcaagatccccgagcacctgccccaccagatcgccagccacagcgtgaccaccttcagaaacgactgcagaagccccacccacctgaccgtgagcagcaccaacaccctgagaagcatgcccgccctgcacagagcccccgtgttccacccccccatccaccacagcctggagagaaaggagggcagctacagcagcctgagcccccccaccctgacccccgtgatgcccgtgaacgccggcggcaaggtgcaggagagccagaagccccccaccctgatccccgagcccaaggacagccaggccaacttcaagagcagcagcgagcagagcctgaccgagatgtggagacccaacaacaacctgagcaaggagaagaccgagtggcacgtggagaagagcagcggcaagctgcaggccgccatggccagcgtgatcgtgagacccagcagcagcaccaagaccgacagcatgcccgccatgcagctggccagcaaggacagagtgagcgagagaagcagcgccggcgcccacaagaccgactgcctgaagctggccgaggccggcgagaccggcagaatcatcctgcccaacgtgaacagcgacagcgtgcacaccaagagcgagaagaacttccaggccgtgagccagggcagcgtgcccagcagcgtgatgagcgccgtgaacaccatgtgcaacaccaagaccgacgtgatcaccagcgccgccgacaccaccagcgtgagcagctggggcggcagcgaggtgatcagcagcctgagcaacaccatcctggccagcaccagcagcgagtgcgtgagcagcaagagcgtgagccagcccgtggcccagaagcaggagtgcaaggtgagcaccaccgcccccgtgaccctggccagcagcaagaccggcagcgtggtgcagcccagcagcggcttcagcggcaccaccgacttcatccacctgaagaagcacaaggccgccctggccgccgcccagtacaagagcagcaacgccagcgagaccgagcccaacgccatcaagaaccagaccctgagcgccagcctgcccctggacagcaccgtgatctgcagcaccatcaacaaggccaacagcgtgggcaacggccaggccagccagaccagccagcccaactaccacaccaagctgaagaaggcctggctgaccagacacagcgaggaggacaagaacaccaacaagatggagaacagcggcaacagcgtgagcgagatcatcaagccctgcagcgtgaacctgatcgccagcaccagcagcgacatccagaacagcgtggacagcaagatcatcgtggacaagtacgtgaaggacgacaaggtgaacagaagaaaggccaagagaacctacgagagcggcagcgagagcggcgacagcgacgagagcgagagcaagagcgagcagagaaccaagagacagcccaagcccacctacaagaagaagcagaacgacctgcagaagagaaagggcgagatcgaggaggacctgaagcccaacggcgtgctgagcagaagcgccaaggagagaagcaagctgaagctgcagagcaacagcaacaccggcatccccagaagcgtgctgaaggactggagaaaggtgaagaagctgaagcagaccggcgagagcttcctgcaggacgacagctgctgcgagatcggccccaacctgcagaagtgcagagagtgcagactgatcagaagcaagaagggcgaggagcccgcccacagccccgtgttctgcagattctactacttcagaagactgagcttcagcaagaacggcgtggtgagaatcgacggcttcagcagccccgaccagtacgacgacgaggccatgagcctgtggacccacgagaacttcgaggacgacgagctggacatcgagaccagcaagtacatcctggacatcatcggcgacaagttctgccagctggtgaccagcgagaagaccgccctgagctgggtgaagaaggacgccaagatcgcctggaagagagccgtgagaggcgtgagagagatgtgcgacgcctgcgaggccaccctgttcaacatccactgggtgtgccagaagtgcggcttcgtggtgtgcctggactgctacaaggccaaggagagaaagagcagcagagacaaggagctgtacgcctggatgaagtgcgtgaagggccagccccacgaccacaagcacctgatgcccacccagatcatccccggcagcgtgctgaccgacctgctggacgccatgcacaccctgagagagaagtacggcatcaagagccactgccactgcaccaacaagcagaacctgcaggtgggcaacttccccaccatgaacggcgtgagccaggtgctgcagaacgtgctgaaccacagcaacaagatcagcctgtgcatgcccgagagccagcagcagaacaccccccccaagagcgagaagaacggcggcagcagccccgagagcgacgtgggcaccgacaacaagctgaccccccccgagagccagagccccctgcactggctggccgacctggccgagcagaaggccagagaggagaagaaggagaacaaggagctgaccctggagaaccagatcaaggaggagagagagcaggacaacagcgagagccccaacggcagaaccagccccctggtgagccagaacaacgagcagggcagcaccctgagagacctgctgaccaccaccgccggcaagctgagagtgggcagcaccgacgccggcatcgccttcgcccccgtgtacagcatgggcgcccccagcagcaagagcggcagaaccatgcccaacatcctggacgacatcatcgccagcgtggtggagaacaagatcccccccagcaagaccagcaagatcaacgtgaagcccgagctgaaggaggagcccgaggagagcatcatcagcgccgtggacgagaacaacaagctgtacagcgacatcccccacagctggatctgcgagaagcacatcctgtggctgaaggactacaagaacagcagcaactggaagctgttcaaggagtgctggaagcagggccagcccgccgtggtgagcggcgtgcacaagaagatgaacatcagcctgtggaaggccgagagcatcagcctggacttcggcgaccaccaggccgacctgctgaactgcaaggacagcatcatcagcaacgccaacgtgaaggagttctgggacggcttcgaggaggtgagcaagagacagaagaacaagagcggcgagaccgtggtgctgaagctgaaggactggcccagcggcgaggacttcaagaccatgatgcccgccagatacgaggacctgctgaagagcctgcccctgcccgagtactgcaaccccgagggcaagttcaacctggccagccacctgcccggcttcttcgtgagacccgacctgggccccagactgtgcagcgcctacggcgtggtggccgccaaggaccacgacatcggcaccaccaacctgcacatcgaggtgagcgacgtggtgaacatcctggtgtacgtgggcatcgccaagggcaacggcatcctgagcaaggccggcatcctgaagaagttcgaggaggaggacctggacgacatcctgagaaagagactgaaggacagcagcgagatccccggcgccctgtggcacatctacgccggcaaggacgtggacaagatcagagagttcctgcagaagatcagcaaggagcagggcctggaggtgctgcccgagcacgaccccatcagagaccagagctggtacgtgaacaagaagctgagacagagactgctggaggagtacggcgtgagaacctgcaccctgatccagttcctgggcgacgccatcgtgctgcccgccggcgccctgcaccaggtgcagaacttccacagctgcatccaggtgaccgaggacttcgtgagccccgagcacctggtggagagcttccacctgacccaggagctgagactgctgaaggaggagatcaactacgacgacaagctgcaggtgaagaacatcctgtaccacgccgtgaaggagatggtgagagccctgaagatccacgaggacgaggtggaggacatggaggagaactag

SEQ ID NO: 103016 - protein, 576 aa, Artificial Sequence
  derived and/or modified sequence
MRGPNSGTEKGRLVIPEKQGFDFLCMPVFHPRFKREFIQEPAKNRPGPQTRSDLLLSGRAFLLPLNQEDNTNLARVLTNHIHTGHHSSMFWMRVPLVAPEDLRDDIIENAPTTHTEEYSGEEKTWMWWHNFRTLCDYSKRIAVALEIGADLPSNHVIDRWLGEPIKAAILPTSIFLTNKKGFPVLSKMHQRLIFRLLKLEVQFIITGTNHHSEKEFCSYLQYLEYLSQNRPPPNAYELFAKGYEDYLQSPLQPLMDNLESQTYEVFEKDPIKYSQYQQAIYKCLLDRVPEEEKDTNVQVLMVLGAGRGPLVNASLRAAKQADRRIKLYAVEKNPNAVVTLENWQFEEWGSQVTVVSSDMREWVAPEKADIIVSELLGSFADNELSPECLDGAQHFLKDDGVSIPGEYTSFLAPISSSKLYNEVRACREKDRDPEAQFEMPYVVRLHNFHQLSAPQPCFTFSHPNRDPMIDNNRYCTLEFPVEVNTVLHGFAGYFETVLYQDITLSIRPETHSPGMFSWFPILFPIKQPITVREGQTICVRFWRCSNSKKVWYEWAVTAPVCSAIHNPTGRSYTIGL

SEQ ID NO: 103017 - DNA, 2271 bp, Artificial Sequence
  derived and/or modified sequence
aatcccggcgtggacagcgcgaggagaaagatggcggcgatggcggtcgggggtgctggtgggagccgcgtgtccagcgggagggacctgaattgcgtccccgaaatagctgacacactaggggctgtggccaagcaggggtgagggccggacctccacgagcggaatgcggggtccgaactcggggacggagaagggcagactagtcatcccggagaagcaggggtttgatttcctctgcatgcctgtcttccatccgcgtttcaagagggagttcattcaggaacctgctaagaatcggcccggtccccagacacgatcagacctactgctgtcaggaagggctttcctgctgccccttaatcaggaagataacaccaacctggccagagttttgaccaaccacatccacactggccatcactcttccatgttctggatgcgggtacccttggtggcaccagaggacctgagagatgatataattgagaatgcaccaactacacacacagaggagtacagtggggaggagaaaacgtggatgtggtggcacaacttccggactttgtgtgactatagtaagaggattgcagtggctcttgaaattggggctgacctcccatctaatcatgtcattgatcgctggcttggggagcccatcaaagcagccattctccccactagcattttcctgaccaataagaagggatttcctgttctttctaagatgcaccagaggctcatcttccggctcctcaagttggaggtgcagttcatcatcacaggcaccaaccaccactcagagaaggagttctgctcctacctccaatacctggaatacttaagccagaaccgtcctccacctaatgcctatgaactctttgccaagggctatgaagactatctgcagtccccgcttcagccactgatggacaatctggaatctcagacatatgaagtgtttgaaaaggaccccatcaaatactctcagtaccagcaggccatctataaatgtctgctagaccgagtaccagaagaggagaaggataccaatgtccaggtactgatggtgctgggagcaggacggggacccctggtgaacgcttccctgcgggcagccaagcaggccgaccggcggataaagctgtatgctgtggagaaaaacccaaatgccgtggtgacgctagagaactggcagtttgaagaatggggaagccaagtgaccgtagtctcatcagacatgagggaatgggtggctccagagaaagcagacatcattgtcagtgagcttctgggctcatttgctgacaatgaattgtcgcctgagtgcctggatggagcccagcacttcctaaaagatgatggtgtgagcatccccggggagtacacttcctttctggctcccatctcttcctccaagctgtacaatgaggtccgagcctgtagggagaaggaccgtgaccctgaggcccagtttgagatgccttatgtggtacggctgcacaacttccaccagctctctgcaccccagccctgtttcaccttcagccatcccaacagagatcctatgattgacaacaaccgctattgcaccttggaatttcctgtggaggtgaacacagtactacatggctttgccggctactttgagactgtgctttatcaggacatcactctgagtatccgtccagagactcactctcctgggatgttctcatggtttcccatcctcttccctattaagcagcccataacggtacgtgaaggccaaaccatctgtgtgcgtttctggcgatgcagcaattccaagaaggtgtggtatgagtgggctgtgacagcaccagtctgttctgctattcataaccccacaggccgctcatataccattggcctctagccctgcgtgccaagtgtccagagccttggaagcagcttcaggttctgctcctgtagtacagaaggtgcagtacatctatgggctgtgattccccttgcccatcagagaggagcatttcaatctgctttcctgccttacatcaaggtgggcaagggattataattaattgcagggctcaagccaccaatctatgaagacctcaggccagggggtgaggaattagtgctggatttgaagctacgcactcagcctcaagaactccctggaatatccctgagaacatggggtttgaacggattttcagcctttttctgttcttgttttgatggttttgtgtaagaggaaatacaaataaagttatagccctttactgc

SEQ ID NO: 103018 - DNA, 1731 bp, Artificial Sequence
  derived and/or modified sequence
atgaggggccctaactccggcacagaaaaaggccggctagtgatacctgagaaacagggattcgacttcctctgcatgcccgtgtttcaccctagattcaagcgtgaattcatccaggagccggccaagaatcggcctggaccgcaaacgcggtcagatcttctgctctctgggcgcgccttcctgctgcctctgaatcaggaagacaataccaacctcgcgcgagtgcttactaatcacatccatactggtcaccattcctccatgttttggatgagagtcccattagtggcccccgaagacttgcgagacgacatcatagagaatgctccaaccacccacactgaggaatattccggcgaggaaaagacctggatgtggtggcacaacttcagaaccctgtgcgattatagcaaacgcattgcagtagcactggaaatcggcgcggatctaccatccaatcacgtaatcgaccggtggctgggggagcccatcaaggctgccatcttaccgacatcaatattcctcaccaataaaaaaggcttccctgtgttgagtaaaatgcaccagcgactgatctttcgcctgctcaaactggaggttcaattcattataacaggcactaatcatcactccgaaaaggagttctgcagctatttgcagtatctggagtacctctcccagaacagacctccacccaacgcctatgagctgttcgccaaaggctatgaagactatctacagtccccacttcagcctctaatggacaatctcgaaagccagacttatgaagtttttgaaaaagatcccattaagtattctcagtaccagcaggcaatttacaagtgtctcctggatagggtcccggaggaggagaaggacacgaacgttcaggtcctaatggtgctcggagctggacggggtccgctcgtcaacgcctctttgcgggcagccaaacaggcagacagacggatcaaactctacgccgtggagaaaaatcctaacgctgttgtgacgttggaaaactggcagtttgaagaatgggggagtcaggttacagtcgtcagcagcgatatgcgggagtgggtggcgccggaaaaggccgacattattgtctcagagttactggggagcttcgccgataacgaactgagccctgagtgtcttgatggcgcccaacatttcctcaaggacgatggcgtgagcattccaggagaatatacttcgtttttagcccccatatcgtcctccaagctctacaacgaagtgagggcgtgtagagaaaaggaccgggaccccgaggcccaatttgagatgccctacgtggtcaggttacataacttccatcaactatctgccccacagccttgcttcactttttctcacccaaacagagatcccatgatagacaacaacagatactgcactctagaatttcccgtcgaggttaatactgtcctccatggcttcgccggctattttgagactgttctgtatcaggacatcacgttgagcataaggccggagacacactcccctggtatgttctcttggttccccatcctattccccattaagcagcctattacagtccgcgaaggacagactatttgcgtgaggttctggcggtgtagcaattcaaagaaggtgtggtatgagtgggcggtgacagcgccagtctgctctgcgattcataacccaactggcaggtcatataccatcggcctgtag

SEQ ID NO: 103019 - DNA, 1731 bp, Artificial Sequence
  derived and/or modified sequence
atgaggggccccaacagcggcacagagaagggccgcctggtgattcctgagaagcagggctttgacttcctgtgcatgcctgtgttccacccccgcttcaagcgggagttcatccaggagcccgccaagaaccggcccggcccccagaccaggagtgacctgctgctgagcggccgggccttcctgctgcccctgaaccaggaggacaacaccaacctggcccgggtgctgaccaaccacatccacacaggccaccacagctccatgttctggatgagggtgcccctggtggcccctgaggacctgagagatgacatcattgaaaatgcccccaccacccacacagaggagtacagcggggaggagaagacctggatgtggtggcacaacttccgcaccctgtgtgactacagcaagagaattgctgtggccctggagattggagctgacctgcccagcaaccacgtgattgaccgctggctgggggagcccatcaaggccgccatcctgcccaccagcatcttcctgaccaacaagaagggcttccctgtgctgagcaagatgcaccagaggctcatcttccggctgctgaagctggaggtgcagttcatcatcaccggcaccaaccaccacagcgagaaggagttctgcagctacctgcagtacctggagtacctgagccagaacagacctcctccaaatgcctatgagctgtttgccaagggctatgaggactacctgcagagccccctgcagcccctgatggacaacctggagagccagacctatgaggtgtttgagaaggaccccatcaagtacagccagtaccagcaggccatctacaagtgcctgctggacagagtgcctgaggaggagaaggacaccaacgtgcaggtgctgatggtgctgggcgccggccggggccccctggtgaatgccagcctgcgggccgccaagcaggccgaccggcgcatcaagctgtatgctgtggagaagaaccccaatgctgtggtgaccctggagaactggcagtttgaggagtggggcagccaggtgacagtggtgtccagtgacatgagggagtgggtggcccctgagaaggctgacatcatcgtgtctgagctgctgggcagctttgctgacaatgagctgagcccagaatgtctggatggagcccagcacttcctgaaggatgatggagtgtccatccctggagagtacaccagcttcctggcccccatcagcagcagcaagctgtacaatgaggtgcgggcctgccgggagaaggaccgggaccctgaggcccagtttgagatgccctacgtggtgcggctgcacaacttccaccagctgagcgccccccagccctgcttcaccttcagccaccccaacagagaccccatgattgacaacaaccgctactgcaccctggagttccctgtggaggtgaacacagtgctgcacggctttgctggctactttgagaccgtgctgtaccaggacatcaccctgagcatccggcctgagacccacagccctggcatgttctcctggttccccatcctcttccccatcaagcagcccatcaccgtgcgggagggccagaccatctgtgtgcgcttctggcgctgcagcaacagcaagaaggtgtggtatgagtgggccgtgacagcccctgtgtgcagcgccatccacaaccccaccggccgcagctacaccatcggcctgtag

SEQ ID NO: 103020 - DNA, 1731 bp, Artificial Sequence
  derived and/or modified sequence
atgcggggccccaacagcggcaccgagaagggccggctggtgatcccggaaaagcagggtttcgatttcttgtgtatgccagtgtttcacccacggtttaaacgtgagtttatacaggagcctgccaaaaatcgcccaggaccccagactcgatccgatttgctacttagcgggcgcgcgttcttgctccctctcaatcaggaagacaacaccaatctggcacgtgtgctgacgaaccacatccacactgggcatcactcctctatgttttggatgagggtgcctctggtggcaccagaggatctccgcgacgacattatagagaacgcccctaccacacacaccgaggagtatagtggggaggaaaagacttggatgtggtggcacaatttccgcacactttgtgactactcgaagcggatcgcggtggcactggagatcggtgccgatctgccctccaaccatgtcatagaccgctggctgggcgagccaataaaagccgccatcctgccgacaagtattttcctgactaacaagaaagggtttcctgtgctgtccaagatgcaccagcgcttgatcttccgactccttaagctcgaggtgcagttcataatcacaggtacaaaccatcattcagagaaggaattctgttcgtatctgcagtaccttgaatacctgtcccaaaaccgtccacctcccaatgcatatgaactcttcgccaagggctacgaagactacctccagtcacccttacagccattaatggataatctagagagccagacttatgaagtgttcgaaaaagaccccattaagtatagtcagtatcagcaggctatctacaagtgtttactggacagagtcccggaggaggaaaaagacacaaatgtccaagtgctaatggtgctcggtgccgggagaggtccgctggtaaacgcttctctgagagccgccaaacaggccgatagacggatcaagctctatgccgtcgagaagaacccgaacgctgtcgtaaccttggagaactggcagttcgaggagtgggggtctcaggtgaccgtggtgagcagtgacatgcgcgagtgggtcgcacccgaaaaagcagacattatcgtgtccgagctgcttggttcattcgccgacaacgaattgtcgccagagtgtctggacggtgcccagcacttcctgaaggatgatggtgtttctatacctggggagtacacaagctttctggcacctatttccagttcaaagctctacaacgaagtgcgcgcttgccgtgagaaagatcgcgatcccgaggcccagttcgagatgccctacgtggtgcgcctgcacaactttcaccagctaagcgcccctcagccttgtttcaccttctcacatccaaatagggacccaatgatcgacaataataggtactgcaccctcgaattcccggtggaggtcaataccgtgctccatggcttcgcaggctatttcgagaccgtgctctatcaggacattacgctgagtataagacccgagacacacagcccgggtatgttctcatggtttcccattctcttcccgatcaagcagccaattaccgttcgcgagggacaaactatatgcgtgaggttctggaggtgcagcaattctaagaaggtgtggtatgagtgggctgtgaccgcccccgtatgtagtgctatccataatcctaccgggagaagctacacaattggcctatag

SEQ ID NO: 103021 - DNA, 1731 bp, Artificial Sequence
  derived and/or modified sequence
atgcgtggtcctaattctggaaccgaaaaggggagacttgtgattccagagaagcagggatttgatttcttgtgcatgccagtctttcatccacgctttaagagagagttcattcaggaacctgccaagaaccggcctgggcctcagacacgatctgatctcctgctgtctggccgtgcttttctcctccccctcaaccaggaggataacacaaatctggcgcgtgttctcacaaaccacattcataccggccaccatagtagtatgttttggatgcgagtaccactggtggccccagaagatctgagagacgacataatagaaaacgcccctacgacacacactgaagaatatagcggcgaggagaagacgtggatgtggtggcataactttcggactctgtgtgactactccaaacgaattgccgttgctctagagataggcgcagatctaccttctaaccatgtaatcgatcgatggctcggggagccaattaaagccgctatcttacccacttctatttttctgacaaataagaaggggttccctgttctctccaagatgcatcagcgcctgatcttccgtctcctgaaactggaggtgcaattcatcatcacggggactaatcaccatagcgagaaggaattctgttcatacttgcagtacctggaatacctgagccagaaccgccctccccctaatgcttatgagctgttcgcaaaaggttacgaagactatttgcaatctcccttacagcctctcatggataacctagagtcccagacttacgaagtatttgagaaagatccgataaagtactctcaataccagcaggcaatatataaatgcctgttggatcgcgtgcctgaggaggagaaagacaccaatgtgcaggtcctcatggtactgggcgcaggccgaggacccctggttaatgccagccttagagcggctaagcaggccgacaggcgcatcaagctgtatgctgtcgagaaaaaccccaacgcagtagtgactctcgaaaactggcagtttgaagaatggggaagccaggtcacagtggtctcatcggatatgcgagagtgggtcgctccggagaaggctgatatcattgtcagcgaattgctgggttcattcgcagataatgagctcagtcctgaatgcctcgacggagcccagcatttcttaaaggacgatggagtgtctatccctggggaatataccagctttctggccccaatttccagtagcaagctgtacaatgaagtgagggcatgccgcgagaaggatagagatcccgaagctcagtttgagatgccttatgtggtgagactgcacaatttccaccaactttcggccccacagccctgtttcacttttagtcatcccaatagggatcctatgatcgataataatagatactgtacgctcgagtttcccgtggaagtcaatactgtgctgcacggcttcgcagggtatttcgagaccgtgctgtaccaggatataacgctgagtattcggccagaaactcattctcctggtatgttttcctggttccctatcctgttcccaatcaaacagccaatcaccgtccgagagggtcagacaatttgtgtgaggttttggcggtgtagcaactctaaaaaggtgtggtacgagtgggcggtgaccgcccctgtgtgctctgctattcacaaccccactgggaggtcctacacaatcggcttgtag

SEQ ID NO: 103022 - DNA, 1731 bp, Artificial Sequence
  derived and/or modified sequence
atgagaggccccaacagcggcaccgagaagggcagactggtgatccccgagaagcagggcttcgacttcctgtgcatgcccgtgttccaccccagattcaagagagagttcatccaggagcccgccaagaacagacccggcccccagaccagaagcgacctgctgctgagcggcagagccttcctgctgcccctgaaccaggaggacaacaccaacctggccagagtgctgaccaaccacatccacaccggccaccacagcagcatgttctggatgagagtgcccctggtggcccccgaggacctgagagacgacatcatcgagaacgcccccaccacccacaccgaggagtacagcggcgaggagaagacctggatgtggtggcacaacttcagaaccctgtgcgactacagcaagagaatcgccgtggccctggagatcggcgccgacctgcccagcaaccacgtgatcgacagatggctgggcgagcccatcaaggccgccatcctgcccaccagcatcttcctgaccaacaagaagggcttccccgtgctgagcaagatgcaccagagactgatcttcagactgctgaagctggaggtgcagttcatcatcaccggcaccaaccaccacagcgagaaggagttctgcagctacctgcagtacctggagtacctgagccagaacagacccccccccaacgcctacgagctgttcgccaagggctacgaggactacctgcagagccccctgcagcccctgatggacaacctggagagccagacctacgaggtgttcgagaaggaccccatcaagtacagccagtaccagcaggccatctacaagtgcctgctggacagagtgcccgaggaggagaaggacaccaacgtgcaggtgctgatggtgctgggcgccggcagaggccccctggtgaacgccagcctgagagccgccaagcaggccgacagaagaatcaagctgtacgccgtggagaagaaccccaacgccgtggtgaccctggagaactggcagttcgaggagtggggcagccaggtgaccgtggtgagcagcgacatgagagagtgggtggcccccgagaaggccgacatcatcgtgagcgagctgctgggcagcttcgccgacaacgagctgagccccgagtgcctggacggcgcccagcacttcctgaaggacgacggcgtgagcatccccggcgagtacaccagcttcctggcccccatcagcagcagcaagctgtacaacgaggtgagagcctgcagagagaaggacagagaccccgaggcccagttcgagatgccctacgtggtgagactgcacaacttccaccagctgagcgccccccagccctgcttcaccttcagccaccccaacagagaccccatgatcgacaacaacagatactgcaccctggagttccccgtggaggtgaacaccgtgctgcacggcttcgccggctacttcgagaccgtgctgtaccaggacatcaccctgagcatcagacccgagacccacagccccggcatgttcagctggttccccatcctgttccccatcaagcagcccatcaccgtgagagagggccagaccatctgcgtgagattctggagatgcagcaacagcaagaaggtgtggtacgagtgggccgtgaccgcccccgtgtgcagcgccatccacaaccccaccggcagaagctacaccatcggcctgtag

SEQ ID NO: 103023 - DNA, 1596 bp, Artificial Sequence
  derived and/or modified sequence
atgctgcaggagctgaacttcggcgcctacctgggcctgcccgccttcctgctgcccctgaaccaggaggacaacaccaacctggccagagtgctgaccaaccacatccacaccggccaccacagcagcatgttctggatgagagtgcccctggtggcccccgaggacctgagagacgacatcatcgagaacgcccccaccacccacaccgaggagtacagcggcgaggagaagacctggatgtggtggcacaacttcagaaccctgtgcgactacagcaagagaatcgccgtggccctggagatcggcgccgacctgcccagcaaccacgtgatcgacagatggctgggcgagcccatcaaggccgccatcctgcccaccagcatcttcctgaccaacaagaagggcttccccgtgctgagcaagatgcaccagagactgatcttcagactgctgaagctggaggtgcagttcatcatcaccggcaccaaccaccacagcgagaaggagttctgcagctacctgcagtacctggagtacctgagccagaacagacccccccccaacgcctacgagctgttcgccaagggctacgaggactacctgcagagccccctgcagcccctgatggacaacctggagagccagacctacgaggtgttcgagaaggaccccatcaagtacagccagtaccagcaggccatctacaagtgcctgctggacagagtgcccgaggaggagaaggacaccaacgtgcaggtgctgatggtgctgggcgccggcagaggccccctggtgaacgccagcctgagagccgccaagcaggccgacagaagaatcaagctgtacgccgtggagaagaaccccaacgccgtggtgaccctggagaactggcagttcgaggagtggggcagccaggtgaccgtggtgagcagcgacatgagagagtgggtggcccccgagaaggccgacatcatcgtgagcgagctgctgggcagcttcgccgacaacgagctgagccccgagtgcctggacggcgcccagcacttcctgaaggacgacggcgtgagcatccccggcgagtacaccagcttcctggcccccatcagcagcagcaagctgtacaacgaggtgagagcctgcagagagaaggacagagaccccgaggcccagttcgagatgccctacgtggtgagactgcacaacttccaccagctgagcgccccccagccctgcttcaccttcagccaccccaacagagaccccatgatcgacaacaacagatactgcaccctggagttccccgtggaggtgaacaccgtgctgcacggcttcgccggctacttcgagaccgtgctgtaccaggacatcaccctgagcatcagacccgagacccacagccccggcatgttcagctggttccccatcctgttccccatcaagcagcccatcaccgtgagagagggccagaccatctgcgtgagattctggagatgcagcaacagcaagaaggtgtggtacgagtgggccgtgaccgcccccgtgtgcagcgccatccacaaccccaccggcagaagctacaccatcggcctgtag

SEQ ID NO: 103024 - DNA, 1596 bp, Artificial Sequence
  derived and/or modified sequence
atgctccaggagctcaacttcggcgcctacctggggcttccagcattcctccttcccctgaatcaagaggacaatacaaacttggccagagtgctaactaatcatatacacaccggccaccatagctcgatgttctggatgagggtgcccctggtcgcacccgaagatttgagggatgacattatagaaaacgctccaactactcacacggaggaatattcgggagaagagaaaacgtggatgtggtggcataacttccggaccctatgcgactactcgaaaaggattgccgttgcactggaaatcggggctgatctgcctagcaaccacgtcattgacagatggctgggggaacctatcaaggcagccatcttaccaacttctatatttctgacaaataagaaaggttttcctgtgctgtccaaaatgcaccagcggctcatctttaggttgctgaagcttgaggttcaatttatcatcacaggcacaaatcaccacagcgaaaaggagttttgcagctatttacaatatctggaatacctaagccagaatagaccacctccaaacgcctatgagctttttgctaaggggtacgaggattatctgcagtccccgctgcagcctctgatggacaacctggaatcccagacctatgaggtctttgagaaagaccccattaaatactctcaatatcagcaggctatttacaaatgccttctcgatcgggtccctgaagaggagaaggacacaaatgtgcaggtactaatggttctgggcgcagggcgcggcccactggtcaacgcctccctccgggctgcgaaacaggccgacagacggattaaactctacgcggtagaaaagaaccccaacgccgtcgttactctggagaactggcagtttgaggagtgggggagtcaggtgacggtggtgtctagtgatatgagggaatgggtcgcacctgaaaaggccgatataattgttagtgaactgctggggtcctttgcagacaacgagctttcgcccgaatgtctcgatggcgcccagcacttcttgaaggacgacggcgtcagcatccctggcgagtatacgtccttcctcgcgcctatttccagttcaaaattatataatgaggtgcgtgcttgccgggaaaaagacagggaccctgaggcccagttcgagatgccgtacgtggtgagattgcacaacttccatcaactgagtgcccctcaaccctgcttcacctttagccatccgaaccgtgaccctatgattgacaataacagatactgtactctcgagtttcccgtcgaggtcaatacagtgctgcacggattcgccggatacttcgaaaccgtactgtatcaagatatcaccctgtccatcaggcctgagactcatagccccgggatgttcagctggttccctatcctcttcccaattaaacagccaataaccgttagggagggccagacaatatgcgttagattctggcggtgcagtaatagcaaaaaagtgtggtacgagtgggcagttacagctccagtctgcagcgccatacacaaccctacaggcaggtcctacacaatcggcctctag

SEQ ID NO: 103025 - DNA, 1596 bp, Artificial Sequence
  derived and/or modified sequence
atgctgcaggagctgaactttggagcctacctgggcctgcctgccttcctgctgcccctgaaccaggaggacaacaccaacctggcccgggtgctgaccaaccacatccacacaggccaccacagctccatgttctggatgagggtgcccctggtggcccctgaggacctgagagatgacatcattgaaaatgcccccaccacccacacagaggagtacagcggggaggagaagacctggatgtggtggcacaacttccgcaccctgtgtgactacagcaagagaattgctgtggccctggagatcggggctgacctgcccagcaaccacgtgattgaccgctggctgggggagcccatcaaggccgccatcctgcccaccagcatcttcctgaccaacaagaagggcttccctgtgctgagcaagatgcaccagaggctcatcttccggctgctgaagctggaggtgcagttcatcatcaccggcaccaaccaccacagcgagaaggagttctgcagctacctgcagtacctggagtacctgagccagaaccggcccccaccaaatgcctatgagctgtttgccaagggctatgaggactacctgcagagccccctgcagcccctgatggacaacctggagagccagacctatgaggtgtttgagaaggaccccatcaagtacagccagtaccagcaggccatctacaagtgcctgctggacagagtgcctgaggaggagaaggacaccaacgtgcaggtgctgatggtgctgggcgccggccggggccccctggtgaatgccagcctgcgggccgccaagcaggccgaccggcgcatcaagctgtatgctgtggagaagaaccccaatgctgtggtgaccctggagaactggcagtttgaggagtggggcagccaggtgacagtggtgtccagtgacatgagggagtgggtggcccctgagaaggctgacatcatcgtgtctgagctgctgggcagctttgctgacaatgagctgagccctgagtgcctggatggagcccagcacttcctgaaggatgatggagtgtccatccctggagagtacaccagcttcctggcccccatcagcagcagcaagctgtacaatgaggtgcgggcctgccgggagaaggaccgggaccctgaggcccagtttgagatgccctacgtggtgcggctgcacaacttccaccagctgagcgccccccagccctgcttcaccttcagccaccccaacagagaccccatgattgacaacaaccgctactgcaccctggagttccctgtggaggtgaacacagtgctgcacggctttgctggctactttgaaacagtgctgtaccaggacatcaccctgagcatccggcctgagacccacagccctggcatgttctcctggttccccatcctcttccccatcaagcagcccatcaccgtgcgggagggccagaccatctgtgtgcgcttctggcgctgcagcaacagcaagaaggtgtggtatgagtgggccgtgacagcccctgtgtgcagcgccatccacaaccccaccggccgcagctacaccatcggcctgtag

SEQ ID NO: 103026 - DNA, 1596 bp, Artificial Sequence
  derived and/or modified sequence
atgctgcaggagctgaacttcggcgcctacctgggcctgcccgccttcctgcttccgttgaatcaggaggacaataccaacctggcccgggtgctgaccaatcacatccacacgggccaccattcgtccatgttttggatgagagtgccgctggttgctcctgaggacctgagggatgacattattgagaacgcccccactacccacactgaagagtactccggtgaggagaaaacctggatgtggtggcataacttccgcaccctgtgtgactacagcaaacgtatcgccgtggccctggaaattggggccgatctcccctctaatcacgttatagacaggtggctcggcgagcctatcaaggctgccatccttcccacttccatctttctgacaaacaaaaaaggattccccgtgctttcgaaaatgcaccagcggttgatcttcaggctgcttaaactggaagttcagttcattattaccggaaccaatcatcactccgagaaggaattttgttcctatctgcaatatctcgagtacctcagccagaatagacctccccccaatgcgtatgagctgtttgcaaagggctatgaagattatctgcagagcccattgcagccactgatggacaaccttgaatcacaaacctacgaggttttcgagaaagatcctatcaaatattcacaataccagcaggccatttataaatgcctgctggaccgggttccggaagaggaaaaggatacgaacgtgcaggtgctcatggtcctgggagcagggcgtggacctttggtgaacgcgtccttaagagcagcgaaacaggccgatagaagaattaagctgtatgcggtggagaaaaatcctaacgcagtagtcacactcgagaactggcaatttgaagagtggggatcccaggttaccgtcgtctcatccgatatgagggagtgggtcgctcctgagaaggccgatatcattgtttccgagttgttgggaagctttgccgacaatgaacttagtcctgagtgcctggatggagcacagcacttccttaaagatgacggagtttccatccccggcgaatatacatcattcctggctcctataagcagcagcaagttatacaacgaagtgcgggcgtgtagggagaaagaccgggatccggaagctcagttcgagatgccatatgtggtgagacttcacaacttccaccagctgtcagcgccacaaccctgttttacgttctctcatcctaaccgggacccaatgatcgataacaaccgttattgtactctggaatttcccgtggaagtaaacaccgtcctgcatggtttcgcaggctactttgaaaccgtactctatcaggatatcactctgagcattcgacccgaaactcacagcccgggaatgttcagctggttcccaatcctcttcccgatcaagcagcccatcaccgtgcgagaaggccagactatttgtgtccgcttttggcggtgctccaacagcaaaaaggtgtggtacgagtgggccgtcaccgcgcccgtgtgctcagcgatccacaaccccacaggccggagctacaccatcggcttatag

SEQ ID NO: 103027 - DNA, 1596 bp, Artificial Sequence
  derived and/or modified sequence
atgcttcaagaactcaatttcggagcctatcttggcctccctgccttcctgctccccctgaatcaggaagacaatacaaatctcgctcgggtgctgactaatcatattcacaccggtcaccactcatccatgttctggatgagggtcccactggttgcccctgaggaccttcgggacgacatcatcgaaaatgcgcctacgactcataccgaggagtacagcggtgaggagaaaacctggatgtggtggcacaactttcggactctgtgtgactattctaagagaatcgccgtggctctcgaaatcggtgctgacctccctagcaaccatgtgattgacagatggctgggggaaccaatcaaggccgctatattgccgaccagcatatttctcacgaataaaaaggggttccccgtgttatctaagatgcatcagcgactcatcttcagactgcttaagttagaagttcagtttatcattacagggaccaatcatcattcagagaaggaattctgtagctatttgcagtatctggagtacctgtcccagaacaggcctcccccaaatgcttatgaactgttcgcaaagggctacgaggactacttgcagtcgccactgcagcctttgatggacaacctagagtcccaaacatatgaggtttttgaaaaggatcctattaagtatagtcaatatcaacaagccatatacaagtgccttttagaccgagtaccagaggaggagaaggacaccaatgtacaagtgctcatggtgctgggggctggaagggggcctcttgttaatgccagtctgagggccgcaaaacaggcagacagaagaataaaactgtacgccgtggagaaaaacccaaacgccgtagtaacgttggaaaactggcagttcgaagagtggggatctcaggtgactgtggtatcaagcgatatgagagaatgggttgcccctgaaaaggcggacatcatagtgtcagagcttctgggatcattcgccgacaatgagttaagtccagagtgccttgatggcgcacagcactttcttaaggacgatggcgtgtcaatcccaggagaatacacaagttttcttgccccaatatcctccagcaagttgtacaacgaggtgagggcttgtcgcgaaaaagacagagaccctgaggcccagtttgaaatgccttacgtcgtgcgactgcacaattttcaccaactctctgctccacaaccttgctttaccttctcacatcctaacagggatcccatgatcgacaataaccggtattgtacacttgaattccctgttgaagttaacactgtgctgcacggtttcgctggatactttgagaccgtcctctaccaggacataaccctgtccatacggcctgagacacactcccccggaatgtttagctggttccccatcctgttcccaatcaagcagcccatcacggtgagagagggccaaacaatatgcgtgaggttctggaggtgctccaattccaagaaagtgtggtacgagtgggcggttacggcacccgtatgtagtgccattcataatcctacaggtaggtcctacactatcggactgtag

SEQ ID NO: 103028 - protein, 466 aa, Artificial Sequence
  derived and/or modified sequence
MRGPNSGTEKGRLVIPEKQGFDFLCMPVFHPRFKREFIQEPAKNRPGPQTRSDLLLSGRDWNTLIVGKLSPWIRPDSKVEKIRRNSEALEVQFIITGTNHHSEKEFCSYLQYLEYLSQNRPPPNAYELFAKGYEDYLQSPLQPLMDNLESQTYEVFEKDPIKYSQYQQAIYKCLLDRVPEEEKDTNVQVLMVLGAGRGPLVNASLRAAKQADRRIKLYAVEKNPNAVVTLENWQFEEWGSQVTVVSSDMREWVAPEKADIIVSELLGSFADNELSPECLDGAQHFLKDDGVSIPGEYTSFLAPISSSKLYNEVRACREKDRDPEAQFEMPYVVRLHNFHQLSAPQPCFTFSHPNRDPMIDNNRYCTLEFPVEVNTVLHGFAGYFETVLYQDITLSIRPETHSPGMFSWFPILFPIKQPITVREGQTICVRFWRCSNSKKVWYEWAVTAPVCSAIHNPTGRSYTIGL

SEQ ID NO: 103029 - DNA, 1401 bp, Artificial Sequence
  derived and/or modified sequence
atgagaggccccaacagcggcaccgagaagggcagactggtgatccccgagaagcagggcttcgacttcctgtgcatgcccgtgttccaccccagattcaagagagagttcatccaggagcccgccaagaacagacccggcccccagaccagaagcgacctgctgctgagcggcagagactggaacaccctgatcgtgggcaagctgagcccctggatcagacccgacagcaaggtggagaagatcagaagaaacagcgaggccctggaggtgcagttcatcatcaccggcaccaaccaccacagcgagaaggagttctgcagctacctgcagtacctggagtacctgagccagaacagacccccccccaacgcctacgagctgttcgccaagggctacgaggactacctgcagagccccctgcagcccctgatggacaacctggagagccagacctacgaggtgttcgagaaggaccccatcaagtacagccagtaccagcaggccatctacaagtgcctgctggacagagtgcccgaggaggagaaggacaccaacgtgcaggtgctgatggtgctgggcgccggcagaggccccctggtgaacgccagcctgagagccgccaagcaggccgacagaagaatcaagctgtacgccgtggagaagaaccccaacgccgtggtgaccctggagaactggcagttcgaggagtggggcagccaggtgaccgtggtgagcagcgacatgagagagtgggtggcccccgagaaggccgacatcatcgtgagcgagctgctgggcagcttcgccgacaacgagctgagccccgagtgcctggacggcgcccagcacttcctgaaggacgacggcgtgagcatccccggcgagtacaccagcttcctggcccccatcagcagcagcaagctgtacaacgaggtgagagcctgcagagagaaggacagagaccccgaggcccagttcgagatgccctacgtggtgagactgcacaacttccaccagctgagcgccccccagccctgcttcaccttcagccaccccaacagagaccccatgatcgacaacaacagatactgcaccctggagttccccgtggaggtgaacaccgtgctgcacggcttcgccggctacttcgagaccgtgctgtaccaggacatcaccctgagcatcagacccgagacccacagccccggcatgttcagctggttccccatcctgttccccatcaagcagcccatcaccgtgagagagggccagaccatctgcgtgagattctggagatgcagcaacagcaagaaggtgtggtacgagtgggccgtgaccgcccccgtgtgcagcgccatccacaaccccaccggcagaagctacaccatcggcctgtag

SEQ ID NO: 103030 - DNA, 1401 bp, Artificial Sequence
  derived and/or modified sequence
atgcgaggccctaactctggcaccgaaaagggacggttggtcattccggagaagcaagggttcgactttctttgcatgccggtgttccaccctaggtttaagcgagagtttatccaagagcccgctaaaaacaggcctggaccccaaaccagatccgacctgttgctctccggtcgtgattggaacacactgatagtgggaaaactgagtccatggatacgaccagatagcaaggtggaaaaaattcggagaaactccgaagccctcgaggtgcaatttattatcaccggcaccaatcatcacagtgaaaaagaattttgcagttacttgcaatatctggagtacttgtcgcagaatcgccctccgcccaacgcctatgagttatttgccaaaggctacgaagactacctgcagtctccactccagcctctcatggacaacctagagtcgcagacttatgaggtcttcgagaaagaccctatcaagtactcacagtaccaacaagccatttacaagtgtctccttgaccgagtgcctgaggaagagaaggacactaacgtgcaggtgctaatggtacttggggcggggagagggcccctggtgaatgcctccctaagggctgccaagcaggcggatcgccgcatcaagctgtacgcagtggaaaagaatccaaatgccgttgttacccttgaaaattggcaatttgaggagtggggcagtcaagtcaccgttgtgtcatcagatatgagggagtgggttgctcctgagaaggcagacatcatcgtgtcagagctgctagggagctttgcagataacgagctgtctccagagtgtctggatggggctcagcactttctcaaggatgacggcgttagcatcccgggcgagtatacctcctttcttgctccaatttcgagcagtaaattgtataacgaagttcgagcctgcagggagaaggaccgggaccctgaagctcagttcgaaatgccctatgtggtcagattgcataatttccaccagttgagcgcgccacaaccttgttttacgttctctcatcctaacagggacccaatgatcgataataacaggtattgcacactggaatttccggtggaagtgaacacagtgctccatgggttcgcaggatatttcgaaaccgtcttgtaccaagatatcaccttatccattcgccccgaaactcattctcctgggatgtttagttggtttccaatcctgtttcctattaagcagccaattactgtgagggagggtcagacaatttgcgtgaggttttggcgatgctccaattccaagaaggtctggtatgagtgggctgtaaccgccccagtgtgtagtgctatacacaatccaacaggacggtcctacaccatcggcctgtag

SEQ ID NO: 103031 - DNA, 1401 bp, Artificial Sequence
  derived and/or modified sequence
atgaggggccccaacagcggcacagagaagggccgcctggtgattcctgagaagcagggctttgacttcctgtgcatgcctgtgttccacccccgcttcaagcgggagttcatccaggagcccgccaagaaccggcccggcccccagaccaggagtgacctgctgctgagcggccgggactggaacaccctgattgtgggcaagctgagcccctggatccggccagacagcaaggtggagaagatcagaagaaacagcgaggccctggaggtgcagttcatcatcaccggcaccaaccaccacagcgagaaggagttctgcagctacctgcagtacctggagtacctgagccagaacagacctcctccaaatgcctatgagctgtttgccaagggctatgaggactacctgcagagccccctgcagcccctgatggacaacctggagagccagacctatgaggtgtttgagaaggaccccatcaagtacagccagtaccagcaggccatctacaagtgcctgctggacagagtgcctgaggaggagaaggacaccaacgtgcaggtgctgatggtgctgggcgccggccggggccccctggtgaatgccagcctgcgggccgccaagcaggccgaccggcgcatcaagctgtatgctgtggagaagaaccccaatgctgtggtgaccctggagaactggcagtttgaggagtggggcagccaggtgacagtggtgtccagtgacatgagggagtgggtggcccctgagaaggctgacatcatcgtgtctgagctgctgggcagctttgctgacaatgagctgagcccagaatgtctggatggagcccagcacttcctgaaggatgatggagtgtccatccctggagagtacaccagcttcctggcccccatcagcagcagcaagctgtacaatgaggtgcgggcctgccgggagaaggaccgggaccctgaggcccagtttgagatgccctacgtggtgcggctgcacaacttccaccagctgagcgccccccagccctgcttcaccttcagccaccccaacagagaccccatgattgacaacaaccgctactgcaccctggagttccctgtggaggtgaacacagtgctgcacggctttgctggctactttgagaccgtgctgtaccaggacatcaccctgagcatccggcctgagacccacagccctggcatgttctcctggttccccatcctcttccccatcaagcagcccatcaccgtgcgggagggccagaccatctgtgtgcgcttctggcgctgcagcaacagcaagaaggtgtggtatgagtgggccgtgacagcccctgtgtgcagcgccatccacaaccccaccggccgcagctacaccatcggcctgtag

SEQ ID NO: 103032 - DNA, 1907 bp, Artificial Sequence
  derived and/or modified sequence
ggcgatggcggtcgggggtgctggtgggagccgcgtgtccagcgggagggacctgaattgcgtccccgaaatagctgacacactaggggctgtggccaagcaggggtgagggccggacctccacgagcggaatgcggggtccgaactcggggacggagaagggcagactagtcatcccggagaagcaggggtttgatttcctctgcatgcctgtcttccatccgcgtttcaagagggagttcattcaggaacctgctaagaatcggcccggtccccagacacgatcagacctactgctgtcaggaagggactggaatacgctaattgtgggaaagctttctccatggattcgtccagactcaaaagtggagaagattcgcaggaactccgaggcgttggaggtgcagttcatcatcacaggcaccaaccaccactcagagaaggagttctgctcctacctccaatacctggaatacttaagccagaaccgtcctccacctaatgcctatgaactctttgccaagggctatgaagactatctgcagtccccgcttcagccactgatggacaatctggaatctcagacatatgaagtgtttgaaaaggaccccatcaaatactctcagtaccagcaggccatctataaatgtctgctagaccgagtaccagaagaggagaaggataccaatgtccaggtactgatggtgctgggagcaggacggggacccctggtgaacgcttccctgcgggcagccaagcaggccgaccggcggataaagctgtatgctgtggagaaaaacccaaatgccgtggtgacgctagagaactggcagtttgaagaatggggaagccaagtgaccgtagtctcatcagacatgagggaatgggtggctccagagaaagcagacatcattgtcagtgagcttctgggctcatttgctgacaatgaattgtcgcctgagtgcctggatggagcccagcacttcctaaaagatgatggtgtgagcatccccggggagtacacttcctttctggctcccatctcttcctccaagctgtacaatgaggtccgagcctgtagggagaaggaccgtgaccctgaggcccagtttgagatgccttatgtggtacggctgcacaacttccaccagctctctgcaccccagccctgtttcaccttcagccatcccaacagagatcctatgattgacaacaaccgctattgcaccttggaatttcctgtggaggtgaacacagtactacatggctttgccggctactttgagactgtgctttatcaggacatcactctgagtatccgtccagagactcactctcctgggatgttctcatggtttcccatcctcttccctattaagcagcccataacggtacgtgaaggccaaaccatctgtgtgcgtttctggcgatgcagcaattccaagaaggtgtggtatgagtgggctgtgacagcaccagtctgttctgctattcataaccccacaggccgctcatataccattggcctctagccctgcgtgccaagtgtccagagccttggaagcagcttcaggttctgctcctgtagtacagaaggtgcagtacatctatgggctgtgattccccttgcccatcagagaggagcatttcaatctgctttcctgccttacatcaaggtgggcaagggattataattaattgcagggctcaagccaccaatctatgaagacctcaggccagggggtgaggaattagtgctggatttgaagctacgcactcagcctcaagaactccctggaatatccctgagaacatggggtttgaacggattttcagcctttttctgttcttgttttgatggttttgtgtaagaggaaatacaaataaagttatagccctttactgca

SEQ ID NO: 103033 - DNA, 1401 bp, Artificial Sequence
  derived and/or modified sequence
atgcggggccccaacagcggcaccgagaagggccggctggtgatccccgagaaacagggattcgattttctctgtatgcccgtgttccatcctcggtttaaacgggaattcatccaggaacctgcgaaaaatcgccccggtcctcaaacaaggtcagatctgcttttgtccggacgggattggaatactctcatcgttggtaagctgagtccctggatccgtcccgattccaaggtggagaagattcggagaaacagtgaggcactggaagtacagtttattattacgggcacaaatcaccactccgagaaggagttctgcagctatttacagtacttagagtacctatctcaaaataggccacctcctaacgcttacgaactgttcgccaaggggtacgaggactatttacaatccccgctgcagcccctgatggacaaccttgagagtcaaacttacgaggtgttcgagaaagaccctatcaaatattctcagtaccagcaggccatttataaatgtctgctggaccgagtcccggaagaggagaaagataccaacgtgcaagtgctgatggtgcttggggccggcagaggtcccctcgttaatgcgtccctccgcgctgcaaagcaggccgatagacgcattaaattatatgctgtagaaaaaaatcctaacgccgtcgttacgctagagaattggcaattcgaagaatggggatctcaggtcaccgtagtttccagtgacatgcgcgagtgggttgcacccgagaaggccgacatcattgtaagtgagttgctgggaagtttcgcggacaatgagttgtccccagaatgccttgacggcgcacagcactttctgaaggacgatggagtgtctattccaggagaatataccagctttctagctccaatctccagttccaagctgtacaacgaggtaagagcctgccgagagaaggacagggaccccgaggctcagttcgagatgccttatgtcgtgaggctgcataactttcatcagctgtcggcgcctcagccatgcttcacatttagccatccgaatcgggatccgatgattgataataacaggtattgtacactggagtttcctgtcgaggtaaacactgtcttacacggttttgccggatatttcgaaacggtgctttaccaggacatcacattgagcattcgcccagagacccactcaccaggcatgttctcttggtttccaatcttatttccgatcaagcagcccattaccgtccgggaagggcagacgatctgcgtcaggttctggcgatgcagcaattccaagaaagtgtggtatgagtgggcagtgaccgcgcctgtgtgttccgccatccacaacccaacagggaggtcctacacgattggtctctag

SEQ ID NO: 103034 - DNA, 1401 bp, Artificial Sequence
  derived and/or modified sequence
atgcgaggacctaacagcggtaccgaaaagggaagacttgtaattccagaaaagcaggggttcgactttctttgtatgccagtgttccaccctagatttaagcgggaatttatccaggagccagccaagaaccgcccaggtccacagactcgatctgacctgttgctgagcggcagggactggaatacgctgatagtcggcaagctgtcgccttggattaggcccgactccaaggttgagaaaataagacggaattctgaagccctggaggttcagtttattatcacgggaaccaatcatcactccgagaaggagttttgctcctacctgcaatatctggagtacttaagtcagaaccggcctccacccaacgcttacgagttgttcgccaaagggtacgaagattatttacaatcccctttgcagcccctgatggataacctcgaatcgcagacttacgaggtgttcgagaaagatccaattaagtactcacagtaccaacaggcaatctacaaatgcttgcttgacagagttcccgaggaggagaaggatactaatgtccaggtgctgatggtgctcggcgcaggccgtggccctctcgtcaatgcctcactacgagcagcaaagcaagctgaccggaggattaaattgtatgccgtggagaagaaccccaatgccgttgtaaccctcgagaactggcaatttgaggagtggggtagtcaggttacggtggtcagctctgatatgagagaatgggtggctccggagaaggcggacattatcgtgagtgagctgctcgggagcttcgctgacaacgagctctcccccgagtgtctggacggggcacaacactttctcaaagacgatggagtcagcatccccggagaatacaccagctttctggcccctatctcatcaagcaagctctataatgaagtgcgcgcatgtagggaaaaagaccgagaccctgaggcacagtttgagatgccctacgtggtgcgacttcataatttccaccaactcagcgcccctcaaccttgttttacattctcacacccaaatcgggatccaatgatagataacaataggtattgtactctggagttccccgtggaggtgaacaccgtacttcatggattcgccggttactttgagaccgtcctgtatcaagatatcacactgagcatacgcccagagactcactcccccggaatgttttcatggtttcccatactttttccaatcaagcagccaatcacagtgagagagggacaaacaatctgtgtgcgattttggagatgcagtaatagcaaaaaagtctggtatgaatgggcagtgactgccccagtctgtagtgcgattcacaacccaacaggccgatcatataccatcgggctctag

SEQ ID NO: 103035 - protein, 284 aa, Artificial Sequence
  derived and/or modified sequence
MPEARSSGPDLTRWRKQQQPVRRTVSQVCPPPRRPLTVADIRSGMENERLGVVRDSMFQNPLIVKAELGKPRERSYSLPGINFNYGLYIRGLDGGVPEAIGRWNVFKQQPTCPHELTRNYIAMNRGAVKAGLVTARENLLYRQLNDIRISDQDDRRMKKEPPPLPPNMTFGIRARPSTPFFDLLQHRYLQLWVQEQKATQKAIKLEKKQKVVLGKLYETRSSQLRKYKPPVKLDTLWHMPHFQKVGRHLDTFPTEADRQRALKAHREECAVRQGTLRMGNYTHP

SEQ ID NO: 103036 - DNA, 855 bp, Artificial Sequence
  derived and/or modified sequence
atgcccgaggccagaagcagcggccccgacctgaccagatggagaaagcagcagcagcccgtgagaagaaccgtgagccaggtgtgccccccccccagaagacccctgaccgtggccgacatcagaagcggcatggagaacgagagactgggcgtggtgagagacagcatgttccagaaccccctgatcgtgaaggccgagctgggcaagcccagagagagaagctacagcctgcccggcatcaacttcaactacggcctgtacatcagaggcctggacggcggcgtgcccgaggccatcggcagatggaacgtgttcaagcagcagcccacctgcccccacgagctgaccagaaactacatcgccatgaacagaggcgccgtgaaggccggcctggtgaccgccagagagaacctgctgtacagacagctgaacgacatcagaatcagcgaccaggacgacagaagaatgaagaaggagcccccccccctgccccccaacatgaccttcggcatcagagccagacccagcacccccttcttcgacctgctgcagcacagatacctgcagctgtgggtgcaggagcagaaggccacccagaaggccatcaagctggagaagaagcagaaggtggtgctgggcaagctgtacgagaccagaagcagccagctgagaaagtacaagccccccgtgaagctggacaccctgtggcacatgccccacttccagaaggtgggcagacacctggacaccttccccaccgaggccgacagacagagagccctgaaggcccacagagaggagtgcgccgtgagacagggcaccctgagaatgggcaactacacccacccctag

SEQ ID NO: 103037 - DNA, 1638 bp, Artificial Sequence
  derived and/or modified sequence
gcgcccaaaccagcccgcgggccggctccccggcgacctcaaggatgccagaggccaggagctccggcccggacctcacgcgatggaggaagcagcagcagcctgtgcgccgcacggtcagccaggtctgcccgcccccgcggcggcccctgaccgtggcggacatccgttccggcatggagaacgagcggctgggggtcgtgcgggactccatgtttcagaaccctctcatcgtcaaggctgaactcggcaagccccgggaaagaagctacagtctgcccggcattaattttaattatggactctacatccgagggcttgacggaggagtccctgaagccatcggacgctggaacgtgttcaagcagcagcccacctgcccccacgagctgacccggaattatatcgcaatgaaccgcggggcggtgaaagccggcctggtgactgcccgggagaacttgctctaccgtcagctcaatgacatccgcatcagtgaccaggatgaccggcgcatgaagaaagagccgccccctctccctccaaacatgacatttgggatccgggcacggccttccacacccttctttgatctgctgcagcaccggtacctgcagctgtgggtacaggaacaaaaggccacccagaaagccatcaaactggagaagaagcagaaggtggtccttgggaagctgtatgagacccggagcagtcagctgaggaagtacaagccgcccgtgaagctggacaccctctggcacatgcctcacttccagaaggtgggccgccaccttgatacgttccccacggaggccgatcgccagagagcattaaaagcccaccgggaagagtgtgccgtgcgccaggggaccctgcggatgggcaactacacccacccctagcccctccctcccctgccacaagaagccatcttgacatagtggaaaattcccagaaggactccctatcttgccccaaccctgacattcccccatttttatgcaggttctgcttcaaggagctcagattcaagtcttaggctaattgtttttggtaaaagtccccccttttaggttagccaacattagtctccacttagccccagtgaccctctacctggagcctcctcctctcctcctccttctcctcctagggcaggctcaccctgcctcttctcaagccctcacctgccaagacaagcccaaattacaagacaattttttagactccaggctaagggtcgattccatggctctgcccattaagtgttaagaacgacctgtgtatttgctgcagaaagcatgacagtgacgtgctttgaaagccctcattttctattccaaacatgagttttaattgctctttttgggatgcctgatgtctcatcacggcagtattatctctctgggacctctgacagcaggaagagccaatggttcattactcgagcctgcccccgcctcctcagtgctggggccccgtcaatcaagcaggccaagttggactcctcccccaggactgactttggaaggtcaacccactctggaaaaagccttccaggccagcgggtagactgctgaacacaggctgctgagcttctcagccgaattcctggacacttcctcactcggtctttccgtg

SEQ ID NO: 103038 - DNA, 855 bp, Artificial Sequence
  derived and/or modified sequence
atgcctgaggctaggtccagcgggcccgacctgacaaggtggcgaaagcagcaacagcccgtcaggagaacagtttcccaagtatgtcccccgccccgccgccccctgaccgtggccgacattcggtcaggcatggagaacgaaagactgggcgtcgttcgggatagtatgtttcaaaaccctctgattgtgaaagccgagctgggaaagcctagggaacggtcgtatagcttgcctggaatcaatttcaattatggactgtacatccgtggccttgatgggggggttcctgaggccatagggaggtggaatgtttttaaacagcagcccacatgtccgcatgaactgacccgcaattacatcgctatgaaccgtggggccgtgaaagctggcctggtgacagctcgtgagaatttgctctacaggcagcttaatgatatccgcatctccgaccaagacgatcgtcgcatgaaaaaggaacctccccctctgccccctaatatgaccttcgggattagagcccggccgtctaccccctttttcgatctgctgcagcatcgatacctgcagttgtgggtacaggagcagaaagcaacccaaaaggccatcaagctcgagaagaagcagaaggtcgtgctgggaaagctatatgagacgcggtcatcgcagctaagaaaatacaagcctccagttaaactcgataccctatggcacatgccacactttcagaaagtcggccgtcatttggatacattccctactgaagcagaccgacagagagcgctgaaggcgcacagagaagaatgcgccgtgaggcagggcactctgcgcatggggaattacacacatccctag

SEQ ID NO: 103039 - DNA, 855 bp, Artificial Sequence
  derived and/or modified sequence
atgcctgaggcccggagcagcggccctgacctgacccgctggaggaagcagcagcagcctgtgcggaggacagtgtcccaggtgtgccccccaccaagaagacccctgactgtggccgacatccgcagcggcatggagaatgaaaggctgggcgtggtgcgggacagcatgttccagaaccccctgattgtgaaggccgagctgggcaagccccgggagaggagctacagcctgcccggcatcaacttcaactacggcctgtacatccggggcctggatggaggagtgcctgaggccatcggccgctggaatgtgttcaagcagcagcccacctgcccccatgagctgaccaggaactacatcgccatgaacagaggagctgtgaaggccggcctggtgacagcccgggagaacctgctgtaccggcagctgaatgacatccgcatcagtgaccaggatgacaggaggatgaagaaggagcccccacccctgccccccaacatgaccttcggcatccgggcccggcccagcacccccttctttgacctgctgcagcaccgctacctgcagctgtgggtgcaggagcagaaggccacccagaaggccatcaagctggagaagaagcagaaggtggtgctgggcaagctgtatgagaccaggagcagccagctgaggaagtacaagccccctgtgaagctggacaccctgtggcacatgccccacttccagaaggtgggccgccacctggacaccttccccacagaggccgaccggcagagggccctgaaggcccaccgggaggagtgtgctgtgcggcagggcaccctgaggatgggcaactacacccacccctag

SEQ ID NO: 103040 - DNA, 855 bp, Artificial Sequence
  derived and/or modified sequence
atgcccgaggcccggagcagcggccccgacctgacccggtggcggaagcagcagcaacccgtaagaaggaccgtatcccaggtgtgccccccaccacgcagacccctcacggtcgccgatatccgttccggaatggagaacgagaggttgggggtggttcgggattcaatgttccagaacccgctgatcgtaaaggccgaattgggcaagccccgggagagatcttactctttgccagggatcaactttaactacgggttatatatccggggccttgacgggggcgtgccagaggcaattggacgctggaatgtcttcaaacagcagcccacctgtccacacgagctcacgcgaaattatatcgccatgaaccgaggggctgtgaaggccggtctggtgacagcacgcgagaatcttctctatagacagctgaatgatatcaggatctctgaccaggacgacagacgcatgaagaaagaacccccccccctcccacctaatatgaccttcggcatcagggctcgcccatccacacccttctttgacctactgcagcaccggtacctgcagttgtgggtacaggagcaaaaggccacccagaaggctataaagcttgagaaaaagcagaaggtcgtgttgggtaagttgtatgaaactagatccagccagttaaggaaatataagccacccgtgaagctggataccctctggcacatgccccacttccagaaggttgggcgacacctggatacatttccaaccgaggcagatcgtcagcgagctctgaaagcgcaccgggaagaatgcgcagtccgacagggaaccttgaggatgggtaattacactcatccgtag

SEQ ID NO: 103041 - DNA, 855 bp, Artificial Sequence
  derived and/or modified sequence
atgcccgaggctcgcagtagtggtccagatctgaccagatggcggaaacagcaacagccggtgcggagaacagtttcacaagtttgccccccaccacgtcgacccctcacggtcgctgatattcggtccggcatggaaaatgaacgtctgggagtcgttcgggactcaatgttccagaatcctctaatcgttaaagccgagcttggaaaaccgcgagagcgcagttactccctgccagggatcaattttaactatggcctttacatccgaggcttggatggcggtgtaccagaggctatagggagatggaatgtgttcaaacaacagcccacttgtccccacgaacttacaaggaattatatcgccatgaacaggggggctgtgaaagcaggcctggtcacagccagggagaacctactgtacaggcaactgaatgacattaggatcagcgaccaagatgacagaagaatgaaaaaagaacctcctccgctgccacccaacatgaccttcgggattagagcacgcccttctacacctttcttcgatcttcttcagcatcgctacctgcaactctgggtccaagagcagaaagctacccagaaagctattaaactggaaaagaagcaaaaagtggtccttggcaaattgtatgaaactaggtcttcccagctgcgtaagtataagccaccagtgaaactggacaccctctggcacatgcctcattttcagaaggtcggccgtcaccttgatacatttcctaccgaagccgaccggcaaagggcgctcaaggctcaccgcgaggagtgtgctgtacgacaaggtacgctccgaatgggcaactacacccacccatag

SEQ ID NO: 103042 - protein, 1135 aa, Artificial Sequence
  derived and/or modified sequence
MAQFGGQKNPPWATQFTATAVSQPAALGVQQPSLLGASPTIYTQQTALAAAGLTTQTPANYQLTQTAALQQQAAAAAAALQQLQQPQQTLLTQPAVALPTSLSLSTPQPTAQITVSYPTPRSSQQQTQPQKQRVFTGVVTKLHDTFGFVDEDVFFQLSAVKGKTPQVGDRVLVEATYNPNMPFKWNAQRIQTLPNQNQSQTQPLLKTPPAVLQPIAPQTTFGVQTQPQPQSLLQAQISAASITPLLQTQPQPLLQQPQQKAGLLQPPVRIVSQPQPARRLDPPSRFSGRNDRGDQVPNRKDDRSRERERERRRSRERSPQRKRSRERSPRRERERSPRRVRRVVPRYTVQFSKFSLDCPSCDMMELRRRYQNLYIPSDFFDAQFTWVDAFPLSRPFQLGNYCNFYVMHREVESLEKNMAILDPPDADHLYSAKVMLMASPSMEDLYHKSCALAEDPQELRDGFQHPARLVKFLVGMKGKDEAMAIGGHWSPSLDGPDPEKDPSVLIKTAIRCCKALTGIDLSVCTQWYRFAEIRYHRPEETHKGRTVPAHVETVVLFFPDVWHCLPTRSEWETLSRGYKQQLVEKLQGERKEADGEQDEEEKDDGEAKEISTPTHWSKLDPKTMKVNDLRKELESRALSSKGLKSQLIARLTKQLKVEEQKEEQKELEKSEKEEDEDDDRKSEDDKEEEERKRQEEIERQRRERRYILPDEPAIIVHPNWAAKSGKFDCSIMSLSVLLDYRLEDNKEHSFEVSLFAELFNEMLQRDFGVRIYKSLLSLPEKEDKKEKDKKSKKDERKDKKEERDDETDEPKPKRRKSGDDKDKKEDRDERKKEDKRKDDSKDDDETEEDNNQDEYDPMEAEEAEDEEDDRDEEEMTKRDDKRDINRYCKERPSKDKEKEKTQMITINRDLLMAFVYFDQSHCGYLLEKDLEEILYTLGLHLSRAQVKKLLNKVVLRESCFYRKLTDTSKDEENHEESESLQEDMLGNRLLLPTPTVKQESKDVEENVGLIVYNGAMVDVGSLLQKLEKSEKVRAEVEQKLQLLEEKTDEDEKTILNLENSNKSLSGELREVKKDLSQLQENLKISENMNLQFENQMNKTIRNLSTVMDEIHTVLKKDNVKNEDKDQKSKENGASV

SEQ ID NO: 103043 - protein, 1043 aa, Artificial Sequence
  derived and/or modified sequence
MAQFGGQKNPPWATQFTATAVSQPAALGVQQPSLLGASPTIYTQQTALAAAGLTTQTPANYQLTQTAALQQQAAAAAAALQQLQQPQQTLLTQPAVALPTSLSLSTPQPTAQITVSYPTPRSSQQQTQPQKQRVFTGVVTKLHDTFGFVDEDVFFQLSAVKGKTPQVGDRVLVEATYNPNMPFKWNAQRIQTLPNQNQSQTQPLLKTPPAVLQPIAPQTTFGVQTQPQPQSLLQAQISAASITPLLQTQPQPLLQQPQQKAGLLQPPVRIVSQPQPARRLDPPSRFSGRNDRGDQVPNRKDDRSRERERERRRSRERSPQRKRSRERSPRRERERSPRRVRRVVPRYTVQFSKFSLDCPSCDMMELRRRYQNLYIPSDFFDAQFTWVDAFPLSRPFQLGNYCNFYVMHREVESLEKNMAILDPPDADHLYSAKVMLMASPSMEDLYHKSCALAEDPQELRDGFQHPARLVKFLVGMKGKDEAMAIGGHWSPSLDGPDPEKDPSVLIKTAIRCCKALTGIDLSVCTQWYRFAEIRYHRPEETHKGRTVPAHVETVVLFFPDVWHCLPTRSEWETLSRGYKQQLVEKLQGERKEADGEQDEEEKDDGEAKEISTPTHWSKLDPKTMKVNDLRKELESRALSSKGLKSQLIARLTKQLKVEEQKEEQKELEKSEKEEDEDDDRKSEDDKEEEERKRQEEIERQRRERRYILPDEPAIIVHPNWAAKSGKFDCSIMSLSVLLDYRLEDNKEHSFEVSLFAELFNEMLQRDFGVRIYKSLLSLPEKEDKKEKDKKSKKDERKDKKEERDDETDEPKPKRRKSGDDKDKKEDRDERKKEDKRKDDSKDDDETEEDNNQDEYDPMEAEEAEDEEDDRDEEEMTKRDDKRDINRYCKERPSKDKEKEKTQMITINRDLLMAFVYFDQSHCGYLLEKDLEEILYTLGLHLSRAQVKKLLNKVVLRESCFYRKLTDTSKDEENHEESESLQEDMLGNRLLLPTPTVKQESKDVEENVGLIVYNGAMVDVGSLLQKLEKSEKVRAEVEQKLQLL

SEQ ID NO: 103044 - DNA, 3453 bp, Artificial Sequence
  derived and/or modified sequence
atggcccagttcggcgggcagaaaaaccccccctgggccacgcagttcactgcaactgcggtgagtcaacctgcagccctcggcgttcagcagccttcccttctcggggctagccctaccatctacacacagcagacagctctggctgccgcaggccttactacacagacccctgccaattatcagctgacccaaaccgctgctctccaacagcaggccgctgcagctgctgctgccctccagcaacagtattcgcaacctcaacaggcactgtactctgtgcagcagcagcttcagcaaccacaacaaacactgcttactcagccagcagtggcgctccctacttccctatctctgtcaacaccacagccaacggctcagatcaccgtgtcctatcctacacccaggagcagccagcagcaaacgcagccccagaagcagcgggtgttcaccggggttgttacaaagctccacgataccttcggcttcgtggacgaggatgtcttttttcaactaagtgctgtgaaaggcaagactccccaggtaggtgaccgagtgttggtggaagctacttacaacccgaacatgccatttaagtggaacgcacagaggatccagacattaccgaatcagaatcaatcacagactcagcctttgctgaaaacaccaccggccgtcctgcaaccaattgctccccagacaacttttggtgtccagacccaaccccagccacaaagcttgttacaggcccaaatctccgcagcaagtatcacccctttgctgcagacacaaccgcagccactcttacagcaacctcaacagaaggcagggcttctgcaaccccctgtgcggatagtgtcccagcctcaaccagcgcgcagattagacccgccctccagattctccggccggaatgatcgcggtgaccaggttccgaatcgcaaggatgatagaagtcgagaacgagagcgcgagaggaggcgcagccgagagcgatctccacagaggaagcgtagtagagagcggagtcctcgtagggagcgggaacgctcacctagacgtgtgaggagggtggtccccagatacaccgtacagttttccaagttcagcttagattgtccgtcatgcgacatgatggaactgcggaggaggtaccaaaacctatacattcccagtgatttttttgacgcccagttcacttgggttgacgcttttccactctcccgtccattccagcttgggaactactgcaacttttacgtgatgcaccgggaagtcgaaagcctcgaaaaaaacatggccatcctggacccgcctgacgccgatcatctatatagtgccaaggtgatgttaatggccagtccatcaatggaagacctgtaccataagtcatgcgcactggccgaggatcctcaggagctgagagacgggtttcagcaccctgcccggttggtcaagttcttagtcggaatgaaggggaaagatgaagccatggcgattggggggcattggtctcccagtctcgatggcccagatccagaaaaggatccttccgtcctgattaagactgcaatccgctgttgtaaggctcttaccggaatcgacttgtccgtctgtactcagtggtataggttcgcggagattcggtatcacaggcctgaagagacgcataaagggaggactgtcccagctcacgtggaaacagtggtgctttttttccctgatgtgtggcactgtctgccaacccgtagcgaatgggagacactgagtaggggctataaacagcaacttgtggagaagctccaaggtgagagaaaggaggcagatggggagcaggatgaagaagaaaaggacgatggggaagccaaagaaattagcacccccactcactggtcaaaacttgatccaaaaacgatgaaagtgaacgatctgcgtaaagaactcgaatctcgcgcgctctcatctaagggattaaagtcacaactgatcgcccggctgacgaagcagctgaaggtcgaggaacagaaagaggaacagaaagaactggagaagagtgaaaaagaggaggacgaggatgatgacaggaaatcagaagatgacaaggaggaggaggaaagaaaaagacaggaagagattgagaggcagcgccgtgagcggagatacatcctgcctgacgagcctgccatcatagtgcatccaaactgggccgccaaatccggcaaatttgactgtagcatcatgtctctatcagtactactggattatcgcctggaggacaataaggagcactccttcgaggtgtccctgttcgccgaactctttaacgagatgctccagcgggacttcggagttcgcatatataaatccctactttctctccccgagaaggaggacaaaaaggagaaggataaaaaatcaaaaaaagacgagcgcaaggacaagaaggaagaacgagacgacgaaaccgacgaacctaaacccaaacggagaaaatccggtgacgacaaagacaagaaggaggatcgcgacgaaagaaaaaaagaggataaacgaaaggacgactctaaagacgacgacgaaacagaggaggataacaatcaggatgagtatgaccctatggaggcagaggaagcagaggatgaagaagacgaccgcgatgaagaagaaatgacaaagagagacgacaagcgggatatcaaccgatattgcaaggaacggccatctaaggataaggagaaggaaaaaacacagatgattacgataaaccgcgatctgttaatggcatttgtctactttgatcagagccattgtggttatctgcttgaaaaagatcttgaggagatcctgtacaccctgggcctgcatctgtcccgcgctcaagtcaagaaattgctgaataaggtagtcctgcgcgagagctgcttctacaggaagctgaccgacacaagtaaagatgaggagaatcatgaagagtccgagtccttgcaggaggacatgttaggaaaccggctgttactgcctacccccaccgttaagcaggagtctaaggatgtagaggagaatgtcggccttatcgtttacaatggagccatggtcgacgtcggctcgctgttgcaaaagttagaaaagtccgagaaggttagggccgaagtagaacagaagttgcaactcctcgaggagaagacagatgaagacgagaagacgatcttgaacctcgagaactccaataaaagtttgtcaggcgaactccgagaggtgaaaaaagatctgtcccagttgcaggagaatcttaaaatcagtgagaacatgaatcttcagttcgaaaatcagatgaacaagaccatccgcaatttatccaccgttatggacgagatccacaccgtactgaagaaagataacgtgaagaacgaagataaagaccaaaagtctaaggagaacggcgcttcggtctag

SEQ ID NO: 103045 - DNA, 3408 bp, Artificial Sequence
  derived and/or modified sequence
atggcccagtttggaggccaaaagaaccccccatgggccactcagtttaccgctactgcagtttcccagcctgcggctctgggcgtgcaacaacctagccttctcggggccagccctacgatctatactcagcagaccgctttagccgcggccgggctgactactcagactcctgcaaattatcagttgacccaaactgcggccctccaacaacaggcagctgctgcggcagcagcgttacagcagctgcagcagccgcagcagactctcctcacccagccagctgttgctctgcctacatccttatcactctccacaccccagccaacggcccaaattaccgtaagctatcccacaccaagatcttcccaacagcagactcagccgcagaaacagcgtgtgttcacaggcgtggtaactaagctgcatgacacattcgggtttgtggatgaggacgtattttttcaactgtcagcggtgaaaggaaaaaccccgcaggtgggggaccgagtgctcgtcgaagcgacgtacaaccccaacatgccatttaagtggaatgctcagcggatccagacactgccaaatcaaaatcagtcccagacacagcctctgttaaagacgccccccgctgttctccagccaatcgccccccagacaacatttggggtgcagacccaacctcagccacaatctttgctccaggcacaaatttctgctgcctcaattacaccactgctgcagacccagccacagcctctgctgcagcagccacaacaaaaggctggactgctccagccgcccgtacgcattgtcagccagcctcagcctgcgcggaggctcgaccccccctccagattcagcggacgaaacgaccgcggcgaccaggtgcctaaccgtaaggacgacaggagccgcgaaagagagcgagagaggagaagatcccgagaaaggtccccacagcgcaagcggtcgagagagagatcccctagaagagagcgggaacgctctccaagacgcgttaggagggtcgttcctcggtataccgttcagtttagcaagttttccctcgactgcccaagctgcgacatgatggaactccgacgtcgctaccaaaatctgtacatcccctcagatttcttcgacgcccagttcacctgggtagatgctttccccctctctcggccttttcaactgggaaattattgtaacttctatgtgatgcatagagaagtcgagtctctggagaaaaacatggctatcctcgaccctccagatgcggaccacctgtattcagcaaaggtgatgttaatggcctcaccctcaatggaggacctataccacaagagctgtgccttggccgaggaccctcaggagcttagggacggatttcagcaccctgctcgtctcgtgaaatttctcgttggcatgaagggcaaggacgaggccatggctattggagggcattggtcccctagcctcgacgggcccgacccagagaaggatccctctgtcctcattaagaccgccattcgttgctgcaaagctctcaccggaatagacctgtcagtgtgcacacaatggtatcggttcgccgagatcagataccatagacccgaagaaacccataaaggtaggaccgtgccagctcacgtcgaaacagtggtgttgttcttccccgacgtatggcattgcctgcccacacggtctgagtgggagacgctgtctcggggttacaagcagcagctggtggaaaaactgcaaggcgagcgaaaagaggccgacggcgaacaggatgaggaggagaaggatgacggggaagccaaggagattagcacaccaacacactggtccaagctggaccccaaaactatgaaggtcaacgacctgcgcaaggagctagaaagccgagcgctctcctcaaagggccttaaaagccagctgattgcccggttgaccaaacagctgaaggttgaggaacaaaaagaagaacaaaaagagttggaaaagtcagagaaggaggaagatgaagacgatgataggaaaagtgaggacgacaaagaagaagaagagcggaaaagacaggaggaaattgagcgccagcggagagagagaaggtacatccttccggatgaacctgccatcattgtccaccccaactgggccgccaagtctgggaagtttgattgcagcattatgtctctctctgtcctcttagattaccgactggaggacaataaagagcatagctttgaagtgagtctgttcgcagagctgttcaatgaaatgctgcagcgagatttcggggtgagaatctacaaatctttgctcagcttgccagagaaggaagacaagaaggagaaggataaaaagtccaagaaagacgagcgtaaggacaagaaggaggagcgtgatgatgaaacagatgagccaaagccaaagagaagaaagtctggcgacgataaggataagaaggaagacagggacgagcgcaagaaggaagacaaacggaaagacgactcaaaggatgatgacgagactgaagaagacaataaccaggatgagtatgaccccatggaagcggaggaggccgaggacgaggaagacgatcgggacgaagaggagatgacaaagagggacgacaaacgtgatatcaatcgatattgcaaagagcgcccaagcaaggacaaggagaaagagaagacccagatgataaccatcaacagagacctcctgatggcatttgtgtattttgatcagagccactgtggttacctattggagaaagacttggaggagattctgtatacgctgggtctccatctctctagagctcaagtgaaaaagctgctcaataaagtggtcttaagagagtcatgtttctaccgcaagttaactgacacatcgaaggacgaagagaaccatgaagagtcagagagcttacaggaggatatgttgggaaatagactgctactgcctacacccaccgttaagcaggaatctaaggacgtggaggagaacgtaggcctgatcgtgtataacggggctatggtcgacgtgggatcactgctccaaaagctagagaaatccgagaaagttagggccgaagtagagcaaaagctacagttactggaggagaagacagacgaggacgagaaaaccatcttgaacctggaaaattctaacaagtcactgtcaggggaactgcgggaagtgaagaaggacctttctcagctccaggaaaacttgaaaatttctgaaaacatgaacttgcagttcgaaaaccagatgaataagacaatccgaaacctcagtactgtaatggacgaaatacatactgttttaaagaaagataacgttaagaacgaggacaaagatcaaaaaagtaaagaaaacggtgccagcgtttag

SEQ ID NO: 103046 - DNA, 360 bp, Artificial Sequence
  derived and/or modified sequence
atggctcagttcggcgggcagaaaaatcccccatgggctacccagtttaccgcaaccgcagtgagccagcctgctgcgctgggcgtgcagcaaccttctctgcttggcgccagtcctacaatatatacccaacagactgcactggccgccgctggacttactacgcagacccccgctaactaccagctgacccagacggcagccctgcaacagcaggccgcagccgctgccgccgccctgcagcagcaatactcccagcctcagcaggcactgtattcagttcagcagcagctgcaacagcctcaacaaacactgcttactcagccagccgtagccttgcctacatccctgtccctgtag

SEQ ID NO: 103047 - DNA, 516 bp, Artificial Sequence
  derived and/or modified sequence
atggcccagtttggaggccagaaaaaccccccatgggcgacacagttcactgcgaccgctgtgagtcagccagctgcgctcggggtacagcaaccttcgcttctcggcgccagtccgactatttacactcaacagaccgcccttgcagccgctggcctcacgactcaaaccccggctaactatcagctaacccagaccgccgccctgcagcagcaagcagctgcagcagcagccgccctgcagcaacagtacagtcagcctcagcaggcgttatatagcgtccaacaacaactccagcaacctcagcagactctcttaacacagcctgctgtggccctccccacttcgctaagtctctccactccccaacctaccgcccaaatcactgtaagctatcctaccccaaggtcaagtcagcagcaaactcagcctcagaaacagagggtgtttactggcgtggtgaccaagttgcacgatacgtttggattcgtcgacgaagatgtgtttttccaatag

SEQ ID NO: 103048 - DNA, 3132 bp, Artificial Sequence
  derived and/or modified sequence
atggcgcagtttggtggccaaaagaatcccccctgggctacccagtttactgcaacggcagtgtctcagccagccgccttgggcgtgcagcagccttcactgctaggcgcctcgccaacgatatatacccagcaaacggccttagccgccgctgggcttaccacccaaacccccgcgaattaccaactcactcaaacagctgccctgcagcagcaggcggcagcagccgccgcagcgctccagcagctgcagcagccccagcagactctgttaacccagcccgccgtcgccttacctacatctttgtccctgtctaccccgcaacctaccgcacagatcaccgtctcatatccgactcccagatccagccagcagcagacccagccccagaaacagcgggtgttcaccggggtggtcactaagcttcatgacacctttggttttgtggatgaagacgttttctttcagctttcagcggtcaaaggaaaaaccccgcaggtgggagacagggtcctggtcgaggcaacctataatccgaatatgccgtttaagtggaatgcacagaggatccagacactgccgaaccagaatcagtcccagacacagccccttttgaagaccccgcccgctgtacttcagccaatcgctccccaaacgacctttggggtgcagactcagcctcagcctcagtcactgttacaggcgcaaatatctgctgcttcaatcacgcctctacttcagactcagccacagccactcctgcagcaaccccagcagaaagctggccttttgcagccacctgtccgaatcgtctcacagccacagcccgcgaggcgactggaccctccctcgcgctttagtgggcgcaatgaccgcggcgaccaggttcctaatagaaaggacgatagatcacgcgaaagggaaagggagcggcggaggtccagggaaagaagcccgcagcgcaaaaggtcaagagagagaagtccaaggcgtgagcgagaaagaagtcctcgccgtgttaggcgcgtggtgccacgctacactgtccagttctccaaattcagcctcgactgccccagctgtgacatgatggaattgcggcggagataccagaacctctacattcccagcgattttttcgatgcccagttcacctgggtagacgccttccctctcagcagacccttccaattgggcaactattgtaacttctatgttatgcaccgggaggttgagagtctcgaaaaaaatatggcgatcttggatcctcctgatgccgaccatctttactcggctaaggtgatgctcatggcgagccctagcatggaagacctgtatcacaagtcatgtgctctcgcagaagatccacaagagctgagggacggatttcagcatcccgcccgtctggttaagtttttggtgggcatgaaagggaaagatgaagccatggcaatcggtgggcactggtcaccttcactggacggacctgatcctgagaaagatccttctgtgctgataaagacagctatacgatgctgcaaggccctgacgggaatcgacctctcagtctgcactcagtggtataggttcgcggagatccgctaccatcggcccgaggagacgcacaagggccggacagtcccagctcacgtggaaaccgtggtgctgttttttcctgatgtgtggcattgcctgcccaccaggtctgagtgggaaaccttatcaaggggctacaaacagcagctagtcgagaagcttcagggtgagcgcaaagaggccgacggagaacaggatgaagaggagaaagacgatggggaggccaaggaaatttctaccccaacgcattggagtaaactcgacccaaagacgatgaaagtgaacgatctgcgcaaggaactggaaagcagggccttgtcctctaaaggactgaaatcgcagcttattgcccggctcaccaaacaactgaaggtagaggaacagaaggaagagcaaaaggagctcgagaaaagcgaaaaagaggaggatgaagatgacgacaggaaatctgaggatgacaaagaggaggaggagcggaaacgtcaagaagagatcgagcgacagagaagagagcgcagatatattctccctgacgaacctgcgatcattgtgcatccgaactgggcagccaaatcaggcaaatttgactgtagtattatgagtttgtccgtgttgttggactatcggctggaagataacaaggagcatagtttcgaggtgagtctgttcgctgagctgtttaatgagatgctccagcgcgacttcggcgtgcgtatttacaaaagtctgctctccttgccagagaaggaggacaagaaagagaaagataagaaaagcaagaaagatgagagaaaagataaaaaggaagagagggatgatgagaccgatgaaccaaaacctaagcggcgaaaaagcggcgacgacaaggacaagaaggaggaccgggacgagagaaagaaggaggataaaagaaaggacgactccaaagacgatgacgagacagaagaagataacaaccaggacgagtacgatccaatggaagctgaggaggccgaggatgaggaggatgatagagatgaggaggaaatgactaaacgtgacgataagagagacattaacaggtactgtaaggagaggcctagtaaggataaggagaaggaaaagacacagatgatcacaatcaatagggacctgctcatggccttcgtatactttgaccagtctcactgcgggtatctgctggaaaaggacttagaggagattctgtacacacttggcctgcacttatctcgggcgcaagtgaagaaacttttgaataaagtggtattgcgtgagtcatgcttctataggaaactcaccgacactagtaaggatgaggagaatcacgaagaatctgagtcgctgcaggaagatatgctggggaatcggctgctgctacccacccccacagtcaagcaggaatcgaaggacgtggaggagaatgtgggccttatcgtttataacggtgccatggtcgatgttgggtcactgctgcaaaagctagaaaagagtgagaaagttcgcgccgaagtcgagcagaagcttcagcttctgtag

SEQ ID NO: 103049 - DNA, 3453 bp, Artificial Sequence
  derived and/or modified sequence
atggcccagtttggaggccagaagaaccccccctgggccacccagttcaccgccacagctgtgtcccagcctgctgccctgggcgtgcagcagcccagcctgctgggcgccagccccaccatctacacccagcagacagccctggccgctgctggcctgaccacccagaccccagccaactaccagctgacccagacagctgccctgcagcagcaggccgctgctgctgctgctgccctgcagcagcagtacagccagccccagcaggccctgtacagcgtgcagcagcagctgcagcagccccagcagaccctgctgacccagcctgctgtggccctgcccaccagcctgagcctgagcaccccccagcccacagcccagatcaccgtgtcctaccccacccccaggagcagccagcagcagacccagccccagaagcagagggtcttcaccggggtggtgaccaagctgcatgacacctttggatttgtggatgaagatgtgttcttccagctgtctgctgtgaagggcaagaccccccaggtgggggacagagtgctggtggaggccacctacaaccccaacatgcccttcaagtggaatgcccagaggatccagaccctgcccaaccagaaccagagccagacccagcccctgctgaagaccccacctgctgtgctgcagcccatcgccccccagaccaccttcggcgtgcagacccagccccagccccagagcctgctgcaggcccagatctctgctgccagcatcacccccctgctgcagacccagccccagcccctgctgcagcagccccagcagaaggccggcctgctgcagccccctgtgagaattgtgtcccagccccagcctgcccggcggctggacccccccagccgcttcagcggcagaaatgacagaggagaccaggtgcccaacaggaaggatgacaggagccgggagcgggagcgggagaggagaagaagccgggagaggagcccccagaggaagaggagccgggagaggagcccccggcgggagcgggagaggagccccaggagagtgcggcgggtggtgccccgctacacagtgcagttcagcaagttcagcctggactgccccagctgtgacatgatggagctgcggcggcgctaccagaacctgtacatccccagcgacttctttgatgcccagttcacctgggtggatgccttccccctgagccggcccttccagctgggcaactactgcaacttctacgtgatgcaccgggaggtggagagcctggagaagaacatggccatcctggaccccccagatgctgaccacctgtacagcgccaaggtgatgctgatggccagccccagcatggaggacctgtaccacaagagctgtgccctggccgaggacccccaggagctgagagatggcttccagcacccagcccggctggtgaagttcctggtgggcatgaagggcaaggatgaggccatggccatcggcggccactggagccccagcctggatggccctgaccctgagaaggaccccagcgtgctgatcaagacagccatccgctgctgcaaggccctgaccggcatcgacctgtctgtgtgcacccagtggtacagatttgctgagatccgctaccacaggcctgaggagacccacaagggccgcacagtgcctgcccacgtggagaccgtggtgctcttcttcccagatgtgtggcactgcctgcccaccaggtctgagtgggagaccctgagccggggctacaagcagcagctggtggagaagctgcagggcgagaggaaggaggctgatggagagcaggatgaggaggagaaggatgatggagaggccaaggagatcagcacccccacccactggagcaagctggaccccaagaccatgaaggtgaatgacctgaggaaggagctggagagccgggccctgagcagcaagggcctgaagagccagctgattgcccggctgaccaagcagctgaaggtggaggagcagaaggaggagcagaaggagctggagaagtctgagaaggaggaggatgaagatgatgacaggaagtcagaagatgacaaggaggaggaggagaggaagaggcaggaggagattgaaaggcagaggcgggagcggcgctacatcctgcctgatgagcccgccatcatcgtgcaccccaactgggccgccaagagcggcaagtttgactgcagcatcatgagcctgtctgtgctgctggactaccgcctggaggacaacaaggagcacagctttgaggtgtccctgtttgctgagctgttcaatgagatgctgcagagggactttggagtgcgcatctacaagagcctgctgagcctgcctgagaaggaggacaagaaggagaaggacaagaagagcaagaaggatgagaggaaggacaagaaggaggagagagatgatgaaacagatgagcccaagcccaagaggaggaagtctggagatgacaaggacaagaaggaggacagagatgagaggaagaaggaggacaagaggaaggatgacagcaaggatgatgatgaaacagaggaggacaacaaccaggatgaatatgaccccatggaggccgaggaggctgaagatgaggaggatgacagagatgaggaggagatgaccaagagagatgacaagagggacatcaaccgctactgcaaggagcggcccagcaaggacaaggagaaggagaagacccagatgatcaccatcaacagagacctgctgatggcctttgtgtactttgaccagagccactgcggctacctgctggagaaggacctggaggagatcctgtacaccctgggcctgcacctgagccgggcccaggtgaagaagctgctgaacaaggtggtgctgcgggagagctgcttctacaggaagctgacagacaccagcaaggatgaagaaaatcatgaggagagcgagagcctgcaggaggacatgctgggcaaccggctgctgctgcccacccccaccgtgaagcaggagagcaaggatgtggaggagaatgtgggcctgattgtgtacaacggggccatggtggatgtgggcagcctgctgcagaagctggagaagtctgagaaggtgcgggcagaggtggagcagaagctgcagctgctggaggagaagacagatgaagatgagaagaccatcctgaacctggagaacagcaacaagagcctgagcggggagctgcgggaggtgaagaaggacctgagccagctgcaggagaacctgaagatcagcgagaacatgaacctgcagtttgagaaccagatgaacaagaccatccggaacctgagcacagtgatggatgagatccacacagtgctgaagaaggacaacgtgaagaatgaagacaaggaccagaagagcaaagaaaatggagcctctgtgtag

SEQ ID NO: 103050 - DNA, 3408 bp, Artificial Sequence
  derived and/or modified sequence
atggcccagtttggaggccagaagaaccccccctgggccacccagttcaccgccacagctgtgtcccagcctgctgccctgggcgtgcagcagcccagcctgctgggcgccagccccaccatctacacccagcagacagccctggccgctgctggcctgaccacccagaccccagccaactaccagctgacccagacagctgccctgcagcagcaggccgctgctgctgctgctgccctgcagcagctgcagcagccccagcagaccctgctgacccagcctgctgtggccctgcccaccagcctgagcctgagcaccccccagcccacagcccagatcaccgtgtcctaccccacccccaggagcagccagcagcagacccagccccagaagcagagggtcttcaccggggtggtgaccaagctgcatgacaccttcggctttgtggatgaagatgtgttcttccagctgtctgctgtgaagggcaagaccccccaggtgggggacagagtgctggtggaggccacctacaaccccaacatgcccttcaagtggaatgcccagaggatccagaccctgcccaaccagaaccagagccagacccagcccctgctgaagaccccacctgctgtgctgcagcccatcgccccccagaccacctttggagtgcagacccagccccagccccagagcctgctgcaggcccagatctctgctgccagcatcacccccctgctgcagacccagccccagcccctgctgcagcagccccagcagaaggccggcctgctgcagccccctgtgcgcatcgtgtcccagccccagcctgcccggcggctggacccccccagccgcttctctggaagaaatgacagaggagaccaggtgcccaacaggaaggatgacaggagccgggagcgggagcgggagcggcggcgcagccgggagaggagcccccagaggaagaggagccgggagaggagcccccggcgggagcgggagaggagcccccggcgggtgagaagagtggtgccccgctacacagtgcagttcagcaagttcagcctggactgccccagctgtgacatgatggagctgcggcggcgctaccagaacctgtacatccccagcgacttctttgatgcccagttcacctgggtggatgccttccccctgagccggcccttccagctgggcaactactgcaacttctacgtgatgcaccgggaggtggagagcctggagaagaacatggccatcctggaccccccagatgctgaccacctgtacagcgccaaggtgatgctgatggccagccccagcatggaggacctgtaccacaagagctgtgccctggccgaggacccccaggagctgagagatggcttccagcacccagcccggctggtgaagttcctggtgggcatgaagggcaaggatgaggccatggccatcggcggccactggagccccagcctggatggccctgaccctgagaaggaccccagcgtgctgatcaagacagccatccgctgctgcaaggccctgactggaattgacctgtctgtgtgcacccagtggtacagatttgctgagatccgctaccacaggcctgaggagacccacaagggccgcacagtgcctgcccacgtggagaccgtggtgctcttcttcccagatgtgtggcactgcctgcccaccaggtctgagtgggagaccctgagccggggctacaagcagcagctggtggagaagctgcagggcgagaggaaggaggctgatggagagcaggatgaggaggagaaggatgatggagaggccaaggagatcagcacccccacccactggagcaagctggaccccaagaccatgaaggtgaatgacctgaggaaggagctggagagccgggccctgagcagcaagggcctgaagagccagctgattgcccggctgaccaagcagctgaaggtggaggagcagaaggaggagcagaaggagctggagaagtctgagaaggaggaggatgaagatgatgacaggaagtcagaagatgacaaggaggaggaggagaggaagaggcaggaggagattgagcggcagaggcgggagcggcgctacatcctgcctgatgagcccgccatcatcgtgcaccccaactgggccgccaagagcggcaagtttgactgcagcatcatgagcctgtctgtgctgctggactaccgcctggaggacaacaaggagcacagctttgaggtgtccctgtttgctgagctgttcaatgagatgctgcagagggactttggagtgcgcatctacaagagcctgctgagcctgcctgagaaggaggacaagaaggagaaggacaagaagagcaagaaggatgagaggaaggacaagaaggaggagagagatgatgaaacagatgagcccaagcccaagaggaggaagtctggagatgacaaggacaagaaggaggacagagatgagaggaagaaggaggacaagaggaaggatgacagcaaggatgatgatgaaacagaggaggacaacaaccaggatgaatatgaccccatggaggccgaggaggccgaggatgaagaagatgacagagatgaggaggagatgaccaagagagatgacaagagggacatcaaccgctactgcaaggagcggcccagcaaggacaaggagaaggagaagacccagatgatcaccatcaacagagacctgctgatggcctttgtgtactttgaccagagccactgcggctacctgctggagaaggacctggaggagatcctgtacaccctgggcctgcacctgagccgggcccaggtgaagaagctgctgaacaaggtggtgctgcgggagagctgcttctacaggaagctgacagacaccagcaaggatgaggagaaccacgaggagagcgagagcctgcaggaggacatgctgggcaaccggctgctgctgcccacccccaccgtgaagcaggagagcaaggatgtggaggagaatgtgggcctcatcgtgtacaatggagccatggtggatgtgggcagcctgctgcagaagctggagaagtctgagaaggtgcgggcagaggtggagcagaagctgcagctgctggaggagaagacagatgaagatgagaagaccatcctgaacctggagaacagcaacaagagcctgtctggagagctgcgggaggtgaagaaggacctgagccagctgcaggagaacctgaagatcagcgagaacatgaacctgcagtttgagaaccagatgaacaagaccatccggaacctgagcacagtgatggatgagatccacacagtgctgaagaaggacaacgtgaagaatgaagacaaggaccagaagagcaaagaaaatggagcctctgtgtag

SEQ ID NO: 103051 - DNA, 360 bp, Artificial Sequence
  derived and/or modified sequence
atggcccagtttggaggccagaagaaccccccctgggccacccagttcaccgccacagctgtgtcccagcctgctgccctgggcgtgcagcagcccagcctgctgggcgccagccccaccatctacacccagcagacagccctggccgctgctggcctgaccacccagaccccagccaactaccagctgacccagacagctgccctgcagcagcaggccgctgctgctgctgctgccctgcagcagcagtacagccagccccagcaggccctgtacagcgtgcagcagcagctgcagcagccccagcagaccctgctgacccagcctgctgtggccctgcccaccagcctgagcctgtag

SEQ ID NO: 103052 - DNA, 516 bp, Artificial Sequence
  derived and/or modified sequence
atggcccagtttggaggccagaagaaccccccctgggccacccagttcaccgccacagctgtgtcccagcctgctgccctgggcgtgcagcagcccagcctgctgggcgccagccccaccatctacacccagcagacagccctggccgctgctggcctgaccacccagaccccagccaactaccagctgacccagacagctgccctgcagcagcaggccgctgctgctgctgctgccctgcagcagcagtacagccagccccagcaggccctgtacagcgtgcagcagcagctgcagcagccccagcagaccctgctgacccagcctgctgtggccctgcccaccagcctgagcctgagcaccccccagcccacagcccagatcaccgtgtcctaccccacccccaggagcagccagcagcagacccagccccagaagcagagggtcttcaccggggtggtgaccaagctgcatgacacctttggatttgtggatgaagatgtgttcttccagtag

SEQ ID NO: 103053 - DNA, 3132 bp, Artificial Sequence
  derived and/or modified sequence
atggcccagtttggaggccagaagaaccccccctgggccacccagttcaccgccacagctgtgtcccagcctgctgccctgggcgtgcagcagcccagcctgctgggcgccagccccaccatctacacccagcagacagccctggccgctgctggcctgaccacccagaccccagccaactaccagctgacccagacagctgccctgcagcagcaggccgctgctgctgctgctgccctgcagcagctgcagcagccccagcagaccctgctgacccagcctgctgtggccctgcccaccagcctgagcctgagcaccccccagcccacagcccagatcaccgtgtcctaccccacccccaggagcagccagcagcagacccagccccagaagcagagggtcttcaccggggtggtgaccaagctgcatgacaccttcggctttgtggatgaagatgtgttcttccagctgtctgctgtgaagggcaagaccccccaggtgggggacagagtgctggtggaggccacctacaaccccaacatgcccttcaagtggaatgcccagaggatccagaccctgcccaaccagaaccagagccagacccagcccctgctgaagaccccacctgctgtgctgcagcccatcgccccccagaccacctttggagtgcagacccagccccagccccagagcctgctgcaggcccagatctctgctgccagcatcacccccctgctgcagacccagccccagcccctgctgcagcagccccagcagaaggccggcctgctgcagccccctgtgcgcatcgtgtcccagccccagcctgcccggcggctggacccccccagccgcttctctggaagaaatgacagaggagaccaggtgcccaacaggaaggatgacaggagccgggagcgggagcgggagcggcggcgcagccgggagaggagcccccagaggaagaggagccgggagaggagcccccggcgggagcgggagaggagcccccggcgggtgagaagagtggtgccccgctacacagtgcagttcagcaagttcagcctggactgccccagctgtgacatgatggagctgcggcggcgctaccagaacctgtacatccccagcgacttctttgatgcccagttcacctgggtggatgccttccccctgagccggcccttccagctgggcaactactgcaacttctacgtgatgcaccgggaggtggagagcctggagaagaacatggccatcctggaccccccagatgctgaccacctgtacagcgccaaggtgatgctgatggccagccccagcatggaggacctgtaccacaagagctgtgccctggccgaggacccccaggagctgagagatggcttccagcacccagcccggctggtgaagttcctggtgggcatgaagggcaaggatgaggccatggccatcggcggccactggagccccagcctggatggccctgaccctgagaaggaccccagcgtgctgatcaagacagccatccgctgctgcaaggccctgactggaattgacctgtctgtgtgcacccagtggtacagatttgctgagatccgctaccacaggcctgaggagacccacaagggccgcacagtgcctgcccacgtggagaccgtggtgctcttcttcccagatgtgtggcactgcctgcccaccaggtctgagtgggagaccctgagccggggctacaagcagcagctggtggagaagctgcagggcgagaggaaggaggctgatggagagcaggatgaggaggagaaggatgatggagaggccaaggagatcagcacccccacccactggagcaagctggaccccaagaccatgaaggtgaatgacctgaggaaggagctggagagccgggccctgagcagcaagggcctgaagagccagctgattgcccggctgaccaagcagctgaaggtggaggagcagaaggaggagcagaaggagctggagaagtctgagaaggaggaggatgaagatgatgacaggaagtcagaagatgacaaggaggaggaggagaggaagaggcaggaggagattgagcggcagaggcgggagcggcgctacatcctgcctgatgagcccgccatcatcgtgcaccccaactgggccgccaagagcggcaagtttgactgcagcatcatgagcctgtctgtgctgctggactaccgcctggaggacaacaaggagcacagctttgaggtgtccctgtttgctgagctgttcaatgagatgctgcagagggactttggagtgcgcatctacaagagcctgctgagcctgcctgagaaggaggacaagaaggagaaggacaagaagagcaagaaggatgagaggaaggacaagaaggaggagagagatgatgaaacagatgagcccaagcccaagaggaggaagtctggagatgacaaggacaagaaggaggacagagatgagaggaagaaggaggacaagaggaaggatgacagcaaggatgatgatgaaacagaggaggacaacaaccaggatgaatatgaccccatggaggccgaggaggccgaggatgaagaagatgacagagatgaggaggagatgaccaagagagatgacaagagggacatcaaccgctactgcaaggagcggcccagcaaggacaaggagaaggagaagacccagatgatcaccatcaacagagacctgctgatggcctttgtgtactttgaccagagccactgcggctacctgctggagaaggacctggaggagatcctgtacaccctgggcctgcacctgagccgggcccaggtgaagaagctgctgaacaaggtggtgctgcgggagagctgcttctacaggaagctgacagacaccagcaaggatgaggagaaccacgaggagagcgagagcctgcaggaggacatgctgggcaaccggctgctgctgcccacccccaccgtgaagcaggagagcaaggatgtggaggagaatgtgggcctcatcgtgtacaatggagccatggtggatgtgggcagcctgctgcagaagctggagaagtctgagaaggtgcgggcagaggtggagcagaagctgcagctgctgtag

SEQ ID NO: 103054 - DNA, 3453 bp, Artificial Sequence
  derived and/or modified sequence
atggcccagttcggcggccagaagaaccccccctgggccacccagtttacagccaccgccgttagccagcccgctgccttgggtgtccaacaaccttcccttctcggcgccagccctactatctacactcagcagactgccctggccgcggccggcctcactacacaaactcctgccaattatcagctgacccagacagctgccctgcagcagcaagccgccgctgccgccgccgccctgcagcagcaatatagtcaaccccaacaggctctgtactctgtgcagcaacagcttcagcagcctcagcaaacgctccttacccagcctgccgttgccctgcccacttcattatctcttagcactccgcagccaacagcccagattaccgtgtcttatcctaccccgcgatcgtcccaacagcagacccagcctcagaaacagcgagtgttcaccggagtcgtcacaaagctccacgatacttttggattcgtggatgaagatgtattcttccagttgtccgcggtgaaaggaaagacgccccaagtcggcgatagagtcctcgtagaggccacatacaacccgaatatgccctttaaatggaacgcccagcggatacaaactctgccgaaccaaaaccagagtcaaacccaacctctgctcaagacacccccggccgtcttgcagcctattgcaccacaaacaacctttggtgtgcagactcaacctcagccgcaatcactattgcaagcccagatctcagctgcctccattacgcctctgctccagacccagccccagcctctgcttcagcaaccacagcagaaagccggtctgctgcagcccccggttcggattgtttcccagccccagcctgcaaggcgcttggatcctccctctaggttttcaggccggaatgatcgcggggatcaggtccccaacaggaaggatgaccgttctcgagagagggaaagagagaggaggagaagtcgggaacgctctccacagcgaaagagatcccgggagagatcacccaggagagagagggagaggtcaccccgccgggtgaggcgggttgtcccccggtacaccgttcagttcagcaagttttcactcgattgcccttcttgcgatatgatggagctgagaagaaggtaccagaatctctacattccttcagattttttcgacgcacagttcacatgggttgatgccttcccgctgagccggccatttcaactcggcaactactgtaacttctatgtgatgcaccgcgaagtggaatcactggaaaagaatatggccatcctggatcccccagacgccgatcacctctatagtgccaaggtaatgttgatggcctcgccatcaatggaagatctctaccacaagagctgcgcgctggcggaggacccacaagagctcagagacggatttcagcatccggccagactggttaagtttctcgtgggaatgaaaggcaaagatgaagctatggcgatcggtgggcattggtccccatctctcgacgggccagatcccgaaaaggaccctagcgttctaattaagacggcgatccgctgttgcaaagcgctgactggtatcgacttgtctgtgtgcactcagtggtaccggtttgccgaaattcgataccataggccagaggaaactcataaggggaggaccgttccggcgcatgtggagactgtagttctgttttttccagatgtgtggcactgcttaccaacacgcagcgaatgggagaccctgtcccggggatataaacagcagctggtggaaaaactgcagggtgaaaggaaagaagctgacggggagcaggacgaagaggagaaagatgacggtgaagcaaaagaaatttccacgcctactcattggtcgaaactggatcctaaaaccatgaaggtgaatgatctgcgcaaagagcttgaaagtcgggctctgagcagtaaaggattgaagagtcagcttattgcacgattgactaaacagctcaaggtggaggagcagaaggaggagcagaaggagctcgagaagagcgagaaggaagaagacgaagatgacgaccggaagtccgaggacgacaaggaagaggaagagcggaaaaggcaggaagagatcgagcgacaacgcagggaacgacgttatatcctgcccgatgagccagcaattattgtacaccctaattgggcagctaagtctgggaagttcgattgtagcattatgtctcttagcgtgctgctagattaccggttggaggacaacaaagagcatagcttcgaggtaagtctgttcgcagaattgtttaacgaaatgctgcaacgagacttcggcgtacgtatctacaaatcattgctatctctgcctgagaaagaggataagaaggagaaggataagaaatctaaaaaagacgaaagaaaggataaaaaagaggaacgagacgacgagactgacgagcccaaaccgaagaggcgcaagtctggggacgataaggataaaaaggaggatcgtgacgaacgtaagaaggaggataagagaaaagatgactcaaaggatgatgatgaaaccgaggaggataacaatcaggatgagtacgatcccatggaggcagaagaggccgaggatgaagaggatgatcgggatgaagaggagatgactaaaagggacgataagcgggacataaatcggtactgcaaggagcggcctagcaaagataaggagaaggagaaaacacaaatgataactattaaccgggatctgctcatggcattcgtgtactttgatcaaagtcactgtggctatctgttggaaaaggatctggaagagattctctatactctggggttacatcttagtcgggcccaggtcaaaaaactgctaaacaaagtggtgctgcgcgagtcttgcttttacagaaagctaacagatacatccaaggacgaagaaaatcatgaggagtccgaaagcttacaggaggatatgctgggtaataggctgctattacctacccctacagtgaagcaagagtccaaagacgtggaagagaacgtggggcttattgtttacaacggtgccatggtggatgtgggttctctgcttcagaaactggaaaaatctgaaaaggtccgggctgaggtggaacagaaactccagttgcttgaggagaagactgacgaagatgaaaagacaatcctgaatctcgagaattctaacaagagcctctctggtgagctccgtgaggtcaagaaggatctatcacaacttcaggaaaatcttaagatctcagaaaacatgaacctgcagtttgagaaccagatgaataagacaattagaaacctctctactgtgatggatgagatccatacggtactgaaaaaagacaatgtgaaaaacgaggacaaggaccaaaagtctaaggaaaatggagctagtgtttag

SEQ ID NO: 103055 - DNA, 3408 bp, Artificial Sequence
  derived and/or modified sequence
atggcccagttcggcggccagaagaaccccccctgggccacccagttcaccgcgacagccgtgtcccaaccagccgctctcggagttcagcagccctctctactcggcgcttcaccaactatctacacacagcagacagctcttgcagctgccggactgactacacagactcctgcaaattatcagctcacacaaactgcagccctacagcagcaggcagcggccgccgctgccgccctgcaacagctgcagcagcctcagcagactctgctgacacagcccgcagtcgcattgcctacttcactgtcattatccaccccacagcctacagcacagataactgtctcttatccgactccgaggtcctcacagcagcagacccaaccacaaaaacaaagggttttcaccggtgtggtgactaagctgcacgacacttttgggtttgtggatgaggacgtcttctttcagctgtctgccgtgaaggggaaaactcctcaagtaggagatcgcgtgcttgtagaggcaacctacaaccccaatatgccctttaagtggaatgctcagaggatccagactctgcctaaccagaatcaatctcagacacaacccctcctgaagacaccgccggccgtcctccaacccatcgcgccacagactacattcggagtgcagacgcagccgcagccccagagcctgcttcaggcccagatttcagccgcatcgattactccactgctccaaacacagccccagccattattgcagcaaccacagcagaaggccgggttgctgcagccaccagttagaatcgtcagtcaaccccaacctgctagacgcctggaccccccgtcaagattctctgggcggaatgataggggagatcaggtgcctaataggaaagacgatcgatcccgagaacgtgaacgtgaacggagaaggagcagagagcggtccccccaacggaagcgttcccgggaacggtccccacggcgcgagcgcgaacgatcgccccgcagagtccgaagagtggtgccgcggtatacggtgcaattcagcaagttttctctggactgcccaagctgtgatatgatggaattgaggcgaaggtatcagaacctgtacattccatccgactttttcgacgctcagtttacttgggtggacgcattcccacttagccggccttttcagctaggtaattactgcaacttttatgtaatgcaccgggaggtggaatccctagagaaaaacatggccatcctagaccccccagacgctgatcatctgtattccgcaaaggtcatgctaatggcaagcccctctatggaggatctatatcataagtcttgcgcgctcgcagaagacccccaggagcttcgcgacggatttcagcaccccgcgagactcgtcaaattccttgtgggtatgaagggcaaggatgaggccatggccattggcggtcactggtccccgagcttagatggcccggatccggagaaggatcccagtgtgctcataaagaccgccatccggtgctgtaaggctttgacaggtatcgacttgtctgtctgtacccagtggtatcggtttgctgagatccggtatcacagaccggaagaaactcacaaaggcagaacagtgcctgcccatgtcgagactgtggtgctcttcttccccgatgtctggcactgtctccccaccagatctgaatgggaaacactatcgcggggctataaacagcagctggtggaaaaacttcagggcgagcggaaagaggctgacggcgagcaggatgaagaagagaaggatgacggggaagccaaggaaataagcaccccaacccattggagcaaactggatcccaaaacaatgaaggtcaacgacctgcgtaaagagctggagtctagagctctgtcaagcaagggcttaaagagccagctgattgccaggctcactaaacagcttaaggtagaggaacagaaggaggaacaaaaggagctggagaagtccgaaaaggaggaggatgaagatgacgatcgcaagtccgaagatgataaagaagaagaggaacgaaagcgccaagaagaaatagaacggcagagaagggagcgccgctatatcttacctgatgaaccagcaattatcgttcaccctaactgggctgccaagagcgggaaattcgactgttcaattatgtccctgtcagtgctgcttgattatcggttggaggataacaaagagcatagtttcgaagtgtctctgtttgccgaactctttaatgagatgctgcaaagggactttggggttaggatctacaagagtcttctgtctctcccggaaaaggaggacaagaaagaaaaggacaagaagtctaaaaaggacgagcggaaggataagaaagaagaacgcgacgatgagacagacgagcccaagcctaaaagaagaaaatcaggcgacgacaaagacaaaaaggaagaccgcgacgagcggaagaaggaggacaagcgaaaagatgactccaaggatgacgacgagacagaagaagacaacaaccaggatgaatacgacccaatggaagcagaggaggccgaggatgaagaagatgatagagatgaagaggagatgactaaacgcgatgacaagagagacatcaatcgctactgtaaagagcgaccctccaaggataaagagaaggagaaaactcaaatgataactatcaaccgggacctactgatggcattcgtctattttgatcagtctcactgtggctacctgctcgagaaggatctggaagaaatcttatatacacttggactacatctctcccgggcacaggtgaaaaaactccttaataaggttgtgcttagagagtcatgcttttacagaaagctgaccgatacctctaaggacgaagaaaaccacgaagagagtgagtccctgcaggaggacatgctcggaaaccggctgcttcttcctacacccacagtgaaacaggaatccaaggacgtcgaggagaatgtgggtctgattgtttacaatggagccatggtggatgtgggctcactgctccaaaaactcgaaaagtccgagaaggtgcgggcagaagtagagcagaaactgcagctgctggaggagaagacagatgaggatgagaagacgattttgaaccttgagaatagtaataagtccctaagcggtgagcttagagaggttaagaaggatttgtcccaactacaggaaaacctgaaaatctccgagaatatgaatttacagtttgagaaccaaatgaataagacaatcaggaacctttccacagtgatggacgagattcatacagtgttaaaaaaggacaatgtcaagaatgaagataaagatcagaagagcaaagagaatggcgcgtctgtgtag

SEQ ID NO: 103056 - DNA, 360 bp, Artificial Sequence
  derived and/or modified sequence
atggcccagttcggcggccagaagaaccccccctgggccacccagttcactgctacggccgtgagtcaaccagcagcgctgggtgtgcagcagccatcactgctcggagcaagtcccaccatctatactcagcaaacggcgctggctgctgccggcctcacaacccagactccagcgaattatcaactgacccagacagctgcacttcagcaacaagccgcagctgcggcagccgctctgcagcaacagtacagccagcctcaacaggctttatactctgtccagcagcagctgcagcaacctcagcagacactgttgacccaacctgcagtggctctgccaacaagcttgtcactctag

SEQ ID NO: 103057 - DNA, 516 bp, Artificial Sequence
  derived and/or modified sequence
atggcccagttcggcggccagaagaaccccccctgggccacccagtttaccgcgaccgccgtctctcaacctgctgcacttggggtacagcagcctagcctcctgggagcttctcccactatctacacacagcagacagctcttgccgcggcaggcctaacaacccagactcccgcaaactatcagctcactcagactgccgccctccagcaacaggcagccgcagccgctgcagccttacagcaacagtactctcagccacagcaggccctatattccgtccagcagcagctccagcagccccagcagaccctgcttacccaaccagctgttgccctgcctacctccttgtccttatctacacctcagcccaccgcccagattacggtgtcataccctacaccacggtcatcccagcagcagacacagccccagaagcagcgagttttcactggggtagtgaccaaactgcacgatacctttggtttcgtcgacgaggatgtgtttttccagtag

SEQ ID NO: 103058 - DNA, 3132 bp, Artificial Sequence
  derived and/or modified sequence
atggcccagttcggcggccagaagaaccccccctgggccacccagtttaccgccaccgctgtgtcacaacccgccgctttgggtgtgcagcagccttctcttctgggcgcatccccaacgatctacacccaacagactgccctggccgccgctggactgacaactcagacccccgcgaactatcagctgacacagaccgccgctttacagcagcaggccgcagcagccgctgcagcgcttcagcagctgcagcagccgcagcaaacactgctgacccagccagcggtcgcacttccgaccagcctgagcctttccacgcctcagccaaccgctcagattacagtgtcttatccgaccccccgatcctcccaacagcagacacaaccacaaaaacagcgggtcttcacaggagttgtaacgaaattacatgacacattcggtttcgtcgacgaggatgtcttctttcaattgtctgcagtcaagggcaaaaccccccaggtcggcgaccgtgtgctcgtcgaagctacctacaatcccaacatgccttttaaatggaacgctcagaggattcagacactacctaatcagaatcagtctcaaactcaacccctacttaagacaccacctgcagtcctgcagcctatcgcaccacagacaactttcggggtccagacccagccccagccccagtctctattacaagcgcagatctctgccgcttccattaccccattgctccagacacagcctcagccactccttcaacagcctcaacagaaagcaggcctgctgcagccacctgtgaggatcgtatctcagcctcagcctgcgaggcgtcttgatccacccagtagattttccggtaggaatgatcggggggaccaggtgcccaaccggaaagatgatcgatcgcgggaacgggagagagaacgccggcgatcccgggaacgaagcccccagagaaagcggtctagagagcgcagccctagacgagagcgcgaacggagccctcgacgtgtccggagggtggtgccacgctacacggtgcagttctctaagtttagcctagattgtccaagctgtgacatgatggaactgcgtcgaagatatcaaaatctctacattccttcggatttttttgacgcgcaattcacgtgggtggacgcctttccgttaagtagaccattccagcttggcaattactgcaatttctacgtcatgcaccgcgaagtagagagtctcgaaaagaacatggcaattcttgatccaccagatgcggatcatctgtacagcgcaaaggtcatgctcatggcctctccctctatggaagatctgtaccataaatcgtgcgctcttgccgaggacccacaggagctgagggatgggttccagcacccagctagactggtcaagttcctggtgggaatgaagggcaaggatgaggccatggctattggaggccactggtcacctagcctcgacggtccagaccctgaaaaggatccgagcgtattgatcaaaaccgctatccggtgctgtaaagcattgactggaatcgatctgagcgtgtgcacacagtggtacaggttcgctgagatccgttatcaccgaccagaagaaacacataagggtcgtaccgtccctgcacacgtggaaacagtggtgctctttttccctgatgtatggcactgcctgcctacccgaagtgaatgggaaactctgagtcgggggtataaacagcaactggtggaaaagcttcagggggagcgcaaagaagccgacggtgaacaggatgaagaagagaaggatgatggggaggcaaaagagatcagcacccctacccactggagtaaactcgatccaaaaactatgaaagtgaatgatctgagaaaggaactggagtcccgtgccctgtcctctaaggggttgaagtcccagctgatcgcgcggctgactaaacagctgaaagtggaagagcagaaagaagaacagaaggagctggagaaatctgagaaagaagaagacgaggatgatgaccgcaaaagcgaggatgacaaggaagaagaagaaaggaagaggcaggaggaaatcgaaaggcaacggcgggagcgacgctatattctacccgacgaacctgccattatcgtccatccgaactgggccgccaagtccggtaagttcgattgcagcatcatgtctctttctgtactcctggactacagactagaagataataaggaacactcttttgaggtttcactctttgccgagcttttcaacgaaatgctgcagagagactttggggtccgcatctataagagtctgctatctcttccggagaaggaggataaaaaggagaaggacaagaaatccaagaaggatgaacggaaggataagaaggaagagcgagatgacgaaacggacgaacccaaacctaaaagaaggaaatccggggacgataaggacaagaaggaggacagggacgagcggaaaaaagaggacaagcgtaaagacgacagtaaagacgacgacgagactgaagaggataacaaccaggacgaatacgaccctatggaggctgaggaagctgaagatgaagaagatgaccgtgacgaagaggaaatgaccaagcgcgacgataagagagacatcaatcgttattgtaaggagcggcctagcaaggataaagaaaaggaaaaaacacagatgatcaccatcaaccgtgatttactcatggcttttgtgtactttgatcagtcacattgcggatatctcctcgagaaagaccttgaagaaatcctgtataccctcggccttcatctcagccgggcccaggttaagaaattgctcaataaagtggtcctacgggagagctgcttttaccggaagcttacagacaccagtaaagacgaagagaaccatgaggagtctgagtctcttcaggaagacatgctaggaaacagactactgctgccaacccctacagttaaacaagagtctaaagacgtggaggaaaacgtcggactaatagtgtataacggagccatggtggacgtgggctccctgctgcagaagctagaaaagtctgaaaaagttcgcgcggaggtcgaacaaaaactgcagctgctctag

SEQ ID NO: 103059 - DNA, 3453 bp, Artificial Sequence
  derived and/or modified sequence
atggcacagtttggaggtcagaaaaacccgccatgggcgacccagttcactgccacagctgtcagtcagcccgctgccctgggtgtgcaacagccgagcttgcttggagcctccccaaccatctacactcagcagaccgcactggcagctgccggtttgactacgcagacccccgctaactaccaacttacccagacagcggctctgcagcagcaggccgctgcggcagcagctgccctacagcagcaatacagtcagccccagcaagcactgtattcagtccagcagcaattacagcagccgcagcaaacattgttaactcaaccagcagtggcactcccgacgtctctgagcctttccaccccacagcctactgcacagattacggtcagctatcctacaccacggtcctcccagcaacagacgcagccccagaagcagcgtgtgttcacaggggtggtcactaagctccacgacaccttcggcttcgtggacgaagacgtgttctttcaattgtcggccgtgaaagggaagacacctcaagtcggggatcgggtgctcgtggaagctacgtataatcctaacatgccttttaaatggaacgctcagcggatacagacattgccgaaccagaatcagtctcagacacaaccgctccttaagactcctcctgccgtgctgcagcctatagccccacagaccacgttcggtgttcagacccagccacagcctcagtctctcctgcaggcacagatctcagctgcctccataacaccccttcttcaaacccagcctcagcccctgctgcaacaaccacagcagaaagcaggactgctccagcccccagttcgaattgtctctcagccacagccagcacggaggctagatccaccaagtagattctctggtagaaacgatcgcggagaccaggtgcccaacaggaaggatgataggtccagggaacgcgagcgagagcgccgtagaagtcgggagcgttccccacagcgtaagaggagccgcgaaaggtcccctagaagagagagggaacgcagtccacgcagagttcggagagtggtcccacgctacacagttcagttctccaagttctccctggactgtccttcttgcgacatgatggaactccgacggagataccagaatctgtacattccctccgacttttttgatgctcaatttacctgggtggatgccttcccactctcccggccattccaactgggcaactattgcaatttctacgtgatgcacagggaggtggagagcctggagaagaatatggctatcctggatccccctgatgctgaccatctgtattcagccaaggtcatgcttatggcttctccgagcatggaggacctctatcacaaatcgtgcgcccttgctgaggacccccaggagctgagggatggctttcagcatcccgcaaggctggtgaagtttctggtcgggatgaaggggaaagacgaggctatggccatcgggggacactggtccccatcactggacggcccagatcccgagaaagatccatcggtgctgatcaagacggccataaggtgctgtaaagctctgactggtatcgacttgtctgtctgtacgcagtggtacaggtttgcagagattaggtatcatcgaccagaagagacgcataagggcagaacagtgccggctcacgtggaaaccgtcgtcctcttctttccggatgtgtggcactgtttgccaactagaagtgaatgggaaacactttctcgcggttataaacagcaattggtggagaagctccagggcgaacggaaggaggcagatggcgaacaggatgaggaagagaaagacgacggggaagcaaaagaaatctccacgccaactcactggtccaagttggaccccaaaacgatgaaggtcaacgatctgcgcaaggaactcgagagtagggccctgtcgagcaaggggctgaagagccagctgattgccagactgaccaagcagctcaaggttgaggaacagaaggaagaacagaaggaattggaaaagtcagagaaagaagaagatgaagacgatgataggaagtccgaggatgataaggaggaagaggaaagaaagaggcaggaagaaatcgagcggcaacggagagaacggagatacatactccctgatgagcccgctatcattgtacatccgaactgggccgcaaagagcgggaagtttgattgtagcatcatgagtctatccgtgctactggattatcggctggaagataataaggagcactctttcgaagtgtcactctttgccgagctttttaatgagatgctccagcgagactttggagtcagaatctacaagtccttgcttagcctgcctgaaaaggaagacaagaaagaaaaagacaaaaaatccaaaaaagacgagcgtaaagacaagaaggaagaaagggacgatgagaccgacgaacctaagcccaagcgacggaagagcggcgatgacaaagataagaaggaagacagagatgagagaaagaaagaggacaagcgcaaggacgactccaaagacgacgatgaaaccgaggaggacaataaccaggacgagtacgatcccatggaggcagaggaggccgaggacgaggaggacgatcgtgacgaagaagagatgacaaaacgggatgacaaacgcgatattaaccgctattgcaaggagagacccagtaaggacaaggaaaaggagaagacccagatgattaccattaaccgggacctcctgatggcattcgtgtatttcgaccagagccattgcggttacctgctggagaaagaccttgaggagattctatacactctcggcctccacctgtcacgggctcaggtgaaaaagctcctgaataaggtcgtgctcagagaaagctgcttctatcgcaaactgaccgatacatcaaaggatgaggagaatcacgaggagtccgaaagcttgcaggaagatatgctgggcaataggttgctgctgccgaccccaaccgtcaagcaggagtccaaagacgtagaggaaaatgtggggctaattgtgtataacggtgcaatggttgacgtaggctcactcttgcagaagttggaaaaaagcgagaaagtgcgtgccgaggtggaacaaaaacttcagctgcttgaggagaagaccgatgaggacgaaaagacaatacttaatctcgaaaactccaacaaatccctgagtggcgaactacgcgaggtgaagaaggacctttctcaactgcaagaaaacctcaaaatcagcgagaatatgaacctgcagtttgaaaatcagatgaataaaacaatccgaaatcttagcactgtgatggatgaaatacacactgtgctgaaaaaggacaatgtcaagaacgaggacaaggatcagaaatcaaaggagaatggggcatccgtatag

SEQ ID NO: 103060 - DNA, 3408 bp, Artificial Sequence
  derived and/or modified sequence
atggcgcagttcggaggacagaagaaccctccgtgggccacacagtttactgctaccgctgtcagccagcctgccgcattaggggtgcagcagcccagcttattgggagcttccccaacaatatacacacagcagaccgccctggccgctgccggtctcactacccaaacccctgccaactaccaactgacacagaccgcagcactgcaacaacaggccgctgctgccgcagccgcactgcagcaactgcaacagccccagcaaactctgctgacccagcccgcagtcgccctgccgacatcactctccttgtccacacctcagccaactgcccagataaccgtgtcctatccaacaccgagatcttcgcagcagcaaactcagcctcagaagcaacgagtctttacaggcgtggttacaaagctgcatgatacctttggttttgtggatgaagatgtgttttttcaactgtcggcagtcaagggcaaaaccccccaggttggggacagagtattagtcgaggccacatacaaccccaacatgcccttcaagtggaacgcacagcgtatacaaacccttcctaaccagaaccagtcacaaactcagccccttctcaaaacgcctcccgctgtactccaaccgatcgccccacagacaacattcggggtccagactcagccgcagcctcagtcgctgttgcaggctcaaatctctgctgcctcaatcaccccactgcttcaaactcagccgcagcctttgctgcagcagccgcagcaaaaggccggattactccagccccctgtgcgcatcgtgtcccagccccagcccgctcgaagactagatcccccatctcggttttccggcagaaacgatcgaggagaccaggtcccaaataggaaggacgatcggagccgcgagcgcgaaagggagagacggaggtctagggagcgcagcccccagcgcaaacgaagcagagaaagaagtccacggagagagagagagagaagccccaggagagtcagaagagttgtacctcgctatacggttcagttctccaagttctccctcgactgcccatcctgtgatatgatggagctacgcagaaggtatcagaatctctacatcccttccgacttttttgacgcccagttcacttgggtggatgccttcccactgtccaggccttttcagttaggaaattactgtaacttttatgtcatgcacagagaagtagagagcttggaaaaaaatatggctatcctggaccctcccgatgccgaccacctttattctgccaaagtgatgttgatggcaagcccatccatggaggatctgtaccataagtcctgtgcccttgccgaagatccccaggaattgcgggatggttttcagcaccctgcacgtttggtgaagttcctcgtgggtatgaaaggaaaagatgaagcaatggctatcggcggacattggtctcctagcttagacgggccagaccccgaaaaggaccccagcgtgcttatcaagacggccattagatgttgcaaggcgctcaccggcattgacctctccgtttgcacccaatggtatcggttcgcagagataagataccatcggcctgaggaaacccacaaaggtcgaacagtgcctgctcacgtggagactgtggtactcttctttccagacgtctggcattgcctccccacacgctccgaatgggaaacactgagtaggggctacaagcaacagcttgtcgagaaattgcagggcgaaagaaaagaagccgatggcgaacaggatgaggaggaaaaggatgatggggaggccaaggaaatctcaacaccaacgcattggagtaaactggatcctaagacaatgaaggtgaatgaccttcggaaggaactggaaagccgggcactctccagcaagggcctaaaatcccagctgatagccagactgactaaacagcttaaggtggaggagcagaaggaggaacaaaaagagctggaaaaatccgagaaggaggaggatgaagacgacgaccgaaagagcgaagatgataaggaggaagaggaaaggaaaagacaggaggaaatcgaacgccagcgcagggagcgcaggtatatcctacccgatgagcccgctataattgttcacccaaactgggcggctaaatcagggaagttcgattgtagtattatgtccctgagcgtgttgctcgattatagactggaggataataaggagcattcttttgaggtctccctgtttgccgaactctttaacgaaatgcttcagcgggatttcggagtgagaatatataagtctctgctgagtctgcccgagaaggaggataaaaaagagaaagataaaaaaagtaagaaggatgagcggaaggataagaaagaggagcgcgacgacgaaaccgatgagccgaagcccaaaagacgcaagtccggtgacgacaaggacaaaaaggaggacagggatgagagaaagaaggaggataagagaaaagatgatagcaaggacgacgacgagacggaggaggacaataatcaggatgaatatgaccctatggaggccgaggaggccgaagatgaggaagatgacagggacgaggaggagatgaccaaacgtgatgacaagcgcgacatcaaccgctactgtaaagagagaccctccaaggataaggaaaaggagaaaacacagatgattacgataaacagggacctcttgatggctttcgtatactttgaccaatctcactgtggataccttctggagaaagacctcgaggaaattttatatacgttaggcctccatctgtctcgcgcacaggtcaagaaactgctcaacaaagtggtattacgcgagagttgcttctatcggaagctgactgatacttccaaggacgaggagaatcatgaggaaagtgaatccttgcaggaagacatgttgggcaaccggttgctgttgccaactcctaccgtgaaacaagagagcaaggatgttgaggaaaatgtaggtttgatcgtgtataatggggctatggtcgatgttgggtcgttgttgcaaaaactggagaaaagcgagaaagtgcgcgctgaggtcgaacaaaaactgcaactgctcgaggagaagaccgatgaggacgaaaaaactattcttaatctagagaatagcaataagtccctcagcggcgaactccgtgaggtgaaaaaggacctatctcagctgcaggagaacctgaagatcagtgagaacatgaaccttcagtttgagaatcagatgaacaagactattaggaatcttagtaccgtaatggacgagatacacaccgtgctcaaaaaagataacgtgaaaaacgaggataaggaccagaaaagcaaggaaaacggtgcctcggtgtag

SEQ ID NO: 103061 - DNA, 360 bp, Artificial Sequence
  derived and/or modified sequence
atggcacagttcggcggtcagaaaaatccaccgtgggcaactcagttcactgccacagctgtgagtcaacccgctgcactaggcgttcagcagccctccctgctaggggcttctccgaccatttacacgcaacagacggcactggctgctgctggactgacaacccaaactccagccaattaccagcttactcagactgccgctctgcagcagcaggccgctgctgctgcggcagctctgcagcaacagtactctcagccccagcaggcgttatactctgtgcagcaacagctccagcagccccagcagacgctgctgacccagcctgctgtggccttgcccacatcgctgtccctctag

SEQ ID NO: 103062 - DNA, 516 bp, Artificial Sequence
  derived and/or modified sequence
atggctcagtttgggggtcaaaagaatcccccttgggctactcagtttaccgccaccgcagtgtctcagcccgcagctctcggtgtgcagcagccatctctcctcggagccagccctaccatttatacccagcagacagccctggccgcagcagggcttacaacacagacgcccgcaaattaccaactgactcagaccgctgccctacagcagcaagctgctgctgctgcggcagccttgcagcagcagtactcacagcctcagcaggcattatactctgtgcagcagcagcttcagcagccccagcagactctcctgacccagcccgctgtcgcccttccaacaagtctgtcactttctacacctcagccaactgctcagataacagtttcctatcccacgccaagaagctcacagcagcagacacagccgcagaagcagcgggtgtttaccggagtggttacgaaactgcacgacaccttcggctttgtggacgaagacgtgtttttccaatag

SEQ ID NO: 103063 - DNA, 3132 bp, Artificial Sequence
  derived and/or modified sequence
atggctcaattcggtggccaaaagaaccctccctgggcaacacagtttaccgccacggccgtcagccagcctgccgctctgggagtccaacagccctcccttctcggggctagtcctactatctacacccaacagactgctcttgcagcagctggcctgacaacccaaacgccagccaactatcagctgacacagacagccgcactgcagcagcaggctgccgcagccgctgccgctctgcagcaactccagcagccccaacagactttgctcacccagcccgcagtcgcgctgccaacaagtttgtcgctgagtacgccccaacctactgctcaaatcaccgtgagttaccctacaccgcgatcaagtcagcagcagactcagccccagaaacagagagtgtttaccggagtggtgactaagttacacgatacatttgggttcgtcgacgaggacgttttttttcagctttccgctgtcaagggcaaaacccctcaggtcggagatcgggtactggtcgaagcaacctacaaccctaatatgccattcaagtggaacgcacaaaggatccagaccctgcccaatcagaatcagtctcagacgcagcctctgctgaaaacccctccagcggtcctacagccgattgctccccagactaccttcggcgtacagacacaaccacagcctcagtccctgctccaggctcagatctctgcagctagtattaccccgctgcttcagacgcaaccccagccactgttgcagcagcctcagcagaaggccggtctgctgcagcctcctgtgagaatcgtctcccaaccgcagcctgctcgtagactcgatccaccgagtagattctcaggaagaaacgatagaggtgatcaggtccctaatcgcaaagacgaccgatcaagagagcgggagcgggaacggaggcgctcccgcgagaggagtccgcaaaggaagcgcagcagggaacggagccctcggagagaaagagagcgctctccccgtagggtccgacgcgttgtacccagatacactgtgcaattcagtaagttctcgttggattgtccatcatgcgatatgatggaattgaggcgcagataccagaatctttacatcccatccgatttcttcgacgcacagtttacctgggtggatgccttccccctgtctagacctttccaacttgggaactactgcaatttctatgtcatgcacagggaagtggagtccctcgaaaaaaatatggcgattctggatccacctgatgccgatcatctttattcagccaaggttatgcttatggcctcaccaagcatggaagacctgtaccacaagtcttgtgctctagccgaagatccgcaggaacttcgagatggcttccagcatcccgctcgacttgttaagttcctcgtggggatgaaaggtaaggatgaggccatggctattggcggacactggtcgccatccttggatgggccagatcctgagaaggatccatccgtgttgatcaagacagcgattagatgttgtaaagctctcactggcatcgatctgtcggtgtgcacgcaatggtatcggtttgccgagattaggtaccatcggcctgaagaaacacacaaggggagaacagtacccgctcatgttgagacagttgtgctgttttttccggatgtttggcactgcttaccaactcgcagcgaatgggagaccctgagtagaggctacaaacagcagctggttgaaaagctgcaaggcgagcgcaaggaggccgacggcgagcaggatgaggaggaaaaggacgacggtgaagcaaaggagatctcaaccccgacccactggtctaagctcgatcctaagacgatgaaagtcaacgatctacggaaagagctcgagtccagggccctatctagcaaaggactaaagtcccagttgatcgcgagactcactaaacagcttaaggtagaagaacaaaaagaagagcaaaaagaattggaaaagtctgagaaagaagaggacgaagatgatgacagaaagagcgaggacgacaaagaagaggaggagcgtaaacgtcaggaggagatagagagacaacggagagaacggcgatacatcctccccgatgagcccgcaattatcgtccaccctaactgggccgctaagtccggtaaattcgattgttccatcatgtctctgagtgtcctcttagattaccgcctcgaggacaacaaagagcacagttttgaggtgtccctatttgcagagctgtttaatgagatgctacagagggacttcggggtgcggatttataagagtcttctatccctccccgagaaggaggataagaaggaaaaagacaagaagagtaagaaagatgagaggaaggataagaaagaggaacgcgacgacgaaacggatgagccaaagcccaagcgacgtaagtctggtgacgataaggacaaaaaagaggacagagatgagcggaaaaaagaagacaaaagaaaggacgatagtaaagacgacgacgagacagaagaggataataaccaagatgagtacgacccaatggaagctgaagaggccgaagatgaagaagacgatcgagatgaggaggagatgacgaagcgagacgataaacgggatataaatcgctattgcaaagagcggccttcaaaagataaagagaaagaaaaaacccagatgatcacgattaaccgtgatctgcttatggctttcgtctacttcgaccagtcccactgcggatatctcttggagaaggatctagaggaaattttatatactctcggacttcacctctccagggctcaggtcaaaaagctgttaaacaaggttgttttacgtgagtcctgtttctacaggaaactgactgacacatctaaggatgaggaaaatcacgaagagagcgaatccctccaagaagacatgttgggtaacagattactgctccccacgcccactgtaaaacaggaatctaaagacgtcgaagagaacgtgggcctcatagtatacaacggcgctatggtcgacgtggggtccctactccaaaaactcgaaaagtctgagaaagtgagagccgaggtggaacagaaactccagttgctgtag

SEQ ID NO: 103064 - DNA, 4683 bp, Artificial Sequence
  derived and/or modified sequence
gaagttggcgcatgcgcctaaagctgacgggtttgaaatggcttcgatgttagccgggacccgactcagatcgatgctatagaagacaaacaagggaaggttttttttccttttgcatcatggctcaatttggaggacagaagaatccgccatgggctactcagtttacagccactgcagtatcacagccagctgcactgggtgttcaacagccatcactccttggagcatctcctaccatttatacacagcaaactgcattggcagcagcaggccttaccacacaaactccagcaaactatcagttaacacaaactgctgcattgcagcaacaagccgcagctgcagcagctgcattacaacagcaatattcacaacctcagcaggccctgtatagtgtgcaacaacagttacagcaaccccagcaaaccctcttaacacagccagctgttgcactgcctacaagccttagcctgtctactcctcagccaacagcacaaataactgtatcatatccaacaccaaggtccagtcaacagcaaacccagcctcagaagcagcgtgttttcacaggggtggttacaaaactacatgatacgtttggatttgtggatgaagatgtattctttcagcttagtgctgtcaaagggaaaaccccccaagtaggtgacagagtattggttgaagctacttataatcctaatatgccttttaaatggaatgcacagagaattcaaacactaccaaatcagaatcagtcgcaaacccagccattactgaagactcctcctgctgtacttcagccaattgcaccacagacaacatttggtgttcagactcagccccagccccagtcactgctgcaggcacagatttcagcagcttctattacaccactattgcagactcaaccacagcccttattacagcagcctcagcaaaaagctggtttattgcagcctcctgttcgtatagtttcacagccacaaccggcacgacgattagatcccccatcccgattttcaggaagaaatgacagaggggatcaagtgcctaacagaaaagatgatcgaagtcgtgagagagagagagaaagacgtagatcgagagaaagatcacctcagaggaaacgttcccgggaaagatctccacgaagagagcgagagcgatcacctcggagagttcgacgtgttgttccacgttacacagttcagttttcaaagttttctttagattgtcccagttgtgacatgatggaactaaggcgccgttatcaaaatttgtatatacctagtgacttttttgatgctcaatttacatgggtggatgctttccctttgtcaagaccatttcagctgggaaattactgcaatttttatgtaatgcacagagaagtagagtccttagaaaaaaatatggccattcttgatccaccagatgctgaccacttatacagtgcaaaggtaatgctgatggctagccctagtatggaagatttatatcataagtcatgtgctcttgctgaggacccacaagaacttcgagatggattccaacatcctgctagacttgttaagtttttagtgggcatgaaaggcaaggatgaagctatggccattggaggccactggtctccttcgttggatggaccagacccagaaaaagatccctctgtgttgattaagactgctattcgttgttgtaaggctctgacaggcattgatctaagtgtgtgcacacaatggtaccgttttgcagagattcgctaccatcgccctgaggagacccacaaggggcgtacagttccagctcatgtggagacagtggttttatttttcccggatgtttggcattgccttcccacccgctcagagtgggaaaccctctcccgaggatacaagcagcagctggtcgagaagcttcagggtgaacgcaaggaggctgatggagaacaggatgaagaagagaaggatgatggtgaagctaaagaaatttctacacctacccattggtctaaacttgatccaaagacaatgaaggtaaatgacctccgaaaagaattagaaagtcgagctcttagttccaaaggattaaaatcccagttaatagcccgattgacaaaacagcttaaagtagaggaacaaaaagaagaacagaaggagttagagaaatctgaaaaagaagaggatgaggatgatgataggaaatctgaagacgataaagaggaagaagaaaggaaacgtcaagaggaaatagaacgccagcgtcgagaaagaagatatattttgcctgatgaaccggccatcattgtacatccaaattgggctgcaaaaagtggcaagtttgattgtagcatcatgtctttgagtgtcctattggactacagattagaggataataaagaacattcatttgaggtttcattgtttgcggaacttttcaacgaaatgcttcaaagagattttggtgtccgtatatacaaatcattactgtctcttcctgagaaagaggacaaaaaagaaaaggataaaaaaagcaaaaaagatgagagaaaagataaaaaagaagaaagagatgatgaaactgatgaaccaaaacccaaacggagaaaatcaggcgatgataaagataaaaaagaagatagagatgaaaggaagaaagaagataaaagaaaagatgattctaaagatgatgatgaaactgaagaagataacaatcaagatgaatatgaccctatggaagcagaagaagctgaggatgaagaagatgatagggatgaggaagaaatgaccaaacgagatgacaaaagagatatcaacagatactgcaaggagaggccctctaaagataaggaaaaagaaaagactcaaatgatcacaattaacagagatctgttaatggcttttgtttattttgatcaaagtcattgtggttaccttcttgaaaaggatttggaagaaatactttatactcttggactacatctttctcgggctcaggtaaagaagcttcttaataaagtagtgctccgtgaatcttgcttttaccggaaattaacagacacctcaaaagatgaagagaaccatgaagagtctgagtcattgcaggaagatatgctaggaaacagattattacttccaacaccaacagtaaagcaggaatcaaaggatgtggaagaaaatgttggcctcattgtgtacaatggtgcaatggtagatgtaggaagcctcttgcaaaaattggaaaagagcgaaaaagtaagagctgaggtagaacagaagctgcagttactagaagaaaaaacagatgaagatgaaaaaaccatattaaatttggagaattccaacaaaagcctctctggtgaactcagagaagttaaaaaggaccttagtcagttacaagaaaacttaaagatttcggaaaacatgaatttacaatttgaaaaccaaatgaataagacaatcagaaacttatctacggtaatggatgaaatccacactgttctcaagaaggataatgtaaagaatgaagacaaagatcaaaaatccaaggagaatggtgccagtgtatgataaaatccatgtagtgatgaggaatggtgttaaataatgtaatatataaaaatcatgatataagaatgtttgaaggtgatgcatgtttgattttagtagtataaatgtattttagttcaaatgatgtataaagttttatgaatgtgagtttctgcttttgaaaattgcttgtaattcctagccttcaaattattaaacactccttgagtgaaataattttgcattgcaaagtgttttaggatgaactttgttatagttttaactccaataaagttcatcagtttaattgactgtagtatttaattaccaaatttcttttattaaaatgcctagaaatttttaatttatagaattattaggttttaaaatttttagttcatctgttaaaatttcagtcaaaatcataaaatagcatgatgcttaatttttgcaagttttttgaaactttttgttttttttactcatcaccaaaaaatcccctcttgatcagtctctaaaagcattcattaaaaattcagttcaggccgggcacggtggctcacacctgtaatcccaacactttgggaggccgaggcaggtggatcacctgaggttaggagttcgagaccagcctggccaacatggtgaaacccggtctctactaaaaatataaaaattagctgggcatggtggtgggtgcctgtaatcccagctacttgggaggctgaggcaggagaatcgcttgaacccaggaggcggaggttgcagtcactcaggatcatgcagctacactccagcctgggcgacaagagtgaaactccatctcaaaaagaaaaaaaaaaaaaatcagtttatttgaaagacagtatatcagaaagaaagaagcaatagagaactagtattgttctttatgggttagactttacataatattagttgtcctgatgtcaatgttactgctttcaattaatttttctactttcccagaatagcatctatattccttttaattttgagggtttaaaaaaaaatgcagtgtatgtcaaatttacagtttagtaccaagccagtagatgtcagtatgatgccttaaattaagtcttctttaattaaagatatttttttaaattaa

SEQ ID NO: 103065 - DNA, 3813 bp, Artificial Sequence
  derived and/or modified sequence
gaagttggcgcatgcgcctaaagctgacgggtttgaaatggcttcgatgttagccgggacccgactcagatcgatgctatagaagacaaacaagggaaggttttttttccttttgcatcatggctcaatttggaggacagaagaatccgccatgggctactcagtttacagccactgcagtatcacagccagctgcactgggtgttcaacagccatcactccttggagcatctcctaccatttatacacagcaaactgcattggcagcagcaggccttaccacacaaactccagcaaactatcagttaacacaaactgctgcattgcagcaacaagccgcagctgcagcagctgcattacaacagttacagcaaccccagcaaaccctcttaacacagccagctgttgcactgcctacaagccttagcctgtctactcctcagccaacagcacaaataactgtatcatatccaacaccaaggtccagtcaacagcaaacccagcctcagaagcagcgtgttttcacaggggtggttacaaaactacatgatacgtttggatttgtggatgaagatgtattctttcagcttagtgctgtcaaagggaaaaccccccaagtaggtgacagagtattggttgaagctacttataatcctaatatgccttttaaatggaatgcacagagaattcaaacactaccaaatcagaatcagtcgcaaacccagccattactgaagactcctcctgctgtacttcagccaattgcaccacagacaacatttggtgttcagactcagccccagccccagtcactgctgcaggcacagatttcagcagcttctattacaccactattgcagactcaaccacagcccttattacagcagcctcagcaaaaagctggtttattgcagcctcctgttcgtatagtttcacagccacaaccggcacgacgattagatcccccatcccgattttcaggaagaaatgacagaggggatcaagtgcctaacagaaaagatgatcgaagtcgtgagagagagagagaaagacgtagatcgagagaaagatcacctcagaggaaacgttcccgggaaagatctccacgaagagagcgagagcgatcacctcggagagttcgacgtgttgttccacgttacacagttcagttttcaaagttttctttagattgtcccagttgtgacatgatggaactaaggcgccgttatcaaaatttgtatatacctagtgacttttttgatgctcaatttacatgggtggatgctttccctttgtcaagaccatttcagctgggaaattactgcaatttttatgtaatgcacagagaagtagagtccttagaaaaaaatatggccattcttgatccaccagatgctgaccacttatacagtgcaaaggtaatgctgatggctagccctagtatggaagatttatatcataagtcatgtgctcttgctgaggacccacaagaacttcgagatggattccaacatcctgctagacttgttaagtttttagtgggcatgaaaggcaaggatgaagctatggccattggaggccactggtctccttcgttggatggaccagacccagaaaaagatccctctgtgttgattaagactgctattcgttgttgtaaggctctgacaggcattgatctaagtgtgtgcacacaatggtaccgttttgcagagattcgctaccatcgccctgaggagacccacaaggggcgtacagttccagctcatgtggagacagtggttttatttttcccggatgtttggcattgccttcccacccgctcagagtgggaaaccctctcccgaggatacaagcagcagctggtcgagaagcttcagggtgaacgcaaggaggctgatggagaacaggatgaagaagagaaggatgatggtgaagctaaagaaatttctacacctacccattggtctaaacttgatccaaagacaatgaaggtaaatgacctccgaaaagaattagaaagtcgagctcttagttccaaaggattaaaatcccagttaatagcccgattgacaaaacagcttaaagtagaggaacaaaaagaagaacagaaggagttagagaaatctgaaaaagaagaggatgaggatgatgataggaaatctgaagacgataaagaggaagaagaaaggaaacgtcaagaggaaatagaacgccagcgtcgagaaagaagatatattttgcctgatgaaccggccatcattgtacatccaaattgggctgcaaaaagtggcaagtttgattgtagcatcatgtctttgagtgtcctattggactacagattagaggataataaagaacattcatttgaggtttcattgtttgcggaacttttcaacgaaatgcttcaaagagattttggtgtccgtatatacaaatcattactgtctcttcctgagaaagaggacaaaaaagaaaaggataaaaaaagcaaaaaagatgagagaaaagataaaaaagaagaaagagatgatgaaactgatgaaccaaaacccaaacggagaaaatcaggcgatgataaagataaaaaagaagatagagatgaaaggaagaaagaagataaaagaaaagatgattctaaagatgatgatgaaactgaagaagataacaatcaagatgaatatgaccctatggaagcagaagaagctgaggatgaagaagatgatagggatgaggaagaaatgaccaaacgagatgacaaaagagatatcaacagatactgcaaggagaggccctctaaagataaggaaaaagaaaagactcaaatgatcacaattaacagagatctgttaatggcttttgtttattttgatcaaagtcattgtggttaccttcttgaaaaggatttggaagaaatactttatactcttggactacatctttctcgggctcaggtaaagaagcttcttaataaagtagtgctccgtgaatcttgcttttaccggaaattaacagacacctcaaaagatgaagagaaccatgaagagtctgagtcattgcaggaagatatgctaggaaacagattattacttccaacaccaacagtaaagcaggaatcaaaggatgtggaagaaaatgttggcctcattgtgtacaatggtgcaatggtagatgtaggaagcctcttgcaaaaattggaaaagagcgaaaaagtaagagctgaggtagaacagaagctgcagttactagaagaaaaaacagatgaagatgaaaaaaccatattaaatttggagaattccaacaaaagcctctctggtgaactcagagaagttaaaaaggaccttagtcagttacaagaaaacttaaagatttcggaaaacatgaatttacaatttgaaaaccaaatgaataagacaatcagaaacttatctacggtaatggatgaaatccacactgttctcaagaaggataatgtaaagaatgaagacaaagatcaaaaatccaaggagaatggtgccagtgtatgataaaatccatgtagtgatgaggaatggtgttaaataatgtaatatataaaaatcatgatataagaatgtttgaaggtgatgcatgtttgattttagtagtataaatgtattttagttcaaatgatgtataaagttttatgaatgtgagtttctgcttttgaaaattgcttgtaattcctagccttcaaattattaaacactccttgagtgaaataattttgcattgcaaagtgttttaggatgaactttgttatagttttaactccaataaagttcatcagtttaa

SEQ ID NO: 103066 - DNA, 552 bp, Artificial Sequence
  derived and/or modified sequence
cttcagagcaagcgcaagacatatagccccgctcattgttaagcgaggccaaggcaacccttaggcgcgctctatttcccctttcgtagcgaaagggccaggcgtattgagcggtcaggggagcgcgcacgcagaacgtcagccaatcgatgctatagaagacaaacaagggaaggttttttttccttttgcatcatggctcaatttggaggacagaagaatccgccatgggctactcagtttacagccactgcagtatcacagccagctgcactgggtgttcaacagccatcactccttggagcatctcctaccatttatacacagcaaactgcattggcagcagcaggccttaccacacaaactccagcaaactatcagttaacacaaactgctgcattgcagcaacaagccgcagctgcagcagctgcattacaacagcaatattcacaacctcagcaggccctgtatagtgtgcaacaacagttacagcaaccccagcaaaccctcttaacacagccagctgttgcactgcctacaagccttagcctg

SEQ ID NO: 103067 - DNA, 754 bp, Artificial Sequence
  derived and/or modified sequence
agttggcgcatgcgcctaaagctgacgggtttgaaatggcttcgatgttagccgggacccgactcaggtgaaggtctggtccccgtagttggagcagtgggcggccaagccgggtctcttaacatcttgtcgaatctgtggaagggccgggagcgatcttttgggtagcccggcggccccgggcggcgacgatcgatgctatagaagacaaacaagggaaggttttttttccttttgcatcatggctcaatttggaggacagaagaatccgccatgggctactcagtttacagccactgcagtatcacagccagctgcactgggtgttcaacagccatcactccttggagcatctcctaccatttatacacagcaaactgcattggcagcagcaggccttaccacacaaactccagcaaactatcagttaacacaaactgctgcattgcagcaacaagccgcagctgcagcagctgcattacaacagcaatattcacaacctcagcaggccctgtatagtgtgcaacaacagttacagcaaccccagcaaaccctcttaacacagccagctgttgcactgcctacaagccttagcctgtctactcctcagccaacagcacaaataactgtatcatatccaacaccaaggtccagtcaacagcaaacccagcctcagaagcagcgtgttttcacaggggtggttacaaaactacatgatacgtttggatttgtggatgaagatgtattctttcag

SEQ ID NO: 103068 - DNA, 3224 bp, Artificial Sequence
  derived and/or modified sequence
gacgggtttgaaatggcttcgatgttagccgggacccgactcagatcgatgctatagaagacaaacaagggaaggttttttttccttttgcatcatggctcaatttggaggacagaagaatccgccatgggctactcagtttacagccactgcagtatcacagccagctgcactgggtgttcaacagccatcactccttggagcatctcctaccatttatacacagcaaactgcattggcagcagcaggccttaccacacaaactccagcaaactatcagttaacacaaactgctgcattgcagcaacaagccgcagctgcagcagctgcattacaacagttacagcaaccccagcaaaccctcttaacacagccagctgttgcactgcctacaagccttagcctgtctactcctcagccaacagcacaaataactgtatcatatccaacaccaaggtccagtcaacagcaaacccagcctcagaagcagcgtgttttcacaggggtggttacaaaactacatgatacgtttggatttgtggatgaagatgtattctttcagcttagtgctgtcaaagggaaaaccccccaagtaggtgacagagtattggttgaagctacttataatcctaatatgccttttaaatggaatgcacagagaattcaaacactaccaaatcagaatcagtcgcaaacccagccattactgaagactcctcctgctgtacttcagccaattgcaccacagacaacatttggtgttcagactcagccccagccccagtcactgctgcaggcacagatttcagcagcttctattacaccactattgcagactcaaccacagcccttattacagcagcctcagcaaaaagctggtttattgcagcctcctgttcgtatagtttcacagccacaaccggcacgacgattagatcccccatcccgattttcaggaagaaatgacagaggggatcaagtgcctaacagaaaagatgatcgaagtcgtgagagagagagagaaagacgtagatcgagagaaagatcacctcagaggaaacgttcccgggaaagatctccacgaagagagcgagagcgatcacctcggagagttcgacgtgttgttccacgttacacagttcagttttcaaagttttctttagattgtcccagttgtgacatgatggaactaaggcgccgttatcaaaatttgtatatacctagtgacttttttgatgctcaatttacatgggtggatgctttccctttgtcaagaccatttcagctgggaaattactgcaatttttatgtaatgcacagagaagtagagtccttagaaaaaaatatggccattcttgatccaccagatgctgaccacttatacagtgcaaaggtaatgctgatggctagccctagtatggaagatttatatcataagtcatgtgctcttgctgaggacccacaagaacttcgagatggattccaacatcctgctagacttgttaagtttttagtgggcatgaaaggcaaggatgaagctatggccattggaggccactggtctccttcgttggatggaccagacccagaaaaagatccctctgtgttgattaagactgctattcgttgttgtaaggctctgacaggcattgatctaagtgtgtgcacacaatggtaccgttttgcagagattcgctaccatcgccctgaggagacccacaaggggcgtacagttccagctcatgtggagacagtggttttatttttcccggatgtttggcattgccttcccacccgctcagagtgggaaaccctctcccgaggatacaagcagcagctggtcgagaagcttcagggtgaacgcaaggaggctgatggagaacaggatgaagaagagaaggatgatggtgaagctaaagaaatttctacacctacccattggtctaaacttgatccaaagacaatgaaggtaaatgacctccgaaaagaattagaaagtcgagctcttagttccaaaggattaaaatcccagttaatagcccgattgacaaaacagcttaaagtagaggaacaaaaagaagaacagaaggagttagagaaatctgaaaaagaagaggatgaggatgatgataggaaatctgaagacgataaagaggaagaagaaaggaaacgtcaagaggaaatagaacgccagcgtcgagaaagaagatatattttgcctgatgaaccggccatcattgtacatccaaattgggctgcaaaaagtggcaagtttgattgtagcatcatgtctttgagtgtcctattggactacagattagaggataataaagaacattcatttgaggtttcattgtttgcggaacttttcaacgaaatgcttcaaagagattttggtgtccgtatatacaaatcattactgtctcttcctgagaaagaggacaaaaaagaaaaggataaaaaaagcaaaaaagatgagagaaaagataaaaaagaagaaagagatgatgaaactgatgaaccaaaacccaaacggagaaaatcaggcgatgataaagataaaaaagaagatagagatgaaaggaagaaagaagataaaagaaaagatgattctaaagatgatgatgaaactgaagaagataacaatcaagatgaatatgaccctatggaagcagaagaagctgaggatgaagaagatgatagggatgaggaagaaatgaccaaacgagatgacaaaagagatatcaacagatactgcaaggagaggccctctaaagataaggaaaaagaaaagactcaaatgatcacaattaacagagatctgttaatggcttttgtttattttgatcaaagtcattgtggttaccttcttgaaaaggatttggaagaaatactttatactcttggactacatctttctcgggctcaggtaaagaagcttcttaataaagtagtgctccgtgaatcttgcttttaccggaaattaacagacacctcaaaagatgaagagaaccatgaagagtctgagtcattgcaggaagatatgctaggaaacagattattacttccaacaccaacagtaaagcaggaatcaaaggatgtggaagaaaatgttggcctcattgtgtacaatggtgcaatggtagatgtaggaagcctcttgcaaaaattggaaaagagcgaaaaagtaagagctgaggtagaacagaagctgcagttactag

SEQ ID NO: 103069 - DNA, 3453 bp, Artificial Sequence
  derived and/or modified sequence
atggcccagttcggcggccagaagaaccccccctgggccacccagttcaccgccaccgccgtgagccagcccgccgccctgggcgtgcagcagcccagcctgctgggcgccagccccaccatctacacccagcagaccgccctggccgccgccggcctgaccacccagacccccgccaactaccagctgacccagaccgccgccctgcagcagcaggccgccgccgccgccgccgccctgcagcagcagtacagccagccccagcaggccctgtacagcgtgcagcagcagctgcagcagccccagcagaccctgctgacccagcccgccgtggccctgcccaccagcctgagcctgagcaccccccagcccaccgcccagatcaccgtgagctaccccacccccagaagcagccagcagcagacccagccccagaagcagagagtgttcaccggcgtggtgaccaagctgcacgacaccttcggcttcgtggacgaggacgtgttcttccagctgagcgccgtgaagggcaagaccccccaggtgggcgacagagtgctggtggaggccacctacaaccccaacatgcccttcaagtggaacgcccagagaatccagaccctgcccaaccagaaccagagccagacccagcccctgctgaagaccccccccgccgtgctgcagcccatcgccccccagaccaccttcggcgtgcagacccagccccagccccagagcctgctgcaggcccagatcagcgccgccagcatcacccccctgctgcagacccagccccagcccctgctgcagcagccccagcagaaggccggcctgctgcagccccccgtgagaatcgtgagccagccccagcccgccagaagactggacccccccagcagattcagcggcagaaacgacagaggcgaccaggtgcccaacagaaaggacgacagaagcagagagagagagagagagagaagaagaagcagagagagaagcccccagagaaagagaagcagagagagaagccccagaagagagagagagagaagccccagaagagtgagaagagtggtgcccagatacaccgtgcagttcagcaagttcagcctggactgccccagctgcgacatgatggagctgagaagaagataccagaacctgtacatccccagcgacttcttcgacgcccagttcacctgggtggacgccttccccctgagcagacccttccagctgggcaactactgcaacttctacgtgatgcacagagaggtggagagcctggagaagaacatggccatcctggacccccccgacgccgaccacctgtacagcgccaaggtgatgctgatggccagccccagcatggaggacctgtaccacaagagctgcgccctggccgaggacccccaggagctgagagacggcttccagcaccccgccagactggtgaagttcctggtgggcatgaagggcaaggacgaggccatggccatcggcggccactggagccccagcctggacggccccgaccccgagaaggaccccagcgtgctgatcaagaccgccatcagatgctgcaaggccctgaccggcatcgacctgagcgtgtgcacccagtggtacagattcgccgagatcagataccacagacccgaggagacccacaagggcagaaccgtgcccgcccacgtggagaccgtggtgctgttcttccccgacgtgtggcactgcctgcccaccagaagcgagtgggagaccctgagcagaggctacaagcagcagctggtggagaagctgcagggcgagagaaaggaggccgacggcgagcaggacgaggaggagaaggacgacggcgaggccaaggagatcagcacccccacccactggagcaagctggaccccaagaccatgaaggtgaacgacctgagaaaggagctggagagcagagccctgagcagcaagggcctgaagagccagctgatcgccagactgaccaagcagctgaaggtggaggagcagaaggaggagcagaaggagctggagaagagcgagaaggaggaggacgaggacgacgacagaaagagcgaggacgacaaggaggaggaggagagaaagagacaggaggagatcgagagacagagaagagagagaagatacatcctgcccgacgagcccgccatcatcgtgcaccccaactgggccgccaagagcggcaagttcgactgcagcatcatgagcctgagcgtgctgctggactacagactggaggacaacaaggagcacagcttcgaggtgagcctgttcgccgagctgttcaacgagatgctgcagagagacttcggcgtgagaatctacaagagcctgctgagcctgcccgagaaggaggacaagaaggagaaggacaagaagagcaagaaggacgagagaaaggacaagaaggaggagagagacgacgagaccgacgagcccaagcccaagagaagaaagagcggcgacgacaaggacaagaaggaggacagagacgagagaaagaaggaggacaagagaaaggacgacagcaaggacgacgacgagaccgaggaggacaacaaccaggacgagtacgaccccatggaggccgaggaggccgaggacgaggaggacgacagagacgaggaggagatgaccaagagagacgacaagagagacatcaacagatactgcaaggagagacccagcaaggacaaggagaaggagaagacccagatgatcaccatcaacagagacctgctgatggccttcgtgtacttcgaccagagccactgcggctacctgctggagaaggacctggaggagatcctgtacaccctgggcctgcacctgagcagagcccaggtgaagaagctgctgaacaaggtggtgctgagagagagctgcttctacagaaagctgaccgacaccagcaaggacgaggagaaccacgaggagagcgagagcctgcaggaggacatgctgggcaacagactgctgctgcccacccccaccgtgaagcaggagagcaaggacgtggaggagaacgtgggcctgatcgtgtacaacggcgccatggtggacgtgggcagcctgctgcagaagctggagaagagcgagaaggtgagagccgaggtggagcagaagctgcagctgctggaggagaagaccgacgaggacgagaagaccatcctgaacctggagaacagcaacaagagcctgagcggcgagctgagagaggtgaagaaggacctgagccagctgcaggagaacctgaagatcagcgagaacatgaacctgcagttcgagaaccagatgaacaagaccatcagaaacctgagcaccgtgatggacgagatccacaccgtgctgaagaaggacaacgtgaagaacgaggacaaggaccagaagagcaaggagaacggcgccagcgtgtag

SEQ ID NO: 103070 - DNA, 3408 bp, Artificial Sequence
  derived and/or modified sequence
atggcccagttcggcggccagaagaaccccccctgggccacccagttcaccgccaccgccgtgagccagcccgccgccctgggcgtgcagcagcccagcctgctgggcgccagccccaccatctacacccagcagaccgccctggccgccgccggcctgaccacccagacccccgccaactaccagctgacccagaccgccgccctgcagcagcaggccgccgccgccgccgccgccctgcagcagctgcagcagccccagcagaccctgctgacccagcccgccgtggccctgcccaccagcctgagcctgagcaccccccagcccaccgcccagatcaccgtgagctaccccacccccagaagcagccagcagcagacccagccccagaagcagagagtgttcaccggcgtggtgaccaagctgcacgacaccttcggcttcgtggacgaggacgtgttcttccagctgagcgccgtgaagggcaagaccccccaggtgggcgacagagtgctggtggaggccacctacaaccccaacatgcccttcaagtggaacgcccagagaatccagaccctgcccaaccagaaccagagccagacccagcccctgctgaagaccccccccgccgtgctgcagcccatcgccccccagaccaccttcggcgtgcagacccagccccagccccagagcctgctgcaggcccagatcagcgccgccagcatcacccccctgctgcagacccagccccagcccctgctgcagcagccccagcagaaggccggcctgctgcagccccccgtgagaatcgtgagccagccccagcccgccagaagactggacccccccagcagattcagcggcagaaacgacagaggcgaccaggtgcccaacagaaaggacgacagaagcagagagagagagagagagagaagaagaagcagagagagaagcccccagagaaagagaagcagagagagaagccccagaagagagagagagagaagccccagaagagtgagaagagtggtgcccagatacaccgtgcagttcagcaagttcagcctggactgccccagctgcgacatgatggagctgagaagaagataccagaacctgtacatccccagcgacttcttcgacgcccagttcacctgggtggacgccttccccctgagcagacccttccagctgggcaactactgcaacttctacgtgatgcacagagaggtggagagcctggagaagaacatggccatcctggacccccccgacgccgaccacctgtacagcgccaaggtgatgctgatggccagccccagcatggaggacctgtaccacaagagctgcgccctggccgaggacccccaggagctgagagacggcttccagcaccccgccagactggtgaagttcctggtgggcatgaagggcaaggacgaggccatggccatcggcggccactggagccccagcctggacggccccgaccccgagaaggaccccagcgtgctgatcaagaccgccatcagatgctgcaaggccctgaccggcatcgacctgagcgtgtgcacccagtggtacagattcgccgagatcagataccacagacccgaggagacccacaagggcagaaccgtgcccgcccacgtggagaccgtggtgctgttcttccccgacgtgtggcactgcctgcccaccagaagcgagtgggagaccctgagcagaggctacaagcagcagctggtggagaagctgcagggcgagagaaaggaggccgacggcgagcaggacgaggaggagaaggacgacggcgaggccaaggagatcagcacccccacccactggagcaagctggaccccaagaccatgaaggtgaacgacctgagaaaggagctggagagcagagccctgagcagcaagggcctgaagagccagctgatcgccagactgaccaagcagctgaaggtggaggagcagaaggaggagcagaaggagctggagaagagcgagaaggaggaggacgaggacgacgacagaaagagcgaggacgacaaggaggaggaggagagaaagagacaggaggagatcgagagacagagaagagagagaagatacatcctgcccgacgagcccgccatcatcgtgcaccccaactgggccgccaagagcggcaagttcgactgcagcatcatgagcctgagcgtgctgctggactacagactggaggacaacaaggagcacagcttcgaggtgagcctgttcgccgagctgttcaacgagatgctgcagagagacttcggcgtgagaatctacaagagcctgctgagcctgcccgagaaggaggacaagaaggagaaggacaagaagagcaagaaggacgagagaaaggacaagaaggaggagagagacgacgagaccgacgagcccaagcccaagagaagaaagagcggcgacgacaaggacaagaaggaggacagagacgagagaaagaaggaggacaagagaaaggacgacagcaaggacgacgacgagaccgaggaggacaacaaccaggacgagtacgaccccatggaggccgaggaggccgaggacgaggaggacgacagagacgaggaggagatgaccaagagagacgacaagagagacatcaacagatactgcaaggagagacccagcaaggacaaggagaaggagaagacccagatgatcaccatcaacagagacctgctgatggccttcgtgtacttcgaccagagccactgcggctacctgctggagaaggacctggaggagatcctgtacaccctgggcctgcacctgagcagagcccaggtgaagaagctgctgaacaaggtggtgctgagagagagctgcttctacagaaagctgaccgacaccagcaaggacgaggagaaccacgaggagagcgagagcctgcaggaggacatgctgggcaacagactgctgctgcccacccccaccgtgaagcaggagagcaaggacgtggaggagaacgtgggcctgatcgtgtacaacggcgccatggtggacgtgggcagcctgctgcagaagctggagaagagcgagaaggtgagagccgaggtggagcagaagctgcagctgctggaggagaagaccgacgaggacgagaagaccatcctgaacctggagaacagcaacaagagcctgagcggcgagctgagagaggtgaagaaggacctgagccagctgcaggagaacctgaagatcagcgagaacatgaacctgcagttcgagaaccagatgaacaagaccatcagaaacctgagcaccgtgatggacgagatccacaccgtgctgaagaaggacaacgtgaagaacgaggacaaggaccagaagagcaaggagaacggcgccagcgtgtag

SEQ ID NO: 103071 - DNA, 360 bp, Artificial Sequence
  derived and/or modified sequence
atggcccagttcggcggccagaagaaccccccctgggccacccagttcaccgccaccgccgtgagccagcccgccgccctgggcgtgcagcagcccagcctgctgggcgccagccccaccatctacacccagcagaccgccctggccgccgccggcctgaccacccagacccccgccaactaccagctgacccagaccgccgccctgcagcagcaggccgccgccgccgccgccgccctgcagcagcagtacagccagccccagcaggccctgtacagcgtgcagcagcagctgcagcagccccagcagaccctgctgacccagcccgccgtggccctgcccaccagcctgagcctgtag

SEQ ID NO: 103072 - DNA, 516 bp, Artificial Sequence
  derived and/or modified sequence
atggcccagttcggcggccagaagaaccccccctgggccacccagttcaccgccaccgccgtgagccagcccgccgccctgggcgtgcagcagcccagcctgctgggcgccagccccaccatctacacccagcagaccgccctggccgccgccggcctgaccacccagacccccgccaactaccagctgacccagaccgccgccctgcagcagcaggccgccgccgccgccgccgccctgcagcagcagtacagccagccccagcaggccctgtacagcgtgcagcagcagctgcagcagccccagcagaccctgctgacccagcccgccgtggccctgcccaccagcctgagcctgagcaccccccagcccaccgcccagatcaccgtgagctaccccacccccagaagcagccagcagcagacccagccccagaagcagagagtgttcaccggcgtggtgaccaagctgcacgacaccttcggcttcgtggacgaggacgtgttcttccagtag

SEQ ID NO: 103073 - DNA, 3132 bp, Artificial Sequence
  derived and/or modified sequence
atggcccagttcggcggccagaagaaccccccctgggccacccagttcaccgccaccgccgtgagccagcccgccgccctgggcgtgcagcagcccagcctgctgggcgccagccccaccatctacacccagcagaccgccctggccgccgccggcctgaccacccagacccccgccaactaccagctgacccagaccgccgccctgcagcagcaggccgccgccgccgccgccgccctgcagcagctgcagcagccccagcagaccctgctgacccagcccgccgtggccctgcccaccagcctgagcctgagcaccccccagcccaccgcccagatcaccgtgagctaccccacccccagaagcagccagcagcagacccagccccagaagcagagagtgttcaccggcgtggtgaccaagctgcacgacaccttcggcttcgtggacgaggacgtgttcttccagctgagcgccgtgaagggcaagaccccccaggtgggcgacagagtgctggtggaggccacctacaaccccaacatgcccttcaagtggaacgcccagagaatccagaccctgcccaaccagaaccagagccagacccagcccctgctgaagaccccccccgccgtgctgcagcccatcgccccccagaccaccttcggcgtgcagacccagccccagccccagagcctgctgcaggcccagatcagcgccgccagcatcacccccctgctgcagacccagccccagcccctgctgcagcagccccagcagaaggccggcctgctgcagccccccgtgagaatcgtgagccagccccagcccgccagaagactggacccccccagcagattcagcggcagaaacgacagaggcgaccaggtgcccaacagaaaggacgacagaagcagagagagagagagagagagaagaagaagcagagagagaagcccccagagaaagagaagcagagagagaagccccagaagagagagagagagaagccccagaagagtgagaagagtggtgcccagatacaccgtgcagttcagcaagttcagcctggactgccccagctgcgacatgatggagctgagaagaagataccagaacctgtacatccccagcgacttcttcgacgcccagttcacctgggtggacgccttccccctgagcagacccttccagctgggcaactactgcaacttctacgtgatgcacagagaggtggagagcctggagaagaacatggccatcctggacccccccgacgccgaccacctgtacagcgccaaggtgatgctgatggccagccccagcatggaggacctgtaccacaagagctgcgccctggccgaggacccccaggagctgagagacggcttccagcaccccgccagactggtgaagttcctggtgggcatgaagggcaaggacgaggccatggccatcggcggccactggagccccagcctggacggccccgaccccgagaaggaccccagcgtgctgatcaagaccgccatcagatgctgcaaggccctgaccggcatcgacctgagcgtgtgcacccagtggtacagattcgccgagatcagataccacagacccgaggagacccacaagggcagaaccgtgcccgcccacgtggagaccgtggtgctgttcttccccgacgtgtggcactgcctgcccaccagaagcgagtgggagaccctgagcagaggctacaagcagcagctggtggagaagctgcagggcgagagaaaggaggccgacggcgagcaggacgaggaggagaaggacgacggcgaggccaaggagatcagcacccccacccactggagcaagctggaccccaagaccatgaaggtgaacgacctgagaaaggagctggagagcagagccctgagcagcaagggcctgaagagccagctgatcgccagactgaccaagcagctgaaggtggaggagcagaaggaggagcagaaggagctggagaagagcgagaaggaggaggacgaggacgacgacagaaagagcgaggacgacaaggaggaggaggagagaaagagacaggaggagatcgagagacagagaagagagagaagatacatcctgcccgacgagcccgccatcatcgtgcaccccaactgggccgccaagagcggcaagttcgactgcagcatcatgagcctgagcgtgctgctggactacagactggaggacaacaaggagcacagcttcgaggtgagcctgttcgccgagctgttcaacgagatgctgcagagagacttcggcgtgagaatctacaagagcctgctgagcctgcccgagaaggaggacaagaaggagaaggacaagaagagcaagaaggacgagagaaaggacaagaaggaggagagagacgacgagaccgacgagcccaagcccaagagaagaaagagcggcgacgacaaggacaagaaggaggacagagacgagagaaagaaggaggacaagagaaaggacgacagcaaggacgacgacgagaccgaggaggacaacaaccaggacgagtacgaccccatggaggccgaggaggccgaggacgaggaggacgacagagacgaggaggagatgaccaagagagacgacaagagagacatcaacagatactgcaaggagagacccagcaaggacaaggagaaggagaagacccagatgatcaccatcaacagagacctgctgatggccttcgtgtacttcgaccagagccactgcggctacctgctggagaaggacctggaggagatcctgtacaccctgggcctgcacctgagcagagcccaggtgaagaagctgctgaacaaggtggtgctgagagagagctgcttctacagaaagctgaccgacaccagcaaggacgaggagaaccacgaggagagcgagagcctgcaggaggacatgctgggcaacagactgctgctgcccacccccaccgtgaagcaggagagcaaggacgtggaggagaacgtgggcctgatcgtgtacaacggcgccatggtggacgtgggcagcctgctgcagaagctggagaagagcgagaaggtgagagccgaggtggagcagaagctgcagctgctgtag

SEQ ID NO: 103074 - protein, 694 aa, Artificial Sequence
  derived and/or modified sequence
MLGTLRAMEGEDVEDDQLLQKLRASRRRFQRRMQRLIEKYNQPFEDTPVVQMATLTYETPQGLRIWGGRLIKERNEGEIQPAVPQSPLKNELRRKYLTQVDILLQGAEYFECAGNRAGRDVRVTPLPSLASPAVPAPGYCSRISRKSPGDPAKPASSPREWDPLHPSSTDMALVPRNDSLSLQETSSSSFLSSQPFEDDDICNVTISDLYAGMLHSMSRLLSTKPSSIISTKTFIMQNWNSRRRHRYKSRMNKTYCKGARRSQRSSKENFIPCSEPVKGTGALRDCKNVLDVSCRKTGLKLEKAFLEVNRPQIHKLDPSWKERKVTPSKYSSLIYFDSSATYNLDEENRFRTLKWLISPVKIVSRPTIRQGHGENRQREIEIRFDQLHREYCLSPRNQPRRMCLPDSWAMNMYRGGPASPGGLQGLETRRLSLPSSKAKAKSLSEAFENLGKRSLEAGRCLPKSDSSSSLPKTNPTHSATRPQQTSDLHVQGNSSGIFRKSVSPSKTLSVPDKEVPGHGRNRYDEIKEEFDKLHQKYCLKSPGQMTVPLCIGVSTDKASMEVRYQTEGFLGKLNPDPHFQGFQKLPSSPLGCRKSLLGSTAIEAPSSTCVARAITRDGTRDHQFPAKRPRLSEPQGSGRQGNSLGASDGVDNTVRPGDQGSSSQPNSEERGENTSYRMEEKSDFMLEKLETKSV

SEQ ID NO: 103075 - DNA, 2085 bp, Artificial Sequence
  derived and/or modified sequence
atgcttgggacacttcgcgcaatggaaggggaggatgttgaggacgaccagcttttgcagaagctcagggcaagcaggcggaggttccaacgccgcatgcagcgtctgatagagaaatataatcagccttttgaagacaccccggtagtacagatggcgacactgacttacgagacacctcagggacttagaatttggggcggtaggctgattaaggagcgtaatgaaggagaaattcaacctgctgtgccacagtcacctctaaaaaacgagctgcggcgcaagtacctgactcaagtggacattttgctgcagggagccgagtacttcgaatgtgccggcaaccgtgctgggcgcgacgtcagggtgactcccctgccaagcctggcaagtcctgctgtgcccgctcctggatattgtagccgtatatctagaaagagccctggtgatcctgccaaaccagcctcctcgcctagagagtgggatcctctgcacccaagtagcaccgatatggcgctggtgccccggaatgattccctttcattacaggaaacatcatccagcagttttctttcctctcagccttttgaggatgacgacatttgcaatgtgaccatctccgatctgtacgccgggatgctgcattccatgtcacggttgttgtctaccaagccgagttccatcatcagcacaaagacattcattatgcagaattggaacagtaggcgccggcataggtataagagcagaatgaataaaacatattgtaaaggggccaggcgctctcagagaagctctaaagagaacttcattccttgcagcgaacccgtgaagggcaccggcgcccttcgggactgcaaaaatgtgttggacgtcagttgtaggaaaactggcctgaagttagagaaagcttttctggaggtgaaccgaccccagatacacaaattagacccatcctggaaagagcggaaagtcacgccgtctaaatacagttctctgatatactttgacagctctgcaacctacaacctcgatgaagagaatcgatttcgcacactcaaatggttgatcagccctgttaaaatagtgtccaggccgacaattaggcaggggcatggagaaaaccggcagcgggagatagagataagatttgaccagctgcaccgagaatactgtctttcccctcggaatcaacctcgtagaatgtgtctacctgattcatgggccatgaacatgtatagagggggtcctgcgagccccggcgggctgcaggggctggaaacgcgccggttaagtctgccaagctccaaagctaaggccaaaagcttgagtgaggcatttgaaaaccttggcaaaaggagcctggaggccggtagatgcctgcctaagtcggattcttccagctctttgcccaaaactaaccccacacattctgcaacaaggccccaacaaacttccgatctccatgtccaaggaaatagtagcggcatctttagaaaatcagtgagcccgagtaagaccctatccgtgcctgacaaggaagtgcccggccatggacgcaaccgctatgatgaaatcaaggaagagtttgacaagcttcaccagaagtattgcctcaaaagtccaggccagatgactgtgccgctgtgcattggagttagcactgacaaggcatccatggaagtacggtaccaaaccgaggggttcctgggcaaactgaatcctgatccccacttccaggggtttcaaaagctcccaagttccccgttgggatgtcggaaaagtttgctgggatcaaccgccatcgaggctccaagctcaacatgtgtggccagagccattacaagagatggcaccagggaccatcagttcccggcgaaacgcccgcgcctctctgagcctcagggctcagggcggcagggtaacagtctgggagccagtgacggagtggataatacagtccggcctggggaccaaggatcaagcagccagcccaactcggaggaaaggggcgagaatacctcataccgaatggaagagaaatcagattttatgctagaaaagttagagaccaaaagcgtgtag

SEQ ID NO: 103076 - DNA, 2885 bp, Artificial Sequence
  derived and/or modified sequence
ctatttgagtttgtggcgcgcgaggccctgcagtccgggttggcgcttgggtactggctgggtccgatgctgggtacgctgcgcgccatggagggcgaggacgtggaagacgaccagctgctgcagaagctcagggccagtcgccgccgcttccagaggcgcatgcagcggctgatagagaagtacaaccagcccttcgaggacaccccggtggtgcaaatggccacgctgacctacgagacgccacagggattgagaatttggggtggaagactaataaaggaaagaaacgaaggagagatccagcctgcagtgcctcaaagccctttgaaaaatgaattaagaaggaaatacttgacccaagtggatatactgctacaaggtgcagagtattttgagtgtgcaggtaacagagctggaagggatgtacgtgtgactccgctgccttcactggcctcacctgccgtgcctgcccccggatactgcagtcgtatctccagaaagagtcctggtgacccagcgaaaccagcttcatctcccagagaatgggatcctttgcatccttcctccacagacatggccttagtacctagaaatgacagcctctccctacaagagaccagtagcagcagcttcttaagcagccagccctttgaagatgatgacatttgcaatgtgaccatcagtgacctgtacgcagggatgctgcactccatgagccggctgttgagcacaaagccatcaagcatcatctccaccaaaacgttcatcatgcaaaactggaactccaggaggaggcacagatataagagcaggatgaacaaaacatattgcaaaggagccagacgttctcagaggagctccaaggagaacttcataccctgctctgagcctgtgaaagggacaggggcattaagagattgcaagaacgtattagatgtttcttgccgtaagacaggtttaaaattggaaaaagcttttcttgaagtcaacagaccccaaatccataagttagatccaagttggaaggagcgcaaagtgacaccctcgaagtattcttccttgatttacttcgactccagtgcaacatataatcttgatgaggaaaatagatttaggacattaaaatggttaatttctcctgtaaaaatagtttccagaccaacaatacgacagggccatggagagaaccgtcagagggagattgaaatccgatttgatcagcttcatcgggaatattgcctgagtcccaggaaccagcctcgccggatgtgcctcccggactcctgggccatgaacatgtacagagggggtcctgcgagtcctggtggccttcagggcttagaaacccgcaggctgagtttaccttccagcaaagcaaaagcaaaaagtttaagtgaggcttttgaaaacctaggcaaaagatctctggaagcaggtaggtgcctgcccaagagcgattcatcttcatcacttccaaagaccaaccccacacacagcgcaactcgcccgcagcagacatctgaccttcacgttcagggaaatagttctggaatatttagaaagtcagtgtcacccagcaaaactctttcagtcccagataaagaagtgccaggccacggaaggaatcgttacgatgaaattaaagaagaatttgacaagcttcatcaaaagtattgcctcaaatctcctgggcagatgacagtgcctttatgtattggagtgtctacagataaagcaagtatggaagttcgatatcaaacagaaggcttcttaggaaaattaaatccagaccctcacttccagggtttccagaagttgccatcatcacccctggggtgcagaaaaagtctactgggctcaactgcaattgaggctccttcatctacatgtgttgctcgtgccatcacgagggatggcacgagggaccatcagttccctgcaaaaagacccaggctatcagaaccccagggctccggacgccagggcaattccctgggtgcctcagatggggtggacaacaccgtcagaccgggagaccagggcagctcttcacagcccaactcagaagagagaggagagaacacgtcttacaggatggaagagaaaagtgatttcatgctagaaaaattggaaactaaaagtgtgtagctaggttatttcggagtgttatttatcttcccacttgctctctgtttgtatttttgttttgtttttgattcttgagactgtgaggacttggttgacttctctgcccttaaagtaaatattagtgaaattggttccatcagagataacctcgagttcttggtgtagaaattatgtgaataaagttgctcaattagaatttttagggttctctttgataggcctgtttttctgatgtgtgtgttttttttgggggggggttatttgtttgtttgtttgtttgtttgtttgtttttgagacagtctctctctatcgcccaggctggagtgcggtggcacaatcttggctcactgcaacttccgcctcccgggttcaagcgattcttctgcctcagcctcccgagtagctgggattacaggcgcgcgccaccacgcctggctaatttttgtagttttagtagagacggggtttcaccatattgaccaggctggtctcgagctcctggcctcgtgatccatctgcctcggcctcccaaagtgctgggattataggcgtgagccactgctcccagccgtgtgttcttttttaaatttagatatgtccagagaatcctctctcctgtttcccatttcattcgagaatattgtttgcttgtgagacgtaagttcgagccctgcatgcaatgacccttgaaggaaaataaacagtcctggtggtcccagacgctcctgcagcc

SEQ ID NO: 103077 - DNA, 2085 bp, Artificial Sequence
  derived and/or modified sequence
atgctgggcaccctgcgggccatggagggagaagatgtggaggatgaccagctgctgcagaagctgcgggccagcagaagacgcttccagaggaggatgcagaggctgattgagaagtacaaccagccctttgaggacacccctgtggtgcagatggccaccctgacctatgagaccccccagggcctgcgcatctggggcggccgcctcatcaaggagagaaatgaaggagagatccagcctgctgtgccccagagccccctgaagaatgagctgcggaggaagtacctgacccaggtggacatcctgctgcagggcgctgagtactttgaatgtgccggcaacagagctggaagagatgtgcgggtgacccccctgcccagcctggccagccctgctgtgcctgcccctggctactgcagccgcatcagcaggaagagccctggggaccctgccaagccagccagcagcccccgggagtgggaccccctgcaccccagcagcacagacatggccctggtgcccagaaatgacagcctgagcctgcaggagaccagcagcagcagcttcctgagcagccagccctttgaagatgatgacatctgcaatgtgaccatcagtgacctgtatgccggcatgctgcacagcatgagccggctgctgagcaccaagcccagcagcatcatcagcaccaagaccttcatcatgcagaactggaacagcagaagaagacaccgctacaagagcaggatgaacaagacctactgcaagggggcccggcgcagccagaggagcagcaaggagaacttcatcccctgcagcgagcctgtgaagggcaccggggccctgcgggactgcaagaatgtgctggatgtgtcctgcaggaagacaggcctgaagctggagaaggccttcctggaggtgaaccggccccagatccacaagctggaccccagctggaaggagaggaaggtgacccccagcaagtacagcagcctcatctactttgacagcagcgccacctacaacctggatgaagaaaatcgcttccgcaccctgaagtggctgatcagccctgtgaagatcgtgtcccggcccaccatccggcagggccacggggagaaccggcagcgggagattgagatccgctttgaccagctgcaccgggagtactgcctgagccccaggaaccagcccaggaggatgtgcctgcctgacagctgggccatgaacatgtacagaggaggccctgccagccctgggggcctgcagggcctggagacccggcggctgagcctgcccagcagcaaggccaaggccaagagcctgtctgaggcctttgagaacctgggcaagaggagcctggaggccggccgctgcctgcccaagagtgacagcagcagcagcctgcccaagaccaaccccacccacagcgccacccggccccagcagaccagtgacctgcacgtgcagggcaacagcagcggcatcttcaggaagtctgtgagccccagcaagaccctgtctgtgcctgacaaggaggtgcccggccacggcaggaacagatatgatgagatcaaggaggagtttgacaagctgcaccagaagtactgcctgaagagccctggccagatgacagtgcccctgtgcattggagtgtccacagacaaggcctccatggaggtgcgctaccagacagagggcttcctgggcaagctgaacccagacccccacttccagggcttccagaagctgcccagcagccccctgggctgcaggaagagcctgctgggcagcacagccatcgaggcccccagcagcacctgtgtggcccgggccatcaccagagatggcacccgggaccaccagtttcctgccaagaggccccggctgtctgagccccagggcagcggccggcagggcaacagcctgggcgccagtgatggagtggacaacacagtgcggcctggggaccagggcagcagcagccagcccaacagcgaggagcggggggagaacaccagctacaggatggaggagaagagtgacttcatgctggagaagctggagaccaagtctgtgtag

SEQ ID NO: 103078 - DNA, 2085 bp, Artificial Sequence
  derived and/or modified sequence
atgctgggcaccctgcgggccatggagggcgaggacgtggaggacgaccagctgctgcagaagctgagggccagccgcaggcggtttcaacggcgcatgcaaaggcttatagaaaaatacaaccagccatttgaggacacgccggtcgtgcagatggctaccctgacttatgaaacacctcagggcctgagaatctggggtgggagactgatcaaagagcggaacgagggcgagatccagcccgcagtgccgcagagccctctgaaaaatgagttaagaaggaagtacctgacgcaggttgacatacttctccagggtgccgaatacttcgagtgcgccggcaaccgtgccggaagagatgtacgtgtgaccccactgccaagcctggcatcccccgcagtgccagccccgggctactgtagtcgcatcagtaggaaatctcccggcgatccagcgaagccagctagctccccacgagagtgggatcccttgcacccatcctccacagatatggctcttgtgccacggaatgactcgctatccctgcaggagaccagttccagctcctttctgtcttcccagccattcgaagacgatgacatctgtaatgtgaccatctccgacctttatgctggcatgttgcactctatgagccggctcctgtcaaccaagccatctagcattatctctaccaaaacctttattatgcagaattggaattctcggcgtcggcaccgatacaagtcacgcatgaataaaacctactgtaaaggagccagacgcagccagcgtagctcaaaggagaactttatcccctgcagcgaaccggtgaaggggaccggagccctccgggattgcaagaatgtgctcgatgtttcttgcaggaaaaccggactaaagcttgaaaaggccttcttagaggtgaacaggcctcagatacacaaactggatccttcttggaaggagcgaaaggttaccccatccaagtattcaagtctcatttattttgacagctccgcgacttacaacctcgacgaggaaaaccgtttccgtacccttaagtggctgatctcaccagtcaagatcgtaagccgccctactatccggcagggtcacggagagaacaggcagagggaaattgagatacgcttcgatcagctccacagagagtactgcctgagccctcggaatcagccaagaagaatgtgcctgccagacagttgggccatgaacatgtatcggggtggccctgcatcccccggtggcctgcaagggcttgagaccagaaggttatccctgccatccagcaaggcaaaagccaaatccctatcagaagcttttgagaacctaggaaaacgttccctggaggctggcagatgcttaccgaaatccgattcttctagctctttacctaaaacgaaccctactcacagcgcaactcgacctcagcagacctcagatctgcacgtgcagggcaactctagcggcattttccgcaagtccgttagcccgagcaaaacattatctgtccccgacaaggaggtgcccgggcacggccggaacagatacgacgagatcaaagaagagtttgataaacttcaccagaagtattgcctgaagtcccctggacagatgaccgttcccttgtgtatcggagtgtcaacagacaaggcaagcatggaagtgaggtatcagacagaaggatttttaggtaaactgaaccctgacccccatttccagggctttcaaaagctgccatcttcacctctgggatgccggaagagtcttctcgggagtactgccatcgaggcgccttcctcaacttgcgttgccagggcgataacaagggatggaaccagggatcaccagtttccggcaaaacgacctcgtctcagcgaaccccaggggtcagggaggcagggcaattctcttggggcgtcagacggcgtggacaacactgtgagacccggcgaccagggatcctcctctcaacctaactccgaagagcgtggtgaaaacacaagttaccgaatggaagagaaaagcgacttcatgctggagaagctggaaaccaagagtgtgtag

SEQ ID NO: 103079 - DNA, 2085 bp, Artificial Sequence
  derived and/or modified sequence
atgctaggcaccctgcgtgctatggagggggaggatgttgaagacgatcaacttctgcagaaactgagagcgtcccgtagaagattccagcggcgaatgcagagactaatcgagaagtacaatcaaccttttgaagacactcccgttgtacaaatggccacgctgacatacgaaactcctcaaggcttgaggatttggggcggtagattaataaaggagcgcaatgagggagagatacagcctgcggttcctcagtcacctctcaagaatgagctacggagaaaatatctgacccaggttgacatcctattacagggggcagagtacttcgagtgtgccggaaatagggccggacgggacgtaagagtcacaccactgccgagtctggccagccccgctgtgcccgctcccggatattgctctcgcattagccggaagagcccaggcgatccagcgaagccggctagtagcccccgtgagtgggatccactgcaccccagctccaccgatatggcactcgtgccacgtaacgacagcctgtcacttcaggagacttcatcctcatcctttctgtcgagtcagcctttcgaggatgacgatatctgtaatgtcacaatttccgatctgtatgcaggcatgctgcacagtatgtccaggcttctgagcaccaaacctagtagcattatctcaacaaagacgttcatcatgcagaattggaacagcaggcggaggcatcgctataagagtcgaatgaataagacttattgtaagggagcacggcgatcccagaggtcatctaaggagaacttcatcccctgtagtgagcccgtgaaaggtaccggcgctctccgcgattgcaaaaatgttctggacgtcagctgcagaaagactggcttgaagctggaaaaggccttcctcgaggtgaaccgcccacaaattcataagctagacccctcctggaaggaaagaaaggtgaccccgtctaagtactcttcccttatttatttcgactcaagcgccacttacaatttagacgaagagaaccgttttcgcacactgaaatggctaatcagtccagtcaaaatcgtgtcacgccctacaatcagacaagggcacggggaaaaccggcagcgcgaaatcgagattaggtttgaccagctgcaccgcgagtattgtcttagccccaggaatcagccacggcgaatgtgtctccccgacagctgggctatgaatatgtatcgcggaggtccagcctcaccagggggacttcagggcctagaaactaggagactaagcctaccctcttctaaagcgaaggccaagtcattgtctgaggcctttgaaaatttgggaaagcgaagtttagaggccggtagatgcctgcccaagtcagactcttcctcctccttacctaagacaaatcctactcatagcgcaacgaggcctcagcaaacatctgatctccacgtacaaggcaactcctcgggtatctttcgcaagtcagtaagccccagcaagacccttagtgtccccgataaagaagtgcccggacacggcaggaacaggtatgatgagattaaggaagaatttgacaaactgcatcagaagtattgcctgaagtcacccggacagatgacagttcccctttgtatcggtgtgagtactgataaggcatccatggaggtgcggtaccagactgaaggattcttgggcaaactcaatccggatccgcatttccagggctttcaaaaactgccatcatctccgctgggatgtaggaaatctctcctcgggtcaactgccattgaagctccatcatcaacctgcgtagcccgagctatcaccagggatggtacaagggaccaccaatttcctgcaaagcggcctagattatcagagccccagggttcaggcaggcagggtaattcactcggcgcatccgatggcgtcgataataccgttagacctggcgatcaggggtctagctctcagcctaactctgaggaacgaggcgaaaacacaagctatagaatggaggagaagagcgatttcatgctggagaagctggagactaaaagcgtgtag

SEQ ID NO: 103080 - DNA, 2085 bp, Artificial Sequence
  derived and/or modified sequence
atgctgggcaccctgagagccatggagggcgaggacgtggaggacgaccagctgctgcagaagctgagagccagcagaagaagattccagagaagaatgcagagactgatcgagaagtacaaccagcccttcgaggacacccccgtggtgcagatggccaccctgacctacgagaccccccagggcctgagaatctggggcggcagactgatcaaggagagaaacgagggcgagatccagcccgccgtgccccagagccccctgaagaacgagctgagaagaaagtacctgacccaggtggacatcctgctgcagggcgccgagtacttcgagtgcgccggcaacagagccggcagagacgtgagagtgacccccctgcccagcctggccagccccgccgtgcccgcccccggctactgcagcagaatcagcagaaagagccccggcgaccccgccaagcccgccagcagccccagagagtgggaccccctgcaccccagcagcaccgacatggccctggtgcccagaaacgacagcctgagcctgcaggagaccagcagcagcagcttcctgagcagccagcccttcgaggacgacgacatctgcaacgtgaccatcagcgacctgtacgccggcatgctgcacagcatgagcagactgctgagcaccaagcccagcagcatcatcagcaccaagaccttcatcatgcagaactggaacagcagaagaagacacagatacaagagcagaatgaacaagacctactgcaagggcgccagaagaagccagagaagcagcaaggagaacttcatcccctgcagcgagcccgtgaagggcaccggcgccctgagagactgcaagaacgtgctggacgtgagctgcagaaagaccggcctgaagctggagaaggccttcctggaggtgaacagaccccagatccacaagctggaccccagctggaaggagagaaaggtgacccccagcaagtacagcagcctgatctacttcgacagcagcgccacctacaacctggacgaggagaacagattcagaaccctgaagtggctgatcagccccgtgaagatcgtgagcagacccaccatcagacagggccacggcgagaacagacagagagagatcgagatcagattcgaccagctgcacagagagtactgcctgagccccagaaaccagcccagaagaatgtgcctgcccgacagctgggccatgaacatgtacagaggcggccccgccagccccggcggcctgcagggcctggagaccagaagactgagcctgcccagcagcaaggccaaggccaagagcctgagcgaggccttcgagaacctgggcaagagaagcctggaggccggcagatgcctgcccaagagcgacagcagcagcagcctgcccaagaccaaccccacccacagcgccaccagaccccagcagaccagcgacctgcacgtgcagggcaacagcagcggcatcttcagaaagagcgtgagccccagcaagaccctgagcgtgcccgacaaggaggtgcccggccacggcagaaacagatacgacgagatcaaggaggagttcgacaagctgcaccagaagtactgcctgaagagccccggccagatgaccgtgcccctgtgcatcggcgtgagcaccgacaaggccagcatggaggtgagataccagaccgagggcttcctgggcaagctgaaccccgacccccacttccagggcttccagaagctgcccagcagccccctgggctgcagaaagagcctgctgggcagcaccgccatcgaggcccccagcagcacctgcgtggccagagccatcaccagagacggcaccagagaccaccagttccccgccaagagacccagactgagcgagccccagggcagcggcagacagggcaacagcctgggcgccagcgacggcgtggacaacaccgtgagacccggcgaccagggcagcagcagccagcccaacagcgaggagagaggcgagaacaccagctacagaatggaggagaagagcgacttcatgctggagaagctggagaccaagagcgtgtag

SEQ ID NO: 103081 - protein, 663 aa, Artificial Sequence
  derived and/or modified sequence
MLGTLRAMEGEDVEDDQLLQKLRASRRRFQRRMQRLIEKYNQPFEDTPVVQMATLTYETPQGLRIWGGRLIKERNEGEIQCAGNRAGRDVRVTPLPSLASPAVPAPGYCSRISRKSPGDPAKPASSPREWDPLHPSSTDMALVPRNDSLSLQETSSSSFLSSQPFEDDDICNVTISDLYAGMLHSMSRLLSTKPSSIISTKTFIMQNWNSRRRHRYKSRMNKTYCKGARRSQRSSKENFIPCSEPVKGTGALRDCKNVLDVSCRKTGLKLEKAFLEVNRPQIHKLDPSWKERKVTPSKYSSLIYFDSSATYNLDEENRFRTLKWLISPVKIVSRPTIRQGHGENRQREIEIRFDQLHREYCLSPRNQPRRMCLPDSWAMNMYRGGPASPGGLQGLETRRLSLPSSKAKAKSLSEAFENLGKRSLEAGRCLPKSDSSSSLPKTNPTHSATRPQQTSDLHVQGNSSGIFRKSVSPSKTLSVPDKEVPGHGRNRYDEIKEEFDKLHQKYCLKSPGQMTVPLCIGVSTDKASMEVRYQTEGFLGKLNPDPHFQGFQKLPSSPLGCRKSLLGSTAIEAPSSTCVARAITRDGTRDHQFPAKRPRLSEPQGSGRQGNSLGASDGVDNTVRPGDQGSSSQPNSEERGENTSYRMEEKSDFMLEKLETKSV

SEQ ID NO: 103082 - DNA, 538 bp, Artificial Sequence
  derived and/or modified sequence
gcgcgacgttcggttcgctgtgtgtgtcgccggctccttgagggtccatgtgatttttacgccagtgctgctgaactgtgcagggtagggagctggcacagtccgattaattgtccttgggtcgaggtgtctcgtcggaccctttggggctcagtggaggtaggtgaaggcggctcccattgagggaagcccacactcacacccggccttcctgtgttaatctggcatgctcttctggggcttcccaggctatataggagagtggccaaattctttaaccggctcaagttcccctcaattaagcttcgacctaggttcttctctgcgattacaccctttcctgtccaccgttgttagttcccggagtaatcagcaactctccaaggcaatggacacatttccatctttgcctttgcttacgaggctccctcagaattaaggcagagtcactgtaattatttctaataccaattccaaaatagtgactcttggacaatagtgcaattatatggaattatggctggttataagcctgtag

SEQ ID NO: 103083 - DNA, 1992 bp, Artificial Sequence
  derived and/or modified sequence
atgctggggaccttacgcgccatggagggagaagacgtggaggatgaccagttgctgcagaagctacgtgcttctcgacggcgctttcagcggcgcatgcagcgtcttatcgagaagtataaccaaccctttgaggacacacctgtggttcagatggccaccttgacgtatgagaccccacagggcctccggatatggggcggcaggctaatcaaagagcgaaatgagggtgagatccagtgtgcagggaatagagctggcagagatgtacgcgttacccccctgccatcattggcctcaccagcagtgcctgctcccgggtactgttcaaggatcagccgaaagagccccggtgatcctgctaaacccgcgagctcccctcgcgagtgggacccactgcatcccagcagcaccgacatggccttggtgccaaggaatgacagcctgtctctccaggagaccagttcgtcctcattcctgagttcccagccctttgaagacgacgacatctgtaacgtcactatcagtgatctctatgccgggatgctccactccatgagccggctactttctactaagccatctagcattatcagtacaaaaacgttcataatgcagaattggaatagtagacggaggcatcggtataagagcaggatgaataaaacgtattgtaagggggcccgacgcagccaacgtagcagcaaggaaaatttcatcccttgtagtgaaccagtgaagggaaccggcgccctgagggattgtaagaacgtcttggacgtgtcatgcaggaagactggactcaagctcgaaaaggcctttctggaagtaaaccggccacagatccacaagctggacccttcatggaaggaacgtaaagtcaccccctctaagtattccagccttatttatttcgatagcagtgccacttataatctggatgaggagaaccgcttccgcacacttaagtggctgatttcccccgtcaagatcgtcagtcgaccaaccattaggcagggacacggagagaaccgccagcgggagatcgagattaggttcgaccagctgcaccgggagtattgtctatcgccccgcaatcagcctagacgaatgtgtttacccgactcttgggcaatgaacatgtacagaggggggcccgcaagccccggcggattgcagggcttagagacgagacggctctccctgccatcctctaaagcaaaggctaagagtctgagcgaggcatttgaaaacctcgggaagagaagtctggaagccggacgatgcttgcccaaatccgatagtagttcctccctgcctaagacgaatcccacacacagcgccaccaggccccagcaaacctcggacttgcatgtgcagggcaatagctccggaatattccgaaaaagcgtgtctccatccaagaccctgtcggtccctgacaaggaggtcccaggacacgggagaaacaggtatgacgagattaaggaggaatttgataaactgcaccagaaatactgcttaaagtcccccggtcagatgaccgtgccactgtgcataggggtgagtaccgacaaggcctctatggaagtacgataccaaaccgaaggatttctggggaaattgaaccccgacccacactttcagggctttcagaagttgccaagctctcccctgggttgccggaaatctctcctgggaagcacagcaattgaggctccctcctctacctgtgtggcccgcgccatcaccagagacggaacgagagaccaccaattcccagcgaagcgcccccgtctgtctgagccccaaggcagcggtcgacaaggcaattctctcggagcaagcgacggcgttgataacacagtacgccctggggatcaggggtccagttcccagcccaatagtgaggagaggggggaaaatactagctatcggatggaggaaaaatctgacttcatgttggagaagctcgagacgaaatccgtatag

SEQ ID NO: 103084 - DNA, 2792 bp, Artificial Sequence
  derived and/or modified sequence
ctatttgagtttgtggcgcgcgaggccctgcagtccgggttggcgcttgggtactggctgggtccgatgctgggtacgctgcgcgccatggagggcgaggacgtggaagacgaccagctgctgcagaagctcagggccagtcgccgccgcttccagaggcgcatgcagcggctgatagagaagtacaaccagcccttcgaggacaccccggtggtgcaaatggccacgctgacctacgagacgccacagggattgagaatttggggtggaagactaataaaggaaagaaacgaaggagagatccagtgtgcaggtaacagagctggaagggatgtacgtgtgactccgctgccttcactggcctcacctgccgtgcctgcccccggatactgcagtcgtatctccagaaagagtcctggtgacccagcgaaaccagcttcatctcccagagaatgggatcctttgcatccttcctccacagacatggccttagtacctagaaatgacagcctctccctacaagagaccagtagcagcagcttcttaagcagccagccctttgaagatgatgacatttgcaatgtgaccatcagtgacctgtacgcagggatgctgcactccatgagccggctgttgagcacaaagccatcaagcatcatctccaccaaaacgttcatcatgcaaaactggaactccaggaggaggcacagatataagagcaggatgaacaaaacatattgcaaaggagccagacgttctcagaggagctccaaggagaacttcataccctgctctgagcctgtgaaagggacaggggcattaagagattgcaagaacgtattagatgtttcttgccgtaagacaggtttaaaattggaaaaagcttttcttgaagtcaacagaccccaaatccataagttagatccaagttggaaggagcgcaaagtgacaccctcgaagtattcttccttgatttacttcgactccagtgcaacatataatcttgatgaggaaaatagatttaggacattaaaatggttaatttctcctgtaaaaatagtttccagaccaacaatacgacagggccatggagagaaccgtcagagggagattgaaatccgatttgatcagcttcatcgggaatattgcctgagtcccaggaaccagcctcgccggatgtgcctcccggactcctgggccatgaacatgtacagagggggtcctgcgagtcctggtggccttcagggcttagaaacccgcaggctgagtttaccttccagcaaagcaaaagcaaaaagtttaagtgaggcttttgaaaacctaggcaaaagatctctggaagcaggtaggtgcctgcccaagagcgattcatcttcatcacttccaaagaccaaccccacacacagcgcaactcgcccgcagcagacatctgaccttcacgttcagggaaatagttctggaatatttagaaagtcagtgtcacccagcaaaactctttcagtcccagataaagaagtgccaggccacggaaggaatcgttacgatgaaattaaagaagaatttgacaagcttcatcaaaagtattgcctcaaatctcctgggcagatgacagtgcctttatgtattggagtgtctacagataaagcaagtatggaagttcgatatcaaacagaaggcttcttaggaaaattaaatccagaccctcacttccagggtttccagaagttgccatcatcacccctggggtgcagaaaaagtctactgggctcaactgcaattgaggctccttcatctacatgtgttgctcgtgccatcacgagggatggcacgagggaccatcagttccctgcaaaaagacccaggctatcagaaccccagggctccggacgccagggcaattccctgggtgcctcagatggggtggacaacaccgtcagaccgggagaccagggcagctcttcacagcccaactcagaagagagaggagagaacacgtcttacaggatggaagagaaaagtgatttcatgctagaaaaattggaaactaaaagtgtgtagctaggttatttcggagtgttatttatcttcccacttgctctctgtttgtatttttgttttgtttttgattcttgagactgtgaggacttggttgacttctctgcccttaaagtaaatattagtgaaattggttccatcagagataacctcgagttcttggtgtagaaattatgtgaataaagttgctcaattagaatttttagggttctctttgataggcctgtttttctgatgtgtgtgttttttttgggggggggttatttgtttgtttgtttgtttgtttgtttgtttttgagacagtctctctctatcgcccaggctggagtgcggtggcacaatcttggctcactgcaacttccgcctcccgggttcaagcgattcttctgcctcagcctcccgagtagctgggattacaggcgcgcgccaccacgcctggctaatttttgtagttttagtagagacggggtttcaccatattgaccaggctggtctcgagctcctggcctcgtgatccatctgcctcggcctcccaaagtgctgggattataggcgtgagccactgctcccagccgtgtgttcttttttaaatttagatatgtccagagaatcctctctcctgtttcccatttcattcgagaatattgtttgcttgtgagacgtaagttcgagccctgcatgcaatgacccttgaaggaaaataaacagtcctggtggtcccagacgctcctgcagcc

SEQ ID NO: 103085 - DNA, 1992 bp, Artificial Sequence
  derived and/or modified sequence
atgctgggcaccctgcgggccatggagggagaagatgtggaggatgaccagctgctgcagaagctgcgggccagcagaagacgcttccagaggaggatgcagaggctgattgagaagtacaaccagccctttgaggacacccctgtggtgcagatggccaccctgacctatgagaccccccagggcctgcgcatctggggcggccgcctcatcaaggagagaaatgaaggagagatccagtgtgccggcaacagagctggaagagatgtgcgggtgacccccctgcccagcctggccagccctgctgtgcctgcccctggctactgcagccgcatcagcaggaagagccctggggaccctgccaagccagccagcagcccccgggagtgggaccccctgcaccccagcagcacagacatggccctggtgcccagaaatgacagcctgagcctgcaggagaccagcagcagcagcttcctgagcagccagccctttgaagatgatgacatctgcaatgtgaccatcagtgacctgtatgccggcatgctgcacagcatgagccggctgctgagcaccaagcccagcagcatcatcagcaccaagaccttcatcatgcagaactggaacagcagaagaagacaccgctacaagagcaggatgaacaagacctactgcaagggggcccggcgcagccagaggagcagcaaagaaaacttcatcccctgcagcgagcctgtgaagggcactggagccctgcgggactgcaagaatgtgctggatgtgtcctgcaggaagacaggcctgaagctggagaaggccttcctggaggtgaaccggccccagatccacaagctggaccccagctggaaggagaggaaggtgacccccagcaagtacagcagcctcatctactttgacagcagcgccacctacaacctggatgaggagaaccgcttccgcaccctgaagtggctgatcagccctgtgaagatcgtgtcccggcccaccatccggcagggccatggagaaaatcggcagcgggagattgagatccgctttgaccagctgcaccgggagtactgcctgagccccaggaaccagcccaggaggatgtgcctgcctgacagctgggccatgaacatgtaccggggcggccctgccagccctgggggcctgcagggcctggagacccggcggctgagcctgcccagcagcaaggccaaggccaagagcctgtctgaggcctttgagaacctgggcaagaggagcctggaggccggccgctgcctgcccaagagtgacagcagcagcagcctgcccaagaccaaccccacccacagcgccacccggccccagcagaccagtgacctgcacgtgcagggcaacagcagcggcatcttcaggaagtctgtgagccccagcaagaccctgtctgtgcctgacaaggaggtgcccggccatggaagaaacagatatgatgagatcaaggaggagtttgacaagctgcaccagaagtactgcctgaagagccctggccagatgacagtgcccctgtgcatcggcgtgtccacagacaaggcctccatggaggtgcgctaccagacagagggcttcctgggcaagctgaacccagacccccacttccagggcttccagaagctgcccagcagccccctgggctgcaggaagagcctgctgggcagcacagccatcgaggcccccagcagcacctgtgtggcccgggccatcaccagagatggcacccgggaccaccagtttcctgccaagaggccccggctgtctgagccccagggcagcggccggcagggcaacagcctgggcgccagtgatggagtggacaacacagtgcggcctggggaccagggcagcagcagccagcccaacagcgaggagagaggagagaacaccagctacaggatggaggagaagagtgacttcatgctggagaagctggagaccaagtctgtgtag

SEQ ID NO: 103086 - DNA, 1992 bp, Artificial Sequence
  derived and/or modified sequence
atgctgggcaccctgcgggccatggagggcgaggacgtggaggacgaccagctcctccagaagctcagggccagccgccgcagattccagcgcagaatgcaacggctgatagagaaatataatcaaccattcgaagatacacctgtggtccagatggctactctaacatacgagactcctcaaggactgaggatctggggaggcagattgataaaagaacgtaatgagggcgaaatacagtgcgccggcaatcgcgcaggtcgcgatgtgcgcgtgacgccacttccttcgctggcctcaccagcagtacccgcgcccggctactgcagcaggatttctcgcaaatcccctggggatcctgctaaacctgcttcatccccacgggagtgggaccctctacacccaagtagcactgatatggcgttggtgccacgtaatgatagcttgtccctgcaggagacatccagcagtagcttcctgagttcgcaacccttcgaggacgacgatatttgtaatgtaaccatttccgacctgtatgcaggcatgctacactccatgtccagactattaagcactaagccgagtagcattatttccactaaaacattcatcatgcagaactggaactccaggagaagacacagatacaaatccaggatgaacaaaacctattgtaaaggagccaggcgatctcagcgatcgtccaaggaaaacttcatcccctgctccgagccagtgaagggcaccggggcccttcgtgattgcaaaaacgtgttggacgtgtcatgtcgtaaaaccggcctcaagcttgaaaaggcctttttggaagttaatcgtccgcagatccacaaattagacccgagctggaaggagcggaaagttacaccatctaaatattcatccctgatctactttgattctagcgccacatataatctcgatgaggagaaccgtttccgcacgctcaagtggcttatatctcccgtcaagattgtcagtagacccacaatacgccagggacacggggagaacaggcagagggagattgagattcggtttgaccagctgcaccgagagtactgtttgtccccacgcaatcagcctcgaaggatgtgcttgcctgatagctgggcgatgaatatgtacagagggggtccagccagcccaggaggtctccaaggccttgagacgcggagattaagtttgccaagctctaaagccaaagccaaaagcctgagcgaagccttcgaaaacctgggaaaaagaagtttagaggctggtagatgcctccccaagagtgactcttcgtcatccctacctaaaaccaatcctacacattctgctactcgaccccaacaaacaagtgatctacacgtgcaggggaattcatccggtatttttagaaagtctgtgtcaccatctaaaacgttaagtgttcctgataaggaggtccctggacacggccgcaacaggtacgatgaaatcaaagaagaatttgataaactgcatcagaagtactgcctgaaatcacccggacagatgacagtgcccctctgcatcggagtttccacagacaaggcttccatggaagtgcggtatcagacggagggattcctcggcaagctgaaccccgaccctcatttccagggcttccagaagcttcccagttcaccactgggctgtcgaaaaagcctgctgggaagtacagccatagaagctccttcctccacctgtgtggccagagcaatcacacgggatgggacccgtgaccaccagtttcctgcaaagagaccacgactctccgaacctcaggggtccggccggcaaggaaactccctcggggctagcgacggagtcgataacaccgtaaggccaggtgaccagggcagtagcagccagccaaactccgaggaaaggggggaaaatacgtcttacaggatggaagaaaaatccgacttcatgctcgaaaagctcgagaccaagtctgtgtag

SEQ ID NO: 103087 - DNA, 1992 bp, Artificial Sequence
  derived and/or modified sequence
atgttgggtactctgcgcgcaatggaaggagaggacgtggaagacgatcagctgctccaaaagctacgagcaagcagacgaaggtttcaaagaagaatgcagcgtctaatcgaaaaatacaatcagccattcgaggacactccagtcgttcagatggccactctaacgtatgagacccctcaggggctccgcatctggggcggtcgtctcatcaaggaacgcaacgagggcgaaattcagtgcgctggcaaccgtgcaggcagggatgtgcgcgtgacccctctgccatccctcgcatctcctgccgtgccagccccagggtactgtagcaggatctcacggaagtccccaggggaccccgcaaaaccagcaagctccccccgagagtgggaccctcttcacccctcaagtacggacatggccctcgttcctcggaacgactcgctgtccttgcaggagacttcctctagttctttcctgtcaagccaacccttcgaagatgatgacatttgcaacgtcactatatctgacctatacgccggaatgctccattcaatgtcccggctcctgagcactaaaccgtcaagtatcatctcgactaagacctttataatgcagaactggaactccaggcgccgacacagatacaaatccaggatgaataaaacttactgcaagggggcaagaagatcccagaggtcttcaaaagagaacttcattccgtgtagcgaacccgtgaagggcaccggggctctccgcgactgcaaaaatgttctggatgtttcctgtcggaaaaccggattgaaactggagaaggcctttctggaagtcaataggccgcagattcacaagcttgatccaagttggaaagagcgcaaggtcactcctagtaagtactccagtctcatatactttgattcaagcgccacttacaatctggatgaggaaaaccgctttcgcaccctaaagtggctgatttcgcctgtaaagatcgtgtcccgtccgaccatcaggcaaggacacggggagaataggcaaagggaaatcgagatccgctttgatcaattgcaccgcgagtactgtctctctccaaggaaccagccacgacgcatgtgtctgcctgattcttgggctatgaacatgtacagaggaggcccagcctctcccggaggcctacagggcctcgaaacacggaggctgagcctgccaagtagcaaagccaaggcgaagagcctgagtgaggcctttgagaatctgggcaaacggagtctcgaagccggacgctgcttaccaaagagtgactcgtccagtagcctgccaaaaaccaatccaacacactccgctacgaggcctcagcagacaagcgatcttcacgtgcagggaaactcttctggaatatttcgaaagagcgtttccccatctaagacactgagtgtgcctgacaaagaggtgccaggtcacgggagaaaccgctacgacgaaatcaaagaggaattcgacaagcttcaccagaagtactgtctgaagtctccaggtcagatgacagtgcctctgtgcatcggcgtgtctactgacaaagcctctatggaggtccgatatcagactgaaggctttctcggtaaactgaatcctgatccacacttccagggtttccagaaattaccctcatcccccttaggatgccggaaaagcttgctcggatctacggccatcgaggcaccatccagtacttgtgtcgccagggcaataacgagggacggaacccgagatcaccagtttccggctaaaaggccacgcctctctgaaccgcaagggtctggacggcaaggtaattcactgggtgccagtgatggcgtggataacactgtgaggcctggcgaccagggctcttcatcccaacccaatagcgaggagcgaggggagaacacgagttataggatggaagagaagagcgatttcatgctcgaaaagctcgagactaagagtgtgtag

SEQ ID NO: 103088 - DNA, 1992 bp, Artificial Sequence
  derived and/or modified sequence
atgctgggcaccctgagagccatggagggcgaggacgtggaggacgaccagctgctgcagaagctgagagccagcagaagaagattccagagaagaatgcagagactgatcgagaagtacaaccagcccttcgaggacacccccgtggtgcagatggccaccctgacctacgagaccccccagggcctgagaatctggggcggcagactgatcaaggagagaaacgagggcgagatccagtgcgccggcaacagagccggcagagacgtgagagtgacccccctgcccagcctggccagccccgccgtgcccgcccccggctactgcagcagaatcagcagaaagagccccggcgaccccgccaagcccgccagcagccccagagagtgggaccccctgcaccccagcagcaccgacatggccctggtgcccagaaacgacagcctgagcctgcaggagaccagcagcagcagcttcctgagcagccagcccttcgaggacgacgacatctgcaacgtgaccatcagcgacctgtacgccggcatgctgcacagcatgagcagactgctgagcaccaagcccagcagcatcatcagcaccaagaccttcatcatgcagaactggaacagcagaagaagacacagatacaagagcagaatgaacaagacctactgcaagggcgccagaagaagccagagaagcagcaaggagaacttcatcccctgcagcgagcccgtgaagggcaccggcgccctgagagactgcaagaacgtgctggacgtgagctgcagaaagaccggcctgaagctggagaaggccttcctggaggtgaacagaccccagatccacaagctggaccccagctggaaggagagaaaggtgacccccagcaagtacagcagcctgatctacttcgacagcagcgccacctacaacctggacgaggagaacagattcagaaccctgaagtggctgatcagccccgtgaagatcgtgagcagacccaccatcagacagggccacggcgagaacagacagagagagatcgagatcagattcgaccagctgcacagagagtactgcctgagccccagaaaccagcccagaagaatgtgcctgcccgacagctgggccatgaacatgtacagaggcggccccgccagccccggcggcctgcagggcctggagaccagaagactgagcctgcccagcagcaaggccaaggccaagagcctgagcgaggccttcgagaacctgggcaagagaagcctggaggccggcagatgcctgcccaagagcgacagcagcagcagcctgcccaagaccaaccccacccacagcgccaccagaccccagcagaccagcgacctgcacgtgcagggcaacagcagcggcatcttcagaaagagcgtgagccccagcaagaccctgagcgtgcccgacaaggaggtgcccggccacggcagaaacagatacgacgagatcaaggaggagttcgacaagctgcaccagaagtactgcctgaagagccccggccagatgaccgtgcccctgtgcatcggcgtgagcaccgacaaggccagcatggaggtgagataccagaccgagggcttcctgggcaagctgaaccccgacccccacttccagggcttccagaagctgcccagcagccccctgggctgcagaaagagcctgctgggcagcaccgccatcgaggcccccagcagcacctgcgtggccagagccatcaccagagacggcaccagagaccaccagttccccgccaagagacccagactgagcgagccccagggcagcggcagacagggcaacagcctgggcgccagcgacggcgtggacaacaccgtgagacccggcgaccagggcagcagcagccagcccaacagcgaggagagaggcgagaacaccagctacagaatggaggagaagagcgacttcatgctggagaagctggagaccaagagcgtgtag

SEQ ID NO: 103089 - DNA, 276 bp, Artificial Sequence
  derived and/or modified sequence
atgggcaacagcatgaagagcacccccgcccccgccgagagacccctgcccaaccccgagggcctggacagcgacttcctggccgtgctgagcgactaccccagccccgacatcagcccccccatcttcagaagaggcgagaagctgagagtgatcagcgacgagggcggctggtggaaggccatcagcctgagcaccggcagagagagctacatccccggcatctgcgtggccagagtgtaccacggctggctgttcgagggcctgggcagatag

SEQ ID NO: 103090 - DNA, 150 bp, Artificial Sequence
  derived and/or modified sequence
atgggcaacagcatgaagagcacccccgcccccgccgagagacccctgcccaaccccgagggcctggacagcgacttcctggccgtgctgagcgactaccccagccccgacatcagcccccccatcttcagaagaggcgagaagctgtag

SEQ ID NO: 103091 - DNA, 123 bp, Artificial Sequence
  derived and/or modified sequence
atgggcaacagcatgaagagcacccccgcccccgccgagagacccctgcccaaccccgagggcctggacagcgacttcctggccgtgctgagcgactaccccagccccgacatcagcccctag

SEQ ID NO: 103092 - DNA, 276 bp, Artificial Sequence
  derived and/or modified sequence
atggggaactcaatgaaatccactccagcccccgcagagcgtcccttgccaaatcctgaggggctggatagtgactttttggccgtgctgagcgattacccctccccggacatcagcccgccaatctttaggagaggcgagaagctacgcgttatatcagacgaaggagggtggtggaaggccataagcctgtcaacgggtcgggaatcttacattccaggtatttgtgttgcccgggtgtaccatgggtggctgttcgaggggctgggtaggtag

SEQ ID NO: 103093 - DNA, 150 bp, Artificial Sequence
  derived and/or modified sequence
atggggaacagtatgaaaagcacgcctgcgccagccgagcgcccgctccctaatcccgagggacttgactcagatttcttagcggtactgtctgactatccatcgccagacatatcgccgccgatatttcgcagaggcgagaagttgtag

SEQ ID NO: 103094 - DNA, 123 bp, Artificial Sequence
  derived and/or modified sequence
atgggtaactccatgaaaagtacccccgcccccgcggagaggccactaccaaaccctgagggcctcgactctgatttcctggccgtactttccgactatccttccccagacatctcaccttag

SEQ ID NO: 103095 - DNA, 276 bp, Artificial Sequence
  derived and/or modified sequence
atgggcaacagcatgaagagcaccccagccccagctgagcggcccctgcccaaccctgagggcctggacagcgacttcctggccgtgctgagtgactaccccagcccagacatcagcccccccatcttccggcggggggagaagctgcgggtcatcagtgatgagggcggctggtggaaggccatcagcctgagcacaggccgggagagctacatccctggcatctgtgtggcccgggtgtaccacggctggctgtttgagggcctgggccgctag

SEQ ID NO: 103096 - DNA, 150 bp, Artificial Sequence
  derived and/or modified sequence
atgggcaacagcatgaagagcaccccagccccagctgagcggcccctgcccaaccctgagggcctggacagcgacttcctggccgtgctgagtgactaccccagcccagacatcagcccccccatcttccggcggggggagaagctgtag

SEQ ID NO: 103097 - DNA, 123 bp, Artificial Sequence
  derived and/or modified sequence
atgggcaacagcatgaagagcaccccagccccagctgagcggcccctgcccaaccctgagggcctggacagcgacttcctggccgtgctgagtgactaccccagcccagacatcagcccctag

SEQ ID NO: 103098 - DNA, 276 bp, Artificial Sequence
  derived and/or modified sequence
atgggcaacagcatgaagagcacccccgcccccgccgagcggcccctgcccaatcctgaggggttggactccgacttccttgcagttctttctgattatccctcacctgacatatcccctcccatttttcgacgtggggagaaactgcgtgtgatcagcgacgagggagggtggtggaaggctatctctttgtccaccggtagggaatcttacatcccaggtatttgtgtcgctagggtgtaccacgggtggttattcgaagggctgggcaggtag

SEQ ID NO: 103099 - DNA, 150 bp, Artificial Sequence
  derived and/or modified sequence
atgggcaacagcatgaagagcacccccgcccccgccgagcggcccttgcccaaccccgaggggctggactcagattttctagccgtgctaagtgattatcccagtcccgatatcagtcctccaatcttcaggaggggagagaagctctag

SEQ ID NO: 103100 - DNA, 123 bp, Artificial Sequence
  derived and/or modified sequence
atgggcaacagcatgaagagcacccccgcccccgccgagcggcccctccccaatcccgagggcttggactctgactttttggcagttctgtctgattacccttctcccgacatctcaccttag

SEQ ID NO: 103101 - DNA, 276 bp, Artificial Sequence
  derived and/or modified sequence
atgggtaattctatgaagtccacccctgcaccggcagagcgacccctgcctaacccggaggggctggactctgacttcctcgctgttctgtctgactacccttcaccagacatcagcccgccaattttcaggagaggcgaaaagttgcgcgtgatctcagatgaggggggatggtggaaagcaataagtctctccaccggcagagagtcttatattccaggtatctgtgtcgcacgggtgtaccatggatggctgttcgaaggactggggcgttag

SEQ ID NO: 103102 - DNA, 150 bp, Artificial Sequence
  derived and/or modified sequence
atggggaattcaatgaaaagtactcctgcccctgcagaaagaccccttcccaatccagagggactggattccgacttccttgcggtcttgtccgactaccccagccctgacatatcccccccaatcttccgcaggggcgaaaagctgtag

SEQ ID NO: 103103 - DNA, 123 bp, Artificial Sequence
  derived and/or modified sequence
atggggaattcaatgaagagcaccccggcacctgcagaacggcctcttcccaatcctgaaggcctggattctgactttctggcagtcctgtctgattatccttcccccgatattagtccgtag

SEQ ID NO: 103104 - DNA, 826 bp, Artificial Sequence
  derived and/or modified sequence
attccccatgacagcgactgatgaagaatttcaatagaaagctgctacttcagaaaataagatcatttgctgcgaatggagaacatctcaggcagccctgatgctccaccgctggaggaggtcacgtgacattcacaggcatccagtcccagggtacctcctgctgcctggccccactgggtttatttgaatagtctgacttgatcaatccacagagccttctaacaattcaagtccttgcagagagaagcttgctcagagtggttactgaaaacaggaacctgcccttctgcaagccctgtgccttcctcgttcctagcagaggaagtatgcggccagtttagcaactgcagttcttctgtgtagcatgggctgcttctccacaaccgcgagaagcccggctgcctgtttattctggagcagcagcagttgacagacggagaggcagtgactctgcacccagcaatccctctgcagacagctcccacaggagtcatgcccagtgtgtgaaggctctgggcatcaccagcggccccagggaaaaagaaagaaatgggaaacagcatgaaatccacccctgcgcctgccgagaggcccctgcccaacccggagggactggatagcgacttccttgccgtgctaagtgactacccgtctcctgacatcagccccccgatattccgccgaggggagaaactgcgtgtgatttctgatgaagggggctggtggaaagctatttctcttagcactggtcgagagagttacatccctggaatatgtgtggccagagtttaccatggctggctgtttgagggcctgggcagag

SEQ ID NO: 103105 - DNA, 563 bp, Artificial Sequence
  derived and/or modified sequence
aagatcatttgctgcgaatggagaacatctcaggcagccctgatgctccaccgtccttgcagagagaagcttgctcagagtggttactgaaaacaggaacctgcccttctgcaagccctgtgccttcctcgttcctagcagaggaagtatgcggccagtttagcaactgcagttcttctgtgtagcatgggctgcttctccacaaccgcgagaagcccggctgcctgtttattctggagcagcagcagttgacagacggagaggcagtgactctgcacccagcaatccctctgcagacagctcccacaggagtcatgcccagtgtgtgaagcccggacacagcaccttctgtcacggagactgaactctgactggcaagacagaacgggtgggagtgcaagcaacagcagagaagactgttagcgtagaagaacccaggcctctaggactgactcaaactttctcatctcatgaccctgggctctgggcatcaccagcggccccagggaaaaagaaagaaatgggaaacagcatgaaatccacccctgcgcctgccgagaggc

SEQ ID NO: 103106 - DNA, 586 bp, Artificial Sequence
  derived and/or modified sequence
aagatcatttgctgcgaatggagaacatctcaggcagccctgatgctccaccgtccttgcagagagaagcttgctcagagtggttactgaaaacaggaacctgcccttctgcaagccctgtgccttcctcgttcctagcagaggaagtatgcggccagtttagcaactgcagttcttctgtgtagcatgggctgcttctccacaaccgcgagaagcccggctgcctgtttattctggagcagcagcagttgacagacggagaggcagtgactctgcacccagcaatccctctgcagacagctcccacaggagtcatgcccagtgtgtgaagaacaggaaaccaaggtccaagttcacacaaaggaaataacattggtccaaagaccggagggaaaataaggctctgggcatcaccagcggccccagggaaaaagaaagaaatgggaaacagcatgaaatccacccctgcgcctgccgagaggcccctgcccaacccggagggactggatagcgacttccttgccgtgctaagtgactacccgtctcctgacatcagccccccgatattccgccgaggggagaaact

SEQ ID NO: 103107 - DNA, 582 bp, Artificial Sequence
  derived and/or modified sequence
aactttgctgtcattgggaccccctgggtgggccataggtggcctggggtggtatgtgggggagggtcttcagagggacttgatggatcctgtacccaccctccgtctttggtctgaagaaaatgggtgggtctctgctggtgtccttgcagagagaagcttgctcagagtggttactgaaaacaggaacctgcccttctgcaagccctgtgccttcctcgttcctagcagaggaagtatgcggccagtttagcaactgcagttcttctgtgtagcatgggctgcttctccacaaccgcgagaagcccggctgcctgtttattctggagcagcagcagttgacagacggagaggcagtgactctgcacccagcaatccctctgcagacagctcccacaggagtcatgcccagtgtgtgaaggctctgggcatcaccagcggccccagggaaaaagaaagaaatgggaaacagcatgaaatccacccctgcgcctgccgagaggcccctgcccaacccggagggactggatagcgacttccttgccgtgctaagtgactacccgtctcctgacatcagccccc

SEQ ID NO: 103108 - protein, 396 aa, Artificial Sequence
  derived and/or modified sequence
MPWISEGRATRPCLRVPSARRGDEGLHQRDEASQKMSKQQPTQFINPETPGYVGFANLPNQVHRKSVKKGFEFTLMVVGESGLGKSTLINSLFLTDLYPERVIPGAAEKIERTVQIEASTVEIEERGVKLRLTVVDTPGYGDAINCRDCFKTIISYIDEQFERYLHDESGLNRRHIIDNRVHCCFYFISPFGHGLKPLDVAFMKAIHNKVNIVPVIAKADTLTLKERERLKKRILDEIEEHNIKIYHLPDAESDEDEDFKEQTRLLKASIPFSVVGSNQLIEAKGKKVRGRLYPWGVVEVENPEHNDFLKLRTMLITHMQDLQEVTQDLHYENFRSERLKRGGRKVENEDMNKDQILLEKEAELRRMQEMIARMQAQMQMQMQGGDGDGGALGHHV

SEQ ID NO: 103109 - DNA, 1191 bp, Artificial Sequence
  derived and/or modified sequence
atgccctggatctccgaggggagagcgacaaggccatgcttaagagtgccttctgcacgccgcggcgatgagggcctccaccaacgggatgaggccagccagaaaatgagtaagcagcagcccactcagttcatcaatcctgagacaccaggttatgtggggttcgctaatctgcccaaccaggtgcatagaaaaagcgtgaaaaaaggttttgaattcaccctcatggtggtaggtgagtcaggactcggtaagtctaccctgatcaacagtctgttccttactgatctttacccggagcgcgtcattcccggagcagccgagaagattgaaaggacggttcagatcgaggcctctaccgtggaaatcgaagagagaggggtcaagctgaggctgacagtagtcgataccccaggttatggcgacgctatcaattgtcgagattgcttcaaaaccatcataagttatatcgatgagcaattcgaaaggtaccttcacgacgagtccggattgaacaggcggcacatcatcgataatcgggtgcattgctgcttttacttcatatcccccttcggccacggtctcaagcccctggacgtcgcattcatgaaagcaatccacaacaaagtgaacattgttcctgtcatagccaaggccgacacgttgaccctgaaagagagggagcgtctcaagaagcgaatcttggacgagattgaggaacacaatattaaaatctatcacctgccagatgcggagtcagacgaagacgaggattttaaggagcagactaggttactgaaagccagcattccatttagtgtggtggggtctaaccagttgatcgaagcaaaagggaaaaaggtccgagggaggctgtacccatggggcgtcgttgaggtggaaaatcccgaacacaatgatttcctgaagctcagaactatgttgataacacacatgcaagacctgcaggaagtgactcaggatctccattatgaaaacttccgcagtgaaaggctcaaacggggtggccgaaaggtagagaacgaagatatgaacaaggaccagatacttctggagaaagaagccgagttgcgacgaatgcaggagatgattgctaggatgcaggcacagatgcagatgcaaatgcagggcggagatggagacgggggggccctgggccaccatgtctag

SEQ ID NO: 103110 - DNA, 1191 bp, Artificial Sequence
  derived and/or modified sequence
atgccctggatcagcgagggccgggccacccggccctgcctgcgggtgcccagcgccaggagaggagatgagggcctgcaccagagagatgaggccagccagaagatgagcaagcagcagcccacccagttcatcaaccctgagaccccaggctacgtgggctttgccaacctgcccaaccaggtgcacaggaagtctgtgaagaagggctttgagttcaccctgatggtggtgggggagagcggcctgggcaagagcaccctcatcaacagcctcttcctgacagacctgtacccagagagggtcatccctggagctgctgagaagattgaaagaacagtgcagatcgaggccagcacagtggagattgaggagcggggcgtgaagctgcggctgactgtggtggacaccccaggctatggagatgccatcaactgccgggactgcttcaagaccatcatctcctacattgatgagcagtttgagcgctacctgcatgatgaaagtggcctgaacagaagacacatcatcgacaacagagtgcactgctgcttctacttcatcagcccctttggacatggcctgaagcccctggatgtggccttcatgaaggccatccacaacaaggtgaacatcgtgcctgtgattgccaaggctgacaccctgaccctgaaggagcgggagcggctgaagaagaggatcctggatgaaattgaggagcacaacatcaagatctaccacctgcctgatgctgagagtgatgaagatgaggacttcaaggagcagacccggctgctgaaggccagcatccccttctctgtggtgggcagcaaccagctgattgaggccaagggcaagaaggtgcggggccgcctgtacccctggggcgtggtggaggtggagaaccctgagcacaatgacttcctgaagctgcggaccatgctgatcacccacatgcaggacctgcaggaggtgacccaggacctgcactatgagaacttccgctctgagcggctgaagaggggcggcaggaaggtggagaatgaagacatgaacaaggaccagatcctgctggagaaggaggccgagctgcggaggatgcaggagatgattgccaggatgcaggcccagatgcagatgcagatgcagggcggagatggagatggaggagccctgggccaccacgtgtag

SEQ ID NO: 103111 - DNA, 1191 bp, Artificial Sequence
  derived and/or modified sequence
atgccctggatcagcgagggccgggccacccggccctgcctgcgggttccctccgcccgccgaggtgatgaggggttgcaccagcgggacgaggccagccagaagatgagcaaacagcaacctacacagtttataaaccccgagactcccgggtatgtcggcttcgccaatttgccaaaccaggtgcaccgaaagtcggtgaaaaaaggattcgagttcaccctcatggtggttggtgagagtgggctggggaagtccactctgatcaactctctgtttttgaccgacctttatcctgagagggtcattccaggtgccgccgagaagattgagcgtactgtgcaaattgaggctagcactgtagagatcgaagagcgtggcgtgaaactccggttaacagtggtggatacgcccggctatggagatgccatcaattgtagggactgtttcaaaaccatcataagctacatcgacgaacagttcgagcgctatctgcacgatgaatctggactcaataggagacacattatcgataaccgagttcattgttgtttttacttcatctcccctttcggccatggcttaaagcctttggatgtggcattcatgaaggccattcataataaggtaaatattgttccagtcatcgcaaaggccgacacactgacactgaaagaaagggaacggcttaagaagcggattctggacgagatcgaagagcataatataaaaatttatcatctgcctgacgccgagagcgatgaggatgaggacttcaaggaacagacaaggctcctcaaggcatccatcccattctcggtggtcggttctaatcagctaatcgaagcgaagggaaaaaaggtccggggccgtctttatccctggggagtggtggaggtggaaaatcctgagcataacgattttctgaagctccggacgatgttgataactcatatgcaggatctgcaagaggtgacccaggatcttcactacgaaaacttcaggtcagaacgcctcaaacggggcggcaggaaggtggagaacgaagacatgaataaagatcagatcctcttggaaaaggaagccgaactacggaggatgcaggagatgatcgcccgcatgcaggcccagatgcagatgcaaatgcagggaggggacggggatgggggagccctggggcatcatgtgtag

SEQ ID NO: 103112 - DNA, 1191 bp, Artificial Sequence
  derived and/or modified sequence
atgccctggatttctgagggcagagcaactcgaccgtgcctgagagttccttctgccaggcggggagatgagggcctgcaccaacgcgacgaggctagccaaaagatgtcaaaacagcagcccacccagtttatcaatccagagacaccgggatatgtcgggttcgcgaacctgccaaaccaggtacaccgaaagtcagtcaagaaaggttttgagtttactctgatggtggtcggagaaagcggtctgggcaagagtactttgattaactctctctttctcactgacttgtatcctgagagagttatccccggtgcggctgagaagatagaacgtacagttcagatcgaagcttcaacggtcgaaatcgaagagcgtggggtgaaactacgactaaccgtggtggatacgcctgggtatggagatgccatcaactgccgggattgctttaaaaccatcattagctacattgatgaacagttcgaaagatatctgcacgacgagagcggtctgaaccggcgtcacataatagacaaccgggttcattgctgtttctacttcatcagtcccttcgggcacggcctcaaacctctagacgtagcttttatgaaggccatccataataaggtcaacatcgtaccagtgatcgcaaaggccgatactttgaccctgaaggaaagagagcggctgaagaaacgaattctcgatgagatagaggaacacaatataaagatctaccacttgcccgacgcagagtccgatgaagacgaagacttcaaagagcagacacgactcctaaaggcctccattccatttagtgtcgtaggaagcaatcaactgatcgaggctaaaggcaagaaagtgcgagggaggctttacccttggggggttgttgaggtagaaaaccctgaacacaacgacttcctgaagctgcgtactatgttgattacacatatgcaggatctgcaggaagtgactcaggatttgcactatgagaacttccggtccgagcggttaaagagaggtggcagaaaggtggagaacgaagatatgaacaaagatcaaattctgctggagaaagaagcagagttaaggagaatgcaggaaatgatcgctagaatgcaggctcagatgcagatgcagatgcaggggggtgatggggatggaggggctctagggcatcacgtctag

SEQ ID NO: 103113 - DNA, 3278 bp, Artificial Sequence
  derived and/or modified sequence
atgccgtggataagcgaggggagagcgactaggccctgtctgcgggtaccttcggcgaggagaggcgacgaaggtctgcaccagcgagacgaagcttcacaaaagatgtctaagcaacagccaactcagtttataaatccagaaacacctggctatgttggatttgcaaacctccccaatcaagttcaccgaaaatcagtgaaaaaaggttttgagttcacactgatggtggtcggtgaatcaggtctaggaaaatcgactctcataaacagcctattcctaactgatctgtacccagaaagagtcatacctggagcagcagaaaaaattgaaagaactgtccagattgaggcttcaactgttgaaattgaagagcgaggggtcaagctacgcctgacagtggtagatacccctggctatggtgacgctatcaactgcagagattgttttaagacaattatctcctatattgatgagcaatttgagaggtacctgcatgacgagagcggcttgaacaggcggcacatcattgataatagggtgcattgttgcttttactttatttcaccttttggacatggacttaagcccttagatgtggcgtttatgaaggcaatacacaacaaggtgaatattgtgcctgtcattgcaaaagctgacactctcaccctgaaggaacgggagcggctgaagaaaaggattctggatgaaattgaagaacataacatcaaaatctatcacttacctgatgcagaatcagatgaagatgaagattttaaagagcagactagacttctcaaggctagcatcccattctctgtggttggatccaatcagttgattgaagccaaaggaaagaaggtcagaggccgcctctacccctggggtgttgtggaagtggagaacccagagcacaatgactttctgaagctgagaaccatgctcatcacccacatgcaggatctccaggaggtgacccaggaccttcattatgaaaacttccgttctgagagactcaagagaggcggcaggaaagtggagaatgaggacatgaataaagaccagatcttgctggaaaaagaagctgagctccgccgcatgcaagagatgattgcaaggatgcaggcgcagatgcagatgcagatgcagggcggggatggcgatggcggggctctcgggcaccacgtgtaaggtgatgtgcacatatcaagaagtcagagaaaacactttcctggataaaaaagaaaacattccagatgcatgatccagctgtgtgttttcaatccttgggagggtgccatccacattttaacagtacctgtgcctgagaatttaatttttaaaagactttgatgtgtttttgtatgaagtacttttaacgtatgtatttcattgctgtgtcacactctgtgttttgtgaggtgaatgtcttccttttctttctccctaaccactaatgttagaattgatttccaagaatcggcatgtatacttaatactgaatttctttgatttaactgacttaacaactgactaaccattgatgagcactcctgatttttatctagaacattcagatttaccataatgttccttagtggtagaggtgtgtgcctagtgatgtagaaagatacactgacttggtgcaaggccatctgcttaccacatcacaccacttggagatctttgcttccttgcttttatgtttgtacacaacacctaaaaccagttttgctgctataattctatactgttgattcgtctgcgattttatctgttaaccaaataaaacataatagaatttcctaatgagatatatctttatacttaaacagcttttttagaggtgagttttaaagaagtctcttaattctgatgctaggttgtttttaaaaccactatgcaaagaactcaccacaagccaccttttgtagtgttctccactaatactggttatcctgtgctacagagaaaatcaaagcagtcataagctccagttttcgtattgcaaataagactcttacctacaaaatgagattcagtgaactaatttggtttttactcaaccaaattaaaaatttttttaaggaaaattagcagttggtctattcagaatcaaacctttttatattttatactgcactttagtgtattttctgtcactgtaggtatagaagatctgcctcccctgtggaaattggggtctgttggtgggcgtgcccctgaagcctggcttgggttgaaaagtgttcccgccctaaggccttggtgccctgaacctctgatgcctaccgggttctcctgatttgagtttcctttaaatactccctttttgagtaattttctgatgggaggaaagtagcagtcatcatctttttgtgtgcaggctgtctcatttatttttagccattgtcgtttcattcattttgtgtaatataaaccgtgtgtcatgtcaaagtgaaagacatttcaaatctgtagcataggctagtgggcaggtccgcacagtcgaagccacacctggtctgttttctgtgcactgtagccttagtgtcacctttcttcttgtgtctccttatggtacactccagcggttgccttttttatcatttctactgaagttgggaaattcaaccccagaaattgacagatgaaaggagacaatggttgtgtagggagatggagaaaatgcttaatctgaggatgagacagggttttttcatttttgtgggggctagaaaaaacataaaatgaggcagttaaataataatagttaatgaaggtgtgctacagaaaataatctggtgttcttgctaactttgcccttcactgttgcttaattgtgaacagccaaaagctatatgttatggcttattgtgtgaaggtaactaagaagtggtgttccatgacttcagagtacatccatgcggagtccattatttgagtttgacatttaataactttgctggaaaatctgtaaaaaagaaaaacaagtttgctagtgactaagccccgcatatgtgagtgaaagtacttcaggcacgctgcctcctggtaacagctatgcagggagggaggacccacactgctacacttctgatcccctttggttttactacccaaatctaaatagatacttttgataatagataactgctcttttactaagacatagtctctacctatagaaatgtattttgaaaacacttattttacacagcaattttgtatccatttaaactaaccttttatcaataaagcactattgtttagatatt

SEQ ID NO: 103114 - DNA, 574 bp, Artificial Sequence
  derived and/or modified sequence
gtcggcgcctgttctcgggctgtttggcgggcgtggaggactggccagcccccaaacctccaagcccatcggctggatgccgtggataagcgaggggagagcgactaggccctgtctgcgggtaccttcggcgaggagaggcgacgaaggtctgcaccagcgagacgaagcttcacaaaagatgtctaagcaacagccaactcagtttataaatccagaaacacctggctatgttggatttgcaaacctccccaatcaagttcaccgaaaatcagtgaaaaaaggttttgagttcacactgatggtggtcggtgaatcaggtctaggaaaatcgactctcataaacagcctattcctaactgatctgtacccagaaagagtcatacctggagcagcagaaaaaattgaaagaactgtccagattgaggcttcaactgttgaaattgaagagcgaggggtcaagctacgcctgacagtggtagatacccctggctatggtgacgctatcaactgcagagattgttttaagacaattatctcctatattgatgagcaatttgagaggtacctgcat

SEQ ID NO: 103115 - DNA, 1191 bp, Artificial Sequence
  derived and/or modified sequence
atgccctggatcagcgagggcagagccaccagaccctgcctgagagtgcccagcgccagaagaggcgacgagggcctgcaccagagagacgaggccagccagaagatgagcaagcagcagcccacccagttcatcaaccccgagacccccggctacgtgggcttcgccaacctgcccaaccaggtgcacagaaagagcgtgaagaagggcttcgagttcaccctgatggtggtgggcgagagcggcctgggcaagagcaccctgatcaacagcctgttcctgaccgacctgtaccccgagagagtgatccccggcgccgccgagaagatcgagagaaccgtgcagatcgaggccagcaccgtggagatcgaggagagaggcgtgaagctgagactgaccgtggtggacacccccggctacggcgacgccatcaactgcagagactgcttcaagaccatcatcagctacatcgacgagcagttcgagagatacctgcacgacgagagcggcctgaacagaagacacatcatcgacaacagagtgcactgctgcttctacttcatcagccccttcggccacggcctgaagcccctggacgtggccttcatgaaggccatccacaacaaggtgaacatcgtgcccgtgatcgccaaggccgacaccctgaccctgaaggagagagagagactgaagaagagaatcctggacgagatcgaggagcacaacatcaagatctaccacctgcccgacgccgagagcgacgaggacgaggacttcaaggagcagaccagactgctgaaggccagcatccccttcagcgtggtgggcagcaaccagctgatcgaggccaagggcaagaaggtgagaggcagactgtacccctggggcgtggtggaggtggagaaccccgagcacaacgacttcctgaagctgagaaccatgctgatcacccacatgcaggacctgcaggaggtgacccaggacctgcactacgagaacttcagaagcgagagactgaagagaggcggcagaaaggtggagaacgaggacatgaacaaggaccagatcctgctggagaaggaggccgagctgagaagaatgcaggagatgatcgccagaatgcaggcccagatgcagatgcagatgcagggcggcgacggcgacggcggcgccctgggccaccacgtgtag

SEQ ID NO: 103116 - protein, 23 aa, Artificial Sequence
  derived and/or modified sequence
MSKQQPTQFINPETPGYVGFANL

SEQ ID NO: 103117 - protein, 730 aa, Artificial Sequence
  derived and/or modified sequence
MEAVIEKECSALGGLFQTIISDMKGSYPVWEDFINKAGKLQSQLRTTVVAAAAFLDAFQKVADMATNTRGGTREIGSALTRMCMRHRSIEAKLRQFSSALIDCLINPLQEQMEEWKKVANQLDKDHAKEYKKARQEIKKKSSDTLKLQKKAKKGRGDIQPQLDSALQDVNDKYLLLEETEKQAVRKALIEERGRFCTFISMLRPVIEEEISMLGEITHLQTISEDLKSLTMDPHKLPSSSEQVILDLKGSDYSWSYQTPPSSPSTTMSRKSSVCSSLNSVNSSDSRSSGSHSHSPSSHYRYRSSNLAQQAPVRLSSVSSHDSGFISQDAFQSKSPSPMPPEAPNQNSSSSASSEASETCQSVSECSSPTSVSSGSTMGAWVSTEKDWAKPGPYDQPLVNTLQRRKEKREPDPNGGGPTTASGPPAAAEEAQRPRSMTVSAATRPGEEMEACEELALALSRGLQLDTQRSSRDSLQCSSGYSTQTTTPCCSEDTIPSQVSDYDYFSVSGDQEADQQEFDKSSTIPRNSDISQSYRRMFQAKRPASTAGLPTTLGPAMVTPGVATIRRTPSTKPSVRRGTIGAGPIPIKTPVIPVKTPTVPDLPGVLPAPPDGPEERGEHSPESPSVGEGPQGVTSMPSSMWSGQASVNPPLPGPKPSIPEEHRQAIPESEAEDQEREPPSATVSPGQIPESDPADLSPRDTPQGEDMLNAIRRGVKLKKTTTNDRSAPRFS

SEQ ID NO: 103118 - DNA, 2193 bp, Artificial Sequence
  derived and/or modified sequence
atggaggccgtgatcgagaaggagtgcagcgccctgggcggcctgttccagaccatcatcagcgacatgaagggcagctaccccgtgtgggaggacttcatcaacaaggccggcaagctgcagagccagctgagaaccaccgtggtggccgccgccgccttcctggacgccttccagaaggtggccgacatggccaccaacaccagaggcggcaccagagagatcggcagcgccctgaccagaatgtgcatgagacacagaagcatcgaggccaagctgagacagttcagcagcgccctgatcgactgcctgatcaaccccctgcaggagcagatggaggagtggaagaaggtggccaaccagctggacaaggaccacgccaaggagtacaagaaggccagacaggagatcaagaagaagagcagcgacaccctgaagctgcagaagaaggccaagaagggcagaggcgacatccagccccagctggacagcgccctgcaggacgtgaacgacaagtacctgctgctggaggagaccgagaagcaggccgtgagaaaggccctgatcgaggagagaggcagattctgcaccttcatcagcatgctgagacccgtgatcgaggaggagatcagcatgctgggcgagatcacccacctgcagaccatcagcgaggacctgaagagcctgaccatggacccccacaagctgcccagcagcagcgagcaggtgatcctggacctgaagggcagcgactacagctggagctaccagaccccccccagcagccccagcaccaccatgagcagaaagagcagcgtgtgcagcagcctgaacagcgtgaacagcagcgacagcagaagcagcggcagccacagccacagccccagcagccactacagatacagaagcagcaacctggcccagcaggcccccgtgagactgagcagcgtgagcagccacgacagcggcttcatcagccaggacgccttccagagcaagagccccagccccatgccccccgaggcccccaaccagaacagcagcagcagcgccagcagcgaggccagcgagacctgccagagcgtgagcgagtgcagcagccccaccagcgtgagcagcggcagcaccatgggcgcctgggtgagcaccgagaaggactgggccaagcccggcccctacgaccagcccctggtgaacaccctgcagagaagaaaggagaagagagagcccgaccccaacggcggcggccccaccaccgccagcggcccccccgccgccgccgaggaggcccagagacccagaagcatgaccgtgagcgccgccaccagacccggcgaggagatggaggcctgcgaggagctggccctggccctgagcagaggcctgcagctggacacccagagaagcagcagagacagcctgcagtgcagcagcggctacagcacccagaccaccaccccctgctgcagcgaggacaccatccccagccaggtgagcgactacgactacttcagcgtgagcggcgaccaggaggccgaccagcaggagttcgacaagagcagcaccatccccagaaacagcgacatcagccagagctacagaagaatgttccaggccaagagacccgccagcaccgccggcctgcccaccaccctgggccccgccatggtgacccccggcgtggccaccatcagaagaacccccagcaccaagcccagcgtgagaagaggcaccatcggcgccggccccatccccatcaagacccccgtgatccccgtgaagacccccaccgtgcccgacctgcccggcgtgctgcccgccccccccgacggccccgaggagagaggcgagcacagccccgagagccccagcgtgggcgagggcccccagggcgtgaccagcatgcccagcagcatgtggagcggccaggccagcgtgaacccccccctgcccggccccaagcccagcatccccgaggagcacagacaggccatccccgagagcgaggccgaggaccaggagagagagccccccagcgccaccgtgagccccggccagatccccgagagcgaccccgccgacctgagccccagagacaccccccagggcgaggacatgctgaacgccatcagaagaggcgtgaagctgaagaagaccaccaccaacgacagaagcgcccccagattcagctag

SEQ ID NO: 103119 - DNA, 2193 bp, Artificial Sequence
  derived and/or modified sequence
atggaagccgttattgagaaggagtgcagcgctttaggcgggctattccagacaataattagcgacatgaaaggttcctaccctgtttgggaagattttatcaataaggccggcaaactccaatcccagctccggaccacggtggtggctgccgccgcctttctggatgcctttcagaaggtggccgatatggcaaccaatacacgaggcggcaccagagagatcggttcagccctcaccaggatgtgtatgcgccaccgttctatcgaggcaaagctgagacaattctccagcgcacttatcgactgcctgatcaaccccctgcaggagcagatggaggagtggaaaaaagttgctaatcaactggataaggaccatgctaaagagtataaaaaggcccgccaggaaatcaagaaaaagagcagcgacaccctgaagctccaaaagaaagccaaaaaggggagaggggatatccagcctcagctcgatagtgctctgcaggatgtcaacgataaatacttactgctagaggaaacagaaaaacaggccgttcgcaaagccctcatagaggagagagggcgcttctgtacatttatcagcatgttgcgtcctgttatagaagaggagatatccatgttgggcgaaattacccacctacagactatcagcgaagatctgaagtcattaaccatggatccccataaactgccctcatcctcagaacaggtgattttggatttgaaagggtccgattatagttggtcttaccagacaccccccagctctccaagtaccacaatgagcagaaaatctagtgtatgcagctcccttaacagtgtcaacagcagcgatagcagatcttcagggtcgcacagccactctcccagcagccactaccggtacagaagtagcaacctggctcagcaagcaccggtgagactgtcctctgtgtcttcccacgatagtggtttcatttctcaggatgccttccagtcaaagagcccatcgccgatgccgccagaggcgcctaatcaaaacagttcaagttccgccagctccgaagcaagcgagacatgccagagcgtgtctgaatgtagttcgcctacttctgtttcaagcggctccaccatgggcgcttgggtcagcaccgaaaaggactgggcaaagcctgggccctacgaccagcctctggtcaatacacttcagcgccgaaaagagaaaagagagcccgaccctaacggggggggacccacaacggcttccggcccaccggccgccgcagaggaggcacagcggcctagaagcatgaccgtttccgctgccacacgaccaggcgaggagatggaagcgtgcgaggaactggcactcgcattgtcccgaggtttacagctcgacacccagcgatcaagccgggattcattacagtgtagctccgggtactcaacacagaccaccacaccgtgttgttctgaggacacaatcccctctcaagtatccgactacgattacttctcagtgagtggcgatcaggaggctgatcagcaggaattcgacaaatcatccacaattccaaggaactcagacatttctcagagctatcggagaatgtttcaggccaagcgtcccgcctccacagcaggcttgcccacgacgctcggaccagccatggttacacctggcgtggctacgatacgccggacaccatcaacaaagccatccgtacggaggggtactataggcgccgggcccatacctatcaagacccccgttattccagtgaaaacaccaactgttccggatttgcccggggtgttgcccgctccccctgacggacccgaggagaggggggagcacagcccagagagcccgtctgtgggcgagggccctcagggagttacgagcatgccatcctctatgtggagcggtcaggcatccgtgaacccccctctgccaggccccaaaccaagtatacctgaggagcaccggcaggcaatccctgaatctgaggcagaggatcaggaaagggaaccgccgtccgctacggtgagcccgggacaaataccggaaagcgaccctgcagatctgagccccagagacactccccagggagaggacatgcttaacgccataagaagaggggtgaaattgaaaaagacaacaacgaatgataggtcagcacctcgcttcagttag

SEQ ID NO: 103120 - DNA, 2193 bp, Artificial Sequence
  derived and/or modified sequence
atggaggccgtgattgagaaggagtgcagcgccctgggcggcctcttccagaccatcatcagtgacatgaagggcagctaccctgtgtgggaggacttcatcaacaaggccggcaagctgcagagccagctgcggaccaccgtggtggccgccgccgccttcctggatgccttccagaaggtggccgacatggccaccaacacccggggcggcacccgggagatcggcagcgccctgaccaggatgtgcatgaggcacaggagcattgaggccaagctgcggcagttcagcagcgccctgattgactgcctgatcaaccccctgcaggagcagatggaggagtggaagaaggtggccaaccagctggacaaggaccacgccaaggagtacaagaaggcccggcaggagatcaagaagaagagcagtgacaccctgaagctgcagaagaaggccaagaagggccgcggggacatccagccccagctggacagcgccctgcaggatgtgaatgacaagtacctgctgctggaggagacagagaagcaggccgtgaggaaggccctgattgaggagcggggccgcttctgcaccttcatctccatgctgcggcctgtgattgaggaggagatctccatgctgggggagatcacccacctgcagaccatcagcgaggacctgaagagcctgaccatggacccccacaagctgcccagcagcagcgagcaggtgatcctggacctgaagggcagtgactacagctggagctaccagaccccacccagcagccccagcaccaccatgagcaggaagagctctgtgtgcagcagcctgaacagcgtgaacagcagtgacagccgcagcagcggcagccacagccacagccccagcagccactaccgctaccgcagcagcaacctggcccagcaggcccctgtgcggctgagctctgtgagcagccatgacagcggcttcatcagccaggatgccttccagagcaagagccccagccccatgcctcctgaggcccccaaccagaacagcagcagcagcgccagcagcgaggccagcgagacctgccagagcgtgtctgagtgcagcagccccacctctgtgagcagcggcagcaccatgggcgcctgggtgtccacagagaaggactgggccaagccaggcccctatgaccagcccctggtgaacaccctgcagaggaggaaggagaagcgggagccagaccccaatggaggcggccccaccacagccagcggccccccagctgctgctgaggaggcccagaggcccaggtccatgacagtgtctgctgccaccaggcctggagaggagatggaggcctgtgaggagctggccctggccctgagccggggcctgcagctggacacccagaggagcagccgggacagcctgcagtgcagcagcggctacagcacccagaccaccaccccctgctgcagcgaggacaccatccccagccaggtgtctgactatgactacttctctgtgtctggggaccaggaggccgaccagcaggagtttgacaagagcagcaccatccccaggaacagcgacatcagccagagctacagaaggatgttccaggccaagaggcctgccagcacagctggcctgcccaccaccctgggccctgccatggtgaccccaggagtggccaccatccggaggacccccagcaccaagcccagcgtgagaagaggcaccatcggggccggccccatccccatcaagacccctgtgattcctgtgaagacccccaccgtgcctgacctgcccggggtgctgcctgcccccccagatggccctgaggagcggggggagcacagccctgagagccccagcgtgggggagggcccccagggcgtgacctccatgcccagctccatgtggagcggccaggcctctgtgaacccccccctgcccggccccaagcccagcatccctgaggagcaccggcaggccatccctgagagcgaggccgaggaccaggagcgggagcccccatctgccaccgtgtccccaggccagatccctgagagtgaccctgctgacctgagcccccgggacaccccccagggcgaggacatgctgaatgccatcagaagaggagtgaagctgaagaagaccaccaccaatgacagaagtgccccccgcttctcctag

SEQ ID NO: 103121 - DNA, 4458 bp, Artificial Sequence
  derived and/or modified sequence
cccggccccgcgcgcagtccagcggccccgcgtgtgtgccctcgccctgccggagccgggaaaatggaggctgtgattgagaaggaatgcagcgcgctcggaggcctcttccagaccatcatcagcgacatgaaggggagctatccagtttgggaagatttcataaacaaagcaggaaagctgcagtcccagcttcggacaacagtagtagcagcagctgccttcttggacgcctttcagaaagtggctgacatggccaccaacacacgtggtgggaccagggagattggatctgctctcaccaggatgtgcatgaggcacagaagcattgaagccaagctgaggcagttttcgagcgctttaattgattgtctgataaacccacttcaagaacagatggaagaatggaagaaagtggccaaccagctggataaagaccacgcaaaagaatataagaaagcccgccaagagataaaaaagaagtcctcggatacgctgaaactgcagaagaaagcaaaaaaagggagaggtgatatccagcctcagttggacagtgctctccaagatgtcaatgataagtatctcttattggaagaaacagaaaagcaggctgtccggaaggctttgattgaagaacgtggccgattctgtaccttcatctctatgctgcggccagtgattgaagaagaaatctcaatgctaggggaaataacccaccttcagaccatctcggaagatctaaaaagcctgaccatggaccctcacaaactgccctcctcaagtgaacaggtgattctggacttgaaaggttctgattacagctggtcgtatcagacgccaccctcttcccccagcaccaccatgtccagaaagtccagtgtctgcagcagcctgaacagtgtcaacagcagtgactcccggtccagcggctcccactcgcattcccccagctcacattaccgctaccgcagctccaacctggcccagcaggctcctgtgaggctgtccagcgtgtcctcccatgactcaggattcatatcccaggatgccttccagtccaagtcaccatcccccatgccgccagaggcccccaaccagaactcgtccagctcggcctcctccgaagcctcggaaacctgccagtcagtgagcgagtgcagctcccccacctctgtcagctcgggctccaccatgggtgcctgggtgtccacagagaaggactgggctaagcctgggccctatgaccagcctctggtgaacaccctgcagcgccgcaaagagaagcgagaaccggaccccaacgggggaggacccactaccgccagcggcccacctgcagcagctgaggaggctcagagaccacggagcatgactgtatcggctgccaccaggcctggtgaggagatggaggcttgtgaggagctggccctggccctgtctcggggcctgcagctggacacccagaggagcagccgggactcgcttcagtgctccagcggctacagcacccagacaaccaccccctgctgctctgaggacaccatcccttcccaagtttcagattatgattatttctctgtaagtggtgaccaggaggcagatcagcaggagttcgacaagtcctccaccattccaagaaacagcgacatcagccagtcctaccgacggatgttccaagccaagcgtccagcctcaactgctggcctccccaccaccctgggacctgctatggtcactccaggggttgcaactatccgacggaccccttccaccaagccttctgtccgccggggaaccattggagctggtcccatccccatcaagacacccgtgatccctgtcaagaccccaaccgtcccagacctcccaggggtgttgccagcccctccagatgggccagaagagcggggggagcacagccctgagtcgccatctgtgggtgagggcccccaaggtgtcaccagcatgccctcctcaatgtggagcggccaagcttccgttaaccctccacttccaggcccgaagcccagtatccctgaggagcacagacaggcaattccagaaagtgaagctgaagaccaggaacgggaacccccaagtgccactgtctccccaggccagattccagagagtgaccctgcagacctgagcccaagggatactccacaaggagaagacatgctgaacgccatccgaaggggcgtgaaactgaagaagaccacgacaaacgatcgctcagcccctcgcttttcttaggttcacaagaaatgcgccggtggggaatgaactgtttcattaataaaacctaatttgtcttgatccattccactctataataaaacaaaagattttgtaggcaactcggaatatagctcttttgaaagtactcgacacctttagataagaattaaaaccaacctatgtaactgacataatcttgatcttttaatttgtaaatattgacaattttctttctgcacattttaatcttagtttcccttttgatttttctgaaggtgccaaattccatttaacttttttacaagtctttgtaaaattttaaatgcataaagggggttggggcaggggaaccacgaagtagttaattttagaaaaggatttactatacttcactcttctttttttttccccacaagcttttgtagatgcattgtagtagtctagcttagaagcaaatgcaagttattttaatgtacaaactaaatgggtaagaggtaaaatcttcatttaaatatactatgttctggatgaaaagagcaggagtaacaattgatgagcaatattcagagtgaagtaaatctggaaatggtagactgtgttgggattggggggagggccatgggaggggtacatcgtcaacatagccgatcctgttacatttaagagtagcctcgtaggttgaatttcttctggtagcttcatggtaaatgcatccgaataagccatactggattgcagtgtttgtttctgtagggtgtttaaggacttgacttcctttctcccatgattcctctggactgcacacagcacccacaaccagccccatgcatgctgctgcctctgggcagtcgtagaatctcccacttcagtttctcgttgattgtactcacctttatggaatccaaatacatccaaaagggtaaggcagttttaaaaatgtgaaaacatttaaaaatgataatagcagggaattcttagattatagtaaatgccttttacttaactgtgcccagcaggctgggtgcgttaaaaagcccaagtattttgaaaaaactcgaacagatttgacaagggtagccagcttggagtctagcaacttgccaatgtgtttaccaatctgggggcttgtttttcttttcttctttcaaataaatggcagttaactggctttacagtaaacattgaagagaggaggatttgtttattgtcactgggaatctgaccactatactgtcctttttttgtattctgggtaaatgttttttggaaaagatttgtcttttctaagtggaagttaaatttgttatactgcccatcccctaaagccaacagagatttgtagatttaaagggatcacatttgaagacaatagtgtttaagaaagcaagcaagtcccttagcagtcaggtcataacagggcacatttctgaccgaaccctctcaaggcagaggaggagtttggtgggtttcatacaccctgcagattcctgttggctctaaccctcaattacctaatcttatgctttaacacataactgcattggatgtgagagtaacgtaccgtatggtcattgttctatatattaacattgaacactgctgcgattgctcaaggacattttatgttacggctttaaagcaaaggcatgattattagaaactatttaagcttttttctttgaaaaacaagctccttttacagaatataaacaacagtagtgcctgtggtttagcccaccaatcttgatgactaaaagtagctgatgcattgtgcatatgatgcttgagatggtttttgcaaaagcagaaatcgctgcaaggtaatcacaatagataaaagtggtattttaaacctttgaaataaatggatgtaactgtaccttggtacagcttttcacttgtttagtttttaaacgttagtataatctgaataaataaaatgttgccaaattcaatgtagaaagaatgtgacaacacaccttgggtagttctgcttgtgtttttgcatattgtaaaagcagtgtcacagctaaaaagaaagaaatcgtttctaacagtaaattattgtgctttagttgctagtttgtactgagagttgacctctccctgtgcagttttttgttctaaacttgtataaataacaattgtgtaatgtgtctccctcctacattgtaacaattgcttcagcctacgttataaataaagaaccactagatt

SEQ ID NO: 103122 - DNA, 2193 bp, Artificial Sequence
  derived and/or modified sequence
atggaggccgtgatcgagaaggagtgcagcgccctgggcggcctgttccaaaccattattagcgacatgaaggggtcttaccccgtttgggaagacttcatcaataaggctggcaaactgcaatcccaactccgcacaaccgtcgtcgcggccgccgcgtttttagatgccttccagaaagtggctgatatggccaccaacacccggggcgggacacgggagattggtagtgcactgacacgaatgtgtatgagacatagaagtattgaggccaaactgaggcagttctcgtccgctctaatagattgtctgattaacccactgcaggagcagatggaggagtggaaaaaagtggccaatcagcttgataaggaccacgctaaagagtacaagaaagctcgccaggagatcaaaaaaaaatcatctgacacccttaagttgcaaaagaaggccaagaaaggccgcggagatattcaaccacagctggattcagcccttcaggacgtgaacgataaatatctgctgctggaggagacagagaagcaggcggtccgaaaggcactcatagaggaacgcggacggttctgtacttttatttcaatgctgaggcccgtcattgaggaggagatcagcatgctgggcgagattacacacctgcagaccatcagtgaggatctgaaaagcctgactatggacccgcataaactcccatcctctagtgaacaggtcatcttagatcttaagggatcagattactcctggagctatcagacccctcccagcagcccctcaacaacaatgtcacgcaagtcttccgtgtgttctagcctcaatagtgtcaatagctctgactcacgctccagtggcagccactcgcactcaccatcctcacactatagatatcggtccagtaatctggcccagcaggccccagtcaggcttagctcagtgtcttcccatgactcaggattcatctcccaggatgcctttcagagcaagtctcctagtcctatgcccccagaagccccgaatcagaacagcagctcgagcgcttcctctgaggcgagtgagacctgccagagcgtgtctgagtgctcttcacccacttctgtatcaagtggaagtactatgggggcgtgggtttcaaccgaaaaagactgggccaagccaggtccctatgaccagcctctggtcaacaccctgcaacgacggaaggaaaaaagagaacctgaccctaacggtgggggccctacaacagcgagcggaccacctgctgccgccgaggaagctcagcggccccgctcgatgactgtcagtgccgcaaccaggccgggtgaagagatggaggcttgcgaagaactagccctggccttaagtcgcggactgcagctggatactcaacgctcctctagagatagcctgcagtgttcatctggttactcaactcagacaactactccctgctgtagtgaggacaccattcctagccaagtatctgattatgattactttagcgtctccggtgaccaggaagctgatcagcaagaatttgacaaaagctccaccatccccaggaactccgacatcagccaaagctaccgtcgcatgtttcaggcaaagcggccagcctccaccgctggcttgcctacaacactgggccccgccatggttacacctggggtggccacgattagacgtaccccttccacgaaaccctctgtgcgccgcgggactatcggtgccgggccaattccaattaagacaccggtgatcccagtgaaaactccaactgtaccagacttgccaggagtcctccctgcgccacctgacggcccagaagaaagaggtgagcattcgcccgaatctccatcagtgggtgagggaccacagggtgtcacttccatgccatcctcaatgtggtctggccaggcttcggtgaatcccccccttcccggacccaagccatcaatacccgaggaacatagacaggctattcctgagagcgaggctgaggaccaggaaagggagccccccagcgccacagtttcgcccggccagattccagagtcggacccagccgatctgagcccacgggacactccccagggtgaagacatgttgaatgcaattcgccgcggcgtaaaactcaagaaaaccaccactaacgatcgttctgccccccggttctcctag

SEQ ID NO: 103123 - DNA, 2193 bp, Artificial Sequence
  derived and/or modified sequence
atggaggcagttatcgagaaggagtgttccgctctcggcggtctgttccagacaatcattagcgatatgaagggttcttatccagtgtgggaggactttattaacaaggccggaaagctgcagtcccagcttcgcaccacagtggtcgccgcagcagcattcctggatgcttttcagaaagtcgctgacatggccactaatacacgaggaggaactcgcgagatcggaagtgcactgacacgcatgtgtatgcgccatcgctcgattgaagccaaattacgccagttcagtagcgccttgattgactgcctaattaacccattgcaagaacagatggaggagtggaagaaagtggctaaccagttagacaaggatcatgccaaggaatataagaaagccagacaggaaatcaaaaaaaagtcttccgacactctgaagctccagaagaaagctaagaagggtagaggcgatatacagcctcagctggatagcgctctccaagacgtgaatgacaagtatctcctgcttgaggaaactgagaaacaggcagttcgcaaggcactcatcgaggagcggggaagattctgtacattcatctctatgctgagacctgttatcgaggaagagatatctatgctgggtgagataacacacctccagaccatttccgaggatctgaagagtcttacaatggacccacataagctgccatcctcaagtgagcaggttattcttgatcttaaagggtccgattacagttggtcataccagactccaccatcttctccatctaccacaatgagcagaaaatccagtgtctgttctagcctcaatagtgtgaacagtagtgactctcgctcttctggcagtcattcacattcaccgagcagccactaccgataccgcagctccaacctagcacagcaggcacccgttagactatcctcggtttcttcacacgacagcggctttatctctcaggacgcatttcagagcaagagcccttccccgatgcctccggaggccccaaaccagaatagcagcagcagtgctagttctgaggcttctgaaacctgtcagtcagtgtccgaatgcagttctcccacatccgtcagttctgggtctactatgggggcttgggtgtctacagagaaagactgggcgaagccagggccatacgaccaaccgctcgtgaataccttacaaaggcgcaaagaaaaacgggagccggaccctaatggtggtggaccaaccactgccagtggcccaccggctgccgcagaagaagctcagcggcctaggagcatgaccgttagcgcggcaactcgacctggtgaggagatggaggcttgtgaagaattagccttagccctgtctagaggtttgcaactcgacacccagaggtcttcacgtgactccctccagtgttcgtcagggtactctacacagaccaccaccccttgctgttcggaagacaccattccatctcaggtatcggattatgattattttagtgtgagcggtgatcaggaggcagaccagcaggagttcgataagagttcaacaatcccaaggaacagcgatatttcccagtcttatagaaggatgtttcaggcgaaaagaccggcaagcacagctggcctgccgaccactttaggacccgctatggttaccccaggcgtggccactatcaggcgcacaccaagtacgaagccatccgtccggagggggaccatcggagccggaccgatccctattaaaacaccagttattcccgttaagacgcccacagtgcccgatctcccaggagtgctccccgcacccccagatgggccagaggaacggggtgaacatagtcctgagagccctagtgttggcgagggccctcagggtgtgaccagtatgccaagctcaatgtggtccgggcaggcaagtgtaaatccccctcttccgggtccaaagccaagcatcccagaggaacataggcaggcaattccagaaagcgaggccgaagaccaggaacgggagcctccaagcgctacagtaagccccggacaaatcccagagtctgatcccgcagacctgtccccccgagatactccacagggggaggacatgctaaacgccataaggaggggcgtcaagttgaagaaaactacaaccaatgaccgctcagctccacgattctcatag

SEQ ID NO: 103124 - protein, 764 aa, Artificial Sequence
  derived and/or modified sequence
MYPQGRHPAPHQPGQPGFKFTVAESCDRIKDEFQFLQAQYHSLKVEYDKLANEKTEMQRHYVMYYEMSYGLNIEMHKQTEIAKRLNTILAQIMPFLSQEHQQQVAQAVERAKQVTMTELNAIIGQQQLQAQHLSHATHGPPVQLPPHPSGLQPPGIPPVTGSSSGLLALGALGSQAHLTVKDEKNHHELDHRERSSASNNSVSPSESLRASEKHRGSADYSMEAKKRKAEEKDSLSRYDSDGDKSDDLVVDVSNEDPATPRVSPAHSPPENGLDKARSLKKDAPTSPASVASSSSTPSSKTKDLGHNDKSSTPGLKSNTPTPRNDAPTPGTSTTPGLRSMPGKPPGMDPIASALRTPISITSSYAAPFAMMSHHEMNGSLTSPGAYAGLHNIPPQMSAAAAAAAAAYGRSPMVGFDPHPPMRATGLPSSLASIPGGKPAYSFHVSADGQMQPVPFPHDALAGPGIPRHARQINTLSHGEVVCAVTISNPTRHVYTGGKGCVKIWDISQPGSKSPISQLDCLNRDNYIRSCKLLPDGRTLIVGGEASTLTIWDLASPTPRIKAELTSSAPACYALAISPDAKVCFSCCSDGNIAVWDLHNQTLVRQFQGHTDGASCIDISHDGTKLWTGGLDNTVRSWDLREGRQLQQHDFTSQIFSLGYCPTGEWLAVGMESSNVEVLHHTKPDKYQLHLHESCVLSLKFAYCGKWFVSTGKDNLLNAWRTPYGASIFQSKESSSVLSCDISADDKYIVTGSGDKKATVYEVIY

SEQ ID NO: 103125 - protein, 764 aa, Artificial Sequence
  derived and/or modified sequence
MYPQGRHPAPHQPGQPGFKFTVAESCDRIKDEFQFLQAQYHSLKVEYDKLANEKTEMQRHYVMYYEMSYGLNIEMHKQTEIAKRLNTILAQIMPFLSQEHQQQVAQAVERAKQVTMTELNAIIGQQQLQAQHLSHATHGPPVQLPPHPSGLQPPGIPPVTGSSSGLLALGALGSQAHLTVKDEKNHHELDHRERESSANNSVSPSESLRASEKHRGSADYSMEAKKRKAEEKDSLSRYDSDGDKSDDLVVDVSNEDPATPRVSPAHSPPENGLDKARSLKKDAPTSPASVASSSSTPSSKTKDLGHNDKSSTPGLKSNTPTPRNDAPTPGTSTTPGLRSMPGKPPGMDPIASALRTPISITSSYAAPFAMMSHHEMNGSLTSPGAYAGLHNIPPQMSAAAAAAAAAYGRSPMVGFDPHPPMRATGLPSSLASIPGGKPAYSFHVSADGQMQPVPFPHDALAGPGIPRHARQINTLSHGEVVCAVTISNPTRHVYTGGKGCVKIWDISQPGSKSPISQLDCLNRDNYIRSCKLLPDGRTLIVGGEASTLTIWDLASPTPRIKAELTSSAPACYALAISPDAKVCFSCCSDGNIAVWDLHNQTLVRQFQGHTDGASCIDISHDGTKLWTGGLDNTVRSWDLREGRQLQQHDFTSQIFSLGYCPTGEWLAVGMESSNVEVLHHTKPDKYQLHLHESCVLSLKFAYCGKWFVSTGKDNLLNAWRTPYGASIFQSKESSSVLSCDISADDKYIVTGSGDKKATVYEVIY

SEQ ID NO: 103126 - DNA, 2295 bp, Artificial Sequence
  derived and/or modified sequence
atgtacccccagggcagacaccccgccccccaccagcccggccagcccggcttcaagttcaccgtggccgagagctgcgacagaatcaaggacgagttccagttcctgcaggcccagtaccacagcctgaaggtggagtacgacaagctggccaacgagaagaccgagatgcagagacactacgtgatgtactacgagatgagctacggcctgaacatcgagatgcacaagcagaccgagatcgccaagagactgaacaccatcctggcccagatcatgcccttcctgagccaggagcaccagcagcaggtggcccaggccgtggagagagccaagcaggtgaccatgaccgagctgaacgccatcatcggccagcagcagctgcaggcccagcacctgagccacgccacccacggcccccccgtgcagctgcccccccaccccagcggcctgcagccccccggcatcccccccgtgaccggcagcagcagcggcctgctggccctgggcgccctgggcagccaggcccacctgaccgtgaaggacgagaagaaccaccacgagctggaccacagagagagaagcagcgccagcaacaacagcgtgagccccagcgagagcctgagagccagcgagaagcacagaggcagcgccgactacagcatggaggccaagaagagaaaggccgaggagaaggacagcctgagcagatacgacagcgacggcgacaagagcgacgacctggtggtggacgtgagcaacgaggaccccgccacccccagagtgagccccgcccacagcccccccgagaacggcctggacaaggccagaagcctgaagaaggacgcccccaccagccccgccagcgtggccagcagcagcagcacccccagcagcaagaccaaggacctgggccacaacgacaagagcagcacccccggcctgaagagcaacacccccacccccagaaacgacgcccccacccccggcaccagcaccacccccggcctgagaagcatgcccggcaagccccccggcatggaccccatcgccagcgccctgagaacccccatcagcatcaccagcagctacgccgcccccttcgccatgatgagccaccacgagatgaacggcagcctgaccagccccggcgcctacgccggcctgcacaacatccccccccagatgagcgccgccgccgccgccgccgccgccgcctacggcagaagccccatggtgggcttcgacccccacccccccatgagagccaccggcctgcccagcagcctggccagcatccccggcggcaagcccgcctacagcttccacgtgagcgccgacggccagatgcagcccgtgcccttcccccacgacgccctggccggccccggcatccccagacacgccagacagatcaacaccctgagccacggcgaggtggtgtgcgccgtgaccatcagcaaccccaccagacacgtgtacaccggcggcaagggctgcgtgaagatctgggacatcagccagcccggcagcaagagccccatcagccagctggactgcctgaacagagacaactacatcagaagctgcaagctgctgcccgacggcagaaccctgatcgtgggcggcgaggccagcaccctgaccatctgggacctggccagccccacccccagaatcaaggccgagctgaccagcagcgcccccgcctgctacgccctggccatcagccccgacgccaaggtgtgcttcagctgctgcagcgacggcaacatcgccgtgtgggacctgcacaaccagaccctggtgagacagttccagggccacaccgacggcgccagctgcatcgacatcagccacgacggcaccaagctgtggaccggcggcctggacaacaccgtgagaagctgggacctgagagagggcagacagctgcagcagcacgacttcaccagccagatcttcagcctgggctactgccccaccggcgagtggctggccgtgggcatggagagcagcaacgtggaggtgctgcaccacaccaagcccgacaagtaccagctgcacctgcacgagagctgcgtgctgagcctgaagttcgcctactgcggcaagtggttcgtgagcaccggcaaggacaacctgctgaacgcctggagaaccccctacggcgccagcatcttccagagcaaggagagcagcagcgtgctgagctgcgacatcagcgccgacgacaagtacatcgtgaccggcagcggcgacaagaaggccaccgtgtacgaggtgatctactag

SEQ ID NO: 103127 - DNA, 2295 bp, Artificial Sequence
  derived and/or modified sequence
atgtacccccagggcagacaccccgccccccaccagcccggccagcccggcttcaagttcaccgtggccgagagctgcgacagaatcaaggacgagttccagttcctgcaggcccagtaccacagcctgaaggtggagtacgacaagctggccaacgagaagaccgagatgcagagacactacgtgatgtactacgagatgagctacggcctgaacatcgagatgcacaagcagaccgagatcgccaagagactgaacaccatcctggcccagatcatgcccttcctgagccaggagcaccagcagcaggtggcccaggccgtggagagagccaagcaggtgaccatgaccgagctgaacgccatcatcggccagcagcagctgcaggcccagcacctgagccacgccacccacggcccccccgtgcagctgcccccccaccccagcggcctgcagccccccggcatcccccccgtgaccggcagcagcagcggcctgctggccctgggcgccctgggcagccaggcccacctgaccgtgaaggacgagaagaaccaccacgagctggaccacagagagagagagagcagcgccaacaacagcgtgagccccagcgagagcctgagagccagcgagaagcacagaggcagcgccgactacagcatggaggccaagaagagaaaggccgaggagaaggacagcctgagcagatacgacagcgacggcgacaagagcgacgacctggtggtggacgtgagcaacgaggaccccgccacccccagagtgagccccgcccacagcccccccgagaacggcctggacaaggccagaagcctgaagaaggacgcccccaccagccccgccagcgtggccagcagcagcagcacccccagcagcaagaccaaggacctgggccacaacgacaagagcagcacccccggcctgaagagcaacacccccacccccagaaacgacgcccccacccccggcaccagcaccacccccggcctgagaagcatgcccggcaagccccccggcatggaccccatcgccagcgccctgagaacccccatcagcatcaccagcagctacgccgcccccttcgccatgatgagccaccacgagatgaacggcagcctgaccagccccggcgcctacgccggcctgcacaacatccccccccagatgagcgccgccgccgccgccgccgccgccgcctacggcagaagccccatggtgggcttcgacccccacccccccatgagagccaccggcctgcccagcagcctggccagcatccccggcggcaagcccgcctacagcttccacgtgagcgccgacggccagatgcagcccgtgcccttcccccacgacgccctggccggccccggcatccccagacacgccagacagatcaacaccctgagccacggcgaggtggtgtgcgccgtgaccatcagcaaccccaccagacacgtgtacaccggcggcaagggctgcgtgaagatctgggacatcagccagcccggcagcaagagccccatcagccagctggactgcctgaacagagacaactacatcagaagctgcaagctgctgcccgacggcagaaccctgatcgtgggcggcgaggccagcaccctgaccatctgggacctggccagccccacccccagaatcaaggccgagctgaccagcagcgcccccgcctgctacgccctggccatcagccccgacgccaaggtgtgcttcagctgctgcagcgacggcaacatcgccgtgtgggacctgcacaaccagaccctggtgagacagttccagggccacaccgacggcgccagctgcatcgacatcagccacgacggcaccaagctgtggaccggcggcctggacaacaccgtgagaagctgggacctgagagagggcagacagctgcagcagcacgacttcaccagccagatcttcagcctgggctactgccccaccggcgagtggctggccgtgggcatggagagcagcaacgtggaggtgctgcaccacaccaagcccgacaagtaccagctgcacctgcacgagagctgcgtgctgagcctgaagttcgcctactgcggcaagtggttcgtgagcaccggcaaggacaacctgctgaacgcctggagaaccccctacggcgccagcatcttccagagcaaggagagcagcagcgtgctgagctgcgacatcagcgccgacgacaagtacatcgtgaccggcagcggcgacaagaaggccaccgtgtacgaggtgatctactag

SEQ ID NO: 103128 - DNA, 2295 bp, Artificial Sequence
  derived and/or modified sequence
atgtatccccaagggcgtcaccctgccccccatcaacctggacagcctggtttcaagtttaccgtcgctgaatcatgcgacaggatcaaggatgaattccaatttttgcaggcacagtaccattccctcaaagtagagtacgacaaactagccaacgaaaagaccgagatgcagagacattacgtcatgtactacgagatgtcctatggcttgaacatagagatgcacaagcagactgagattgccaaaaggctcaacacgatccttgcacagatcatgccctttctgagtcaggaacaccagcagcaggtagctcaagcggtggagcgggcaaaacaggtcactatgacagagctcaacgctatcattggtcagcagcagcttcaagcacaacacctaagtcatgccacacacgggccccccgttcaacttcccccacacccctccgggctgcagcctccgggcattcctccagttactggcagttcctcgggcctgctggccctcggagcgctggggtctcaggcccacttgaccgtgaaggatgaaaagaaccaccatgagctcgatcacagggagcgcagtagcgcaagtaacaacagcgtgagcccaagtgagtccctcagagctagcgaaaagcatcggggcagtgccgactactccatggaggccaagaaacgcaaggctgaagagaaggactccctgagccgctacgattctgacggggacaagagcgacgacctagtcgtggacgtgtcgaacgaagacccggctacccctagggtctcccccgctcatagcccacccgaaaatggactcgataaggccagatctttgaaaaaagatgcgccaacaagtccggcttccgtggccagttcgtcctccacacctagcagtaaaaccaaggacttggggcacaatgataagagttccacgcccggattaaagagcaacaccccgacaccgagaaacgatgcaccgacccctgggacttctactacccctggtctccggagcatgcctggcaaacctccaggcatggaccctatagcctcagcgcttcgcactcccataagcattacctcttcttacgctgctcctttcgctatgatgagccatcacgagatgaatgggagcctgacaagtcctggcgcctatgccggcctccacaacatcccgccacagatgagcgccgccgctgctgcagcggccgcagcttacgggaggtcccctatggttggctttgacccacacccgccgatgcgcgctactggtctcccatcttcgctggcatctatccctggtggcaagccggcttacagcttccacgtgagcgccgatgggcagatgcagcctgtgcctttcccacacgacgcgttggccggtcctggtattcctcgtcatgcccggcaaataaacactttatcacatggagaggttgtgtgcgccgttaccatttccaacccaactaggcatgtttacacagggggtaaagggtgtgtcaaaatctgggacatctcccagccaggatcgaagagtcccatatcgcagttggactgcctgaaccgcgataactatatccgcagctgtaaactacttcctgatggcaggacattgatcgtcggaggtgaagctagcacactcacgatctgggatctggctagccccacaccccggatcaaggccgaattgacaagctccgctccggcctgttatgccttggccatctccccagatgctaaggtgtgtttcagctgttgttccgatgggaatattgcagtttgggacctgcacaaccagactctggtaaggcaatttcaaggccacacagacggcgcatcctgcatcgacatctcccatgacggtactaagttgtggaccggggggctcgataacacggtgagatcctgggacctcagggagggcagacagctgcagcagcacgactttactagccagatcttctccctggggtactgcccgacaggtgaatggcttgccgttggaatggaatcatcaaatgtggaggttctgcatcacaccaaacccgacaaataccaactgcacctgcatgagagctgcgtgctatccctaaaattcgcttattgcgggaaatggtttgtgtcgacaggcaaggacaacttgttaaacgcttggcggaccccatacggtgcttcaatcttccagtcaaaagaaagttcgtctgtgttgagttgcgatatttcagccgacgacaaatatatcgtgacgggatcaggggacaagaaagccactgtttatgaggtaatttactag

SEQ ID NO: 103129 - DNA, 2295 bp, Artificial Sequence
  derived and/or modified sequence
atgtaccctcaggggaggcacccagccccccaccagccagggcagcccgggttcaaatttaccgttgccgaaagctgtgacagaattaaggacgaattccagtttctgcaagctcagtaccactcacttaaggtcgagtacgacaagctcgccaatgagaaaaccgagatgcaaaggcactatgttatgtactatgaaatgagctatggcctgaacattgaaatgcataaacagactgagatagcaaagcggctaaacacaatccttgcgcagataatgcccttcctatcacaggagcaccaacaacaagtcgcccaggccgtagaaagggccaaacaggtaacaatgaccgaactgaacgccataatcggacagcagcagttgcaagcccaacacctctcccatgcgactcatggcccccccgtccaactccctccccatccgtctggactgcagccacctggaattccccctgtgacgggatccagtagcggtctgctcgctctgggagccctggggagtcaagcacacctgacagtgaaggatgaaaagaaccaccatgaactggatcacagggaacgggagagcagcgccaataactctgtgtcaccctccgaatccttacgtgctagcgaaaagcacagggggtccgctgattactccatggaagcaaagaagcggaaagctgaagagaaggattctttaagcagatatgatagcgatggcgacaaatcagatgacctggtggttgatgtgtcaaatgaggatccggccacccccagagtgtcccccgcccacagtccaccagagaatggcttggataaagccaggagtctgaagaaggatgcccctaccagtcccgcttctgtcgcaagcagttcctccaccccaagtagcaagacaaaagacctgggccataatgacaaatcatcaaccccgggccttaaaagtaatacacctacccctagaaacgacgcccctactccagggacctctaccacaccaggcctgcgaagcatgccaggtaaaccacctggcatggaccctatagcttccgcactgaggaccccaattagcattactagcagttacgcggccccatttgcaatgatgtcccaccacgagatgaacggcagtctcacctcgccaggggcctacgccggcctgcataacattcccccgcagatgtccgctgccgcagctgccgccgcggccgcctacggccgctcccctatggtgggttttgaccctcacccaccgatgcgcgccaccggtctgcctagtagcctggcttctattcctgggggaaagcctgcctactcgttccacgtcagcgcagacgggcaaatgcagccggtgcccttcccacacgatgccctcgccggaccagggattcctcggcacgcccgacagattaatacattgtctcacggcgaggtcgtttgtgccgtgactatcagcaatccaacccggcatgtctataccggagggaaggggtgcgtgaagatttgggacatctcacaacctgggtcaaaatccccaatcagtcagttagactgcttgaatcgtgataattacatacgttcatgtaaactcctccctgatgggcgaacactaattgttgggggcgaggcctccacccttaccatctgggaccttgcctctcccacacctcgcatcaaagcagaacttacttcaagtgccccagcctgctatgccctggccatctcgccagatgccaaggtctgttttagctgttgctctgatgggaacatcgctgtatgggatctgcataaccagactttggtgcgacagtttcagggacacactgacggggcaagttgcattgacatctcacacgatggcacaaaactgtggactggagggctagacaatactgtgagatcatgggacctccgggaaggaaggcagctccagcagcacgactttactagtcagattttctcactcggttattgccccaccggagaatggctggccgtgggaatggaatcctctaatgtggaagtcttgcatcatactaagcccgacaagtaccagctccacctccatgaatcgtgcgtgctgtctctgaaattcgcctattgtgggaagtggttcgtctctactgggaaggacaacctcctgaacgcatggcggaccccatatggtgccagtattttccagtctaaagaaagcagtagcgttctttcatgcgatatttcagctgatgataaatacatcgtaacgggttccggagataaaaaggccacggtatacgaggtaatatattag

SEQ ID NO: 103130 - DNA, 2295 bp, Artificial Sequence
  derived and/or modified sequence
atgtacccccagggccgccacccagccccccaccagcccggccagcccggcttcaagttcaccgtggccgagagctgtgaccgcatcaaggatgagttccagttcctgcaggcccagtaccacagcctgaaggtggagtatgacaagctggccaatgagaagacagagatgcagaggcactacgtgatgtactatgagatgtcctatggcctgaacatcgagatgcacaagcagacagaaattgccaagaggctgaacaccatcctggcccagatcatgcccttcctgagccaggagcaccagcagcaggtggcccaggccgtggagcgggccaagcaggtgaccatgacagagctgaatgccatcatcggccagcagcagctgcaggcccagcacctgagccacgccacccacggcccccctgtgcagctgcccccccaccccagcggcctgcagcccccaggcatcccccctgtgacaggcagcagcagcggcctgctggccctgggcgccctgggcagccaggcccacctgactgtgaaggatgagaagaaccaccacgagctggaccaccgggagaggagcagcgccagcaacaacagcgtgagccccagcgagagcctgcgggccagcgagaagcaccggggcagcgctgactacagcatggaggccaagaagaggaaggccgaggagaaggacagcctgagccgctatgacagtgatggagacaagagtgatgacctggtggtggatgtgtccaatgaagatcctgccaccccccgggtgtccccagcccacagccccccagaaaatggcctggacaaggcccggagcctgaagaaggatgcccccaccagccctgcctctgtggccagcagcagcagcacccccagcagcaagaccaaggacctgggccacaatgacaagagcagcaccccaggcctgaagagcaacacccccaccccaagaaatgatgcccccaccccaggcaccagcaccaccccaggcctgcgctccatgcctgggaagcccccaggcatggaccccatcgccagcgccctgcggacccccatcagcatcaccagcagctatgctgccccctttgccatgatgagccaccacgagatgaatggcagcctgaccagccctggggcctatgccggcctgcacaacatccccccccagatgtctgctgctgctgctgctgctgctgctgcctacggccgcagccccatggtgggctttgacccccacccccccatgagggccaccggcctgcccagcagcctggccagcatccctgggggcaagccagcctacagcttccacgtgtctgcagatggccagatgcagcctgtgcccttcccccatgatgccctggccggccctggcatccccaggcatgcccggcagatcaacaccctgagccatggagaggtggtgtgtgctgtgaccatcagcaaccccaccaggcatgtgtacacaggaggcaagggctgtgtgaagatctgggacatcagccagcccggcagcaagagccccatcagccagctggactgcctgaacagagacaactacatccgcagctgcaagctgctgcctgatggccgcaccctcatcgtgggcggggaggccagcaccctgaccatctgggacctggccagccccaccccccgcatcaaggccgagctgaccagcagcgccccagcctgctacgccctggccatcagcccagatgccaaggtgtgcttcagctgctgcagtgatggcaacattgctgtgtgggacctgcacaaccagaccctggtgcggcagttccagggccacacagatggagccagctgcatcgacatcagccatgatggcaccaagctgtggacaggaggcctggacaacacagtgcgctcctgggacctgcgggagggccggcagctgcagcagcacgacttcaccagccagatcttcagcctgggctactgccccaccggggagtggctggccgtgggcatggagagcagcaatgtggaggtgctgcaccacaccaagccagacaagtaccagctgcacctgcacgagagctgtgtgctgagcctgaagtttgcctactgcggcaagtggtttgtgtccacaggcaaggacaacctgctgaatgcctggaggaccccctatggagccagcatcttccagagcaaggagagcagctctgtgctgagctgtgacatctctgcagatgacaagtacatcgtgacaggcagcggggacaagaaggccaccgtgtatgaggtgatctactag

SEQ ID NO: 103131 - DNA, 2295 bp, Artificial Sequence
  derived and/or modified sequence
atgtacccccagggccgccacccagccccccaccagcccggccagcccggcttcaagttcaccgtggccgagagctgtgaccgcatcaaggatgagttccagttcctgcaggcccagtaccacagcctgaaggtggagtatgacaagctggccaatgagaagacagagatgcagaggcactacgtgatgtactatgagatgtcctatggcctgaacatcgagatgcacaagcagacagaaattgccaagaggctgaacaccatcctggcccagatcatgcccttcctgagccaggagcaccagcagcaggtggcccaggccgtggagcgggccaagcaggtgaccatgacagagctgaatgccatcatcggccagcagcagctgcaggcccagcacctgagccacgccacccacggcccccctgtgcagctgcccccccaccccagcggcctgcagcccccaggcatcccccctgtgacaggcagcagcagcggcctgctggccctgggcgccctgggcagccaggcccacctgactgtgaaggatgagaagaaccaccacgagctggaccaccgggagcgggagagcagcgccaacaacagcgtgagccccagcgagagcctgcgggccagcgagaagcaccggggcagcgctgactacagcatggaggccaagaagaggaaggccgaggagaaggacagcctgagccgctatgacagtgatggagacaagagtgatgacctggtggtggatgtgtccaatgaagatcctgccaccccccgggtgtccccagcccacagccccccagaaaatggcctggacaaggcccggagcctgaagaaggatgcccccaccagccctgcctctgtggccagcagcagcagcacccccagcagcaagaccaaggacctgggccacaatgacaagagcagcaccccaggcctgaagagcaacacccccaccccaagaaatgatgcccccaccccaggcaccagcaccaccccaggcctgcgctccatgcctgggaagcccccaggcatggaccccatcgccagcgccctgcggacccccatcagcatcaccagcagctatgctgccccctttgccatgatgagccaccacgagatgaatggcagcctgaccagccctggggcctatgccggcctgcacaacatccccccccagatgtctgctgctgctgctgctgctgctgctgcctacggccgcagccccatggtgggctttgacccccacccccccatgagggccaccggcctgcccagcagcctggccagcatccctgggggcaagccagcctacagcttccacgtgtctgcagatggccagatgcagcctgtgcccttcccccatgatgccctggccggccctggcatccccaggcatgcccggcagatcaacaccctgagccatggagaggtggtgtgtgctgtgaccatcagcaaccccaccaggcatgtgtacacaggaggcaagggctgtgtgaagatctgggacatcagccagcccggcagcaagagccccatcagccagctggactgcctgaacagagacaactacatccgcagctgcaagctgctgcctgatggccgcaccctcatcgtgggcggggaggccagcaccctgaccatctgggacctggccagccccaccccccgcatcaaggccgagctgaccagcagcgccccagcctgctacgccctggccatcagcccagatgccaaggtgtgcttcagctgctgcagtgatggcaacattgctgtgtgggacctgcacaaccagaccctggtgcggcagttccagggccacacagatggagccagctgcatcgacatcagccatgatggcaccaagctgtggacaggaggcctggacaacacagtgcgctcctgggacctgcgggagggccggcagctgcagcagcacgacttcaccagccagatcttcagcctgggctactgccccaccggggagtggctggccgtgggcatggagagcagcaatgtggaggtgctgcaccacaccaagccagacaagtaccagctgcacctgcacgagagctgtgtgctgagcctgaagtttgcctactgcggcaagtggtttgtgtccacaggcaaggacaacctgctgaatgcctggaggaccccctatggagccagcatcttccagagcaaggagagcagctctgtgctgagctgtgacatctctgcagatgacaagtacatcgtgacaggcagcggggacaagaaggccaccgtgtatgaggtgatctactag

SEQ ID NO: 103132 - DNA, 2295 bp, Artificial Sequence
  derived and/or modified sequence
atgtacccccagggccggcaccccgccccccaccagcccggccagccaggctttaaattcaccgtcgctgagagctgcgaccgtataaaagacgaattccagttcctgcaggcacagtatcatagtcttaaggttgagtacgataagttagcgaatgaaaagacagagatgcagaggcactacgtgatgtattacgagatgagctatggcttgaacatcgagatgcataaacagaccgagatagctaagagactgaataccatattggcccagattatgccatttttgagtcaggagcatcagcagcaagtagctcaggctgtggagagagcgaagcaggtgaccatgacggagttaaatgcaatcatcggtcaacaacagctacaggcacagcaccttagtcacgctacacatgggccccccgtgcagttgcccccccacccttcgggtttacaaccaccaggcattcctcccgttacaggcagctcgtcagggttgctcgctctgggcgcgctggggtcccaagcacacctgactgtgaaggacgagaagaatcaccacgaacttgatcaccgggaacgtagctcagcctccaataactcagtttcgccttctgagagcctgagggctagcgagaagcatagggggtctgccgattactcgatggaggctaaaaagcgtaaagcagaggagaaggatagtctgtcacgctacgatagcgacggggataaatcagacgacctggtggtcgacgtatccaatgaggacccagctacaccaagagtttcccctgcacattcccctcccgagaatgggcttgacaaggctcggtctttgaagaaagatgcacctacatcacctgcctctgtggcttctagcagctctacaccatcctcaaaaacgaaggatttgggacataacgataaaagtagcactccagggctgaaaagcaacacaccaacccctcggaatgatgcccccactccgggaacatccaccactcccgggcttagaagcatgccgggcaagcctccagggatggatcctatagcaagcgccctgcggacacccatctctatcactagctcctacgcagccccttttgcgatgatgtcgcaccacgaaatgaatggctcgcttactagccccggcgcatacgccggcctgcataatatcccgccgcagatgagcgccgctgccgccgcggcagccgcggcatacggacggtcaccaatggtggggttcgatccacatccgcctatgcgggctactgggctgccgtcaagtctcgcctctattcccggtggaaagccggcatattctttccacgtctccgctgatggacagatgcagccagttccttttcctcatgatgccttagcagggcccggaataccccgccacgcaagacagattaacacactgagtcacggagaggtggtctgcgctgttaccatcagtaacccaacaaggcacgtttacaccggcgggaagggctgtgtgaagatctgggacatcagtcaaccagggtccaagagccctatcagtcagcttgattgtctgaaccgtgacaactacattagatcctgtaaactgctgccagatgggcggaccctgattgtggggggcgaggcatccactttaaccatctgggacctggcgagtcctacaccacgaattaaggccgagttgacgtcgtccgcccccgcctgttatgcattggcaattagccccgacgccaaggtttgcttttcttgctgctccgacggaaacatcgcagtgtgggacctacataatcagacgctggtccgccagtttcagggtcataccgacggagctagttgtatcgatattagccatgacggcactaagctgtggacaggaggactcgataatactgtccgtagttgggatctccgagagggccggcaactccaacagcatgactttactagccagattttctcattgggatattgcccgaccggcgagtggctcgccgtgggcatggagtctagtaacgtagaggtcctgcatcacactaaacccgataaatatcaactgcacctgcatgagtcctgcgtattgagtctcaaattcgcctattgcgggaaatggttcgtaagtacaggcaaggacaacctgctgaatgcgtggaggactccatacggagcttccattttccagtccaaagaaagttcctcggtgctgagctgtgacatctccgctgatgacaaatatattgtaacaggttccggcgataagaaagccacagtgtacgaagtgatttactag

SEQ ID NO: 103133 - DNA, 2295 bp, Artificial Sequence
  derived and/or modified sequence
atgtacccccagggccggcaccccgccccccaccagcccggccagcccggctttaagttcacagttgctgagtcttgcgatcgcatcaaggacgaatttcaatttctgcaggctcagtaccatagcttgaaggttgaatacgacaaacttgctaacgagaagacagagatgcagcgtcactacgtaatgtactacgagatgagctacggactgaacatagaaatgcataaacagactgaaatcgctaagagactgaacactattcttgcccagattatgccattcctaagccaggagcatcagcagcaagtcgcccaggccgtcgagcgggccaaacaggttaccatgacagagttgaacgcaatcatcgggcagcaacagcttcaagcgcagcatttatcacacgctacacatggacctccggttcaactcccacctcatccctccggcctgcaacctcctggtattccccccgtaaccggtagttcgagcggattgctggccctcggcgcccttgggagccaagcccatctcacagtgaaagatgaaaaaaaccaccacgagctggaccatagggaacgcgaatcctccgctaataacagtgtgagcccttcagagtctctcagggcatctgagaagcaccgcggctccgctgactactccatggaggccaagaagcgtaaggctgaggaaaaggattctctgagccgttatgattccgacggggataagtccgacgatctcgtggtggatgtgtcaaacgaggaccccgccacccccagagtttcccccgctcattcccctcccgagaacggacttgacaaagctaggtccttgaagaaagacgccccaacctcacccgcctcagtcgcctcttcttcttccactccgtcttcaaaaacgaaggatctgggtcacaacgataagagtagcacacccggattgaaaagcaatacccccacaccaagaaacgatgctcctacacccgggacatctacaacaccaggattaagaagcatgccgggtaagcccccaggcatggatcctatcgcgagtgccctccgaaccccaatcagtataacctctagttacgccgcacctttcgccatgatgtcacatcatgagatgaacggttctctgacgagtccaggcgcctacgcaggcctgcacaacattccaccacagatgagtgcagccgccgcagcagctgcggccgcgtacgggcgttctcccatggttggcttcgatccccatcctcctatgagagcaacgggcctgccttcttcactcgcgagcatacccggcggaaaaccggcctatagctttcacgtgagcgcggacgggcagatgcagcccgtgcctttcccccatgacgcgttggcgggccccgggatccccaggcatgcccgacagatcaatacattatctcacggggaagtcgtttgtgctgtgactatctccaaccccacaaggcatgtgtacaccggaggtaaggggtgcgtgaagatttgggacattagtcagccaggctcaaaatccccaatctcccagctcgattgcttgaatcgggacaattatatcagatcttgtaagcttctgccggacggtcggactctgatcgttggaggtgaagcaagcacactgactatttgggatctggctagcccaaccccgcggatcaaggcagagcttaccagttccgccccggcgtgctacgccctcgccatttctccggatgctaaagtgtgcttttcttgttgtagcgatggaaacattgccgtgtgggacctgcacaaccaaactttagtgcggcagttccaggggcatacagatggcgcctcatgcatcgacatctctcatgacggaacgaaactctggactggggggctcgacaatacggttcgctcctgggacctgcgagagggcagacagctgcagcagcatgatttcacctcccagatcttttctctgggatattgccctacaggagagtggcttgctgtggggatggagagttcgaacgtggaggtattgcaccacaccaaacctgataagtatcagttgcatctccatgaatcttgtgtgctgtccctgaagttcgcatactgcgggaagtggttcgtaagcactgggaaagacaacctcctgaacgcatggagaactccatacggcgccagcatattccagtccaaagaatcctcttccgttctctcctgcgacatctcagcagacgacaagtatatcgttacaggctccggggataagaaagccaccgtttatgaggttatttactag

SEQ ID NO: 103134 - DNA, 2295 bp, Artificial Sequence
  derived and/or modified sequence
atgtatccccagggcaggcatccagcaccacaccaacccggacagcctggcttcaaatttacagttgccgagagctgcgatagaatcaaggacgaattccaattcctccaggcacagtatcacagcttgaaagtcgaatacgacaaactcgcaaatgaaaaaacggagatgcagaggcactacgttatgtactatgagatgagctatggtctgaatattgagatgcacaagcagacagaaattgcaaagcggctgaacactattctagcccaaattatgccattcttgagccaggagcatcaacaacaggtcgctcaagccgtagagcgggctaagcaggttaccatgacggaacttaacgccattatcgggcaacaacagttgcaagcgcagcacctcagtcatgcgacccatgggcctccagtgcagctgccgccacatccatctgggctgcagccgcctggcattccacctgtgacggggtcatcctctgggttgctggctcttggggctctcggttcccaggctcatcttacagtgaaagacgaaaagaaccaccacgaactggatcacagagagcgctcaagcgcgagcaacaactccgtttctccatccgagagcttgagggcctcagagaaacaccggggaagcgccgattactctatggaagcgaagaagcgcaaagcagaggagaaagatagtctgagtcgctatgatagcgatggtgacaaaagcgacgacctggtggtggatgtctccaacgaggatcccgctacacccagagtttcgcccgctcactcccctcctgagaatggactcgataaagctagatcactgaaaaaggacgctccaactagccccgcaagtgttgcctccagcagctctaccccctcctccaagactaaagatttgggtcacaacgacaagagttctacccctgggcttaaaagcaacactccaactcctagaaacgacgcgccaacccctgggactagtacaaccccaggcctgagaagtatgcccggaaagccacctggcatggatcctatcgcctccgcgctccgcacaccaatcagcatcacatcaagctacgccgcaccatttgctatgatgagccaccatgagatgaatggctccctgacaagcccaggggcatacgccggactccataacattcccccacagatgagcgctgctgcggctgccgcagctgctgcctacggacgttcacccatggttggatttgatccacacccgcctatgcgggcaactggcctgccttcttccttagctagcatccctgggggtaagcccgcttattctttccatgtcagtgccgatggccagatgcagcccgtcccctttcctcatgacgcgctggctggacccggtatacctcgacacgcccgacagatcaacacgctgagtcacggagaagtcgtgtgtgctgtgacaataagcaacccaactcggcacgtgtacacaggtgggaaagggtgcgtgaagatctgggacatcagccaacccggatcaaagagccccataagtcagctggactgcctgaatcgggacaactacattaggagctgcaagttgctgcccgatgggagaacactgatagttgggggtgaggcaagcacccttaccatttgggatttggcttccccaactcctagaatcaaggctgaactgacatcaagtgcacctgcttgttatgccctggcgatctcacctgatgctaaggtgtgcttcagttgttgcagcgacggaaatatagccgtctgggacctacataatcagactctggtgagacagtttcaggggcacacggacggtgctagttgtatcgacatttcacacgatggcactaagctgtggaccggaggactggataatacggtccgcagttgggacttacgagaaggccgacagttacagcagcacgacttcaccagccaaatcttctctctgggctattgtcccaccggtgagtggctcgctgtgggaatggaatccagtaatgtggaggtgcttcaccatactaagcctgataaataccaactgcacctgcatgagtcctgcgttctcagcctgaaatttgcttattgcgggaaatggtttgtctccacaggcaaagataatctgctcaacgcatggcgtaccccctatggtgctagcattttccaatctaaagagagctcttctgtgctgtcttgcgatatctccgcagacgataagtatattgtaacagggagtggggataagaaggcaactgtgtatgaagtcatctactag

SEQ ID NO: 103135 - DNA, 2295 bp, Artificial Sequence
  derived and/or modified sequence
atgtatccccagggaaggcaccctgccccacatcagcccggacagcccggtttcaaattcacggttgctgaaagctgcgaccggatcaaggacgaatttcagtttctccaagcccagtaccactcacttaaggtcgagtatgataagctggcaaacgagaagactgaaatgcagcgccattacgtcatgtattatgagatgtcctacggtctgaacatcgagatgcacaagcagaccgaaatcgcaaagagactgaatactatcttggcgcagatcatgccctttctttcccaagagcaccaacaacaagttgcccaggctgttgaacgagctaagcaggtgactatgactgagctaaatgcaatcattggccagcagcaactgcaggcccagcacttgagtcacgccacccatggacctccagtccaactgcctcctcatccatctggtctgcaacccccaggtattccacccgtgaccgggagctcttccgggctccttgcgttgggagcactgggctctcaggctcatttgacagtgaaagacgagaaaaaccaccacgagctggaccatcgcgagagagagtccagcgcgaacaactctgtctctccctcagagtctctcagagcctctgaaaagcataggggctccgccgattacagcatggaagcaaagaaaaggaaggccgaggaaaaggatagcctctctcgctacgatagcgatggggacaaatcagatgatcttgttgtcgacgtgtccaacgaagacccagccacccccagggtctcacccgcacattccccccctgaaaacgggctagataaagcacgatccctgaaaaaggatgcacctacaagccctgcctccgtggccagctccagctccactccctcttcgaaaacaaaggacctggggcacaatgataagtccagcactccgggtcttaagagcaacacccctaccccaaggaacgatgctcccaccccagggacaagtaccacccccggtctgcgcagcatgccgggtaagccccctggcatggaccccatcgcatccgctttgcgtactcctatctccattacctcaagctacgcagcacctttcgctatgatgagtcaccatgagatgaacggttcattgacaagtcctggcgcatacgcaggcttgcacaatattcctccccagatgtccgctgccgctgctgccgctgccgctgcatatggccgaagccctatggtcggcttcgaccctcatcctccgatgcgcgcaacaggactccccagtagcctagcctctattccaggtggtaagcccgcatactcctttcatgtgtccgccgatgggcaaatgcagccagttccgttccctcacgatgcgctagccggaccgggtattccaaggcatgcacggcagattaacactctgtcccacggtgaagtcgtgtgtgccgtgacaatatctaatcccaccaggcatgtctacacgggcggtaaagggtgtgtgaaaatctgggacatttcacagccaggatctaaaagccctatctctcagctggattgtctcaacagggacaactatattcgcagctgcaagctgctgcctgatgggaggacattgatcgtggggggagaggcctcgactctcaccatctgggacttggcgtcaccaacaccgaggattaaggcggagctcacatcttccgctcctgcctgctatgccctggctatcagtccagatgctaaagtttgcttctcatgttgtagcgacggaaatattgctgtttgggacctgcacaaccaaaccttggtccggcagtttcagggacacactgatggcgctagctgtatagacatttcccacgacggaaccaagctgtggacaggcggactggacaataccgtgcggtcttgggatctaagagagggcagacaactccaacagcacgattttactagccagatcttttcgctgggttactgtccaacgggtgagtggctggccgtaggcatggaaagcagcaatgtggaggtgctgcaccacacaaagcccgataagtatcagttacatctgcatgagagctgcgttttgtccctgaagttcgcctattgcgggaaatggttcgtttccacaggtaaggacaatttactcaatgcatggcgtaccccgtacggagccagcattttccaaagcaaggagtcatcgtcagtgttgtcatgcgacatctctgccgacgataaatacatcgttacaggatctggcgacaagaaagctactgtttacgaggtgatctattag

SEQ ID NO: 103136 - DNA, 5307 bp, Artificial Sequence
  derived and/or modified sequence
agtccctatttggaactgctctcgcggcagttcagacctcgtgctcgtccccttcgcctgtctgtgtgtggtatccgtaggtccggggcacttttttttttggtgtgtgtgtgtgtgcgtgcgcgcgtgtgtgtgtgttgggtgtgtgtgttttgggggtttgccggggcgcggagaggagagccgggccgaggggaaggaaggaagccgtagagctccccggtctcgggctgcgtctcccctccagcgctctcctgcctgtgcgctccgacgcggcagcggcggtggcgctgagcgctcctcggtggggacgcggtgctcaagctgggagcagcgagaaccctttgcggaggcttcccgtgcccgctggacttaggatgccagggcgtttgatttgcacctactgagcccggagttcctccccggccctgggaagggcttgcagcggcggcggcggcggcggcagcggcagtagcagacggaacagcaggctctcctctccgagggggggcgtcgaagcgcccgcgccgggctcccgccctcaccctccggcgctcctgcggccccaagccaccacctcgtagcccgcctccttcctcttctcgccgcgagccccaggcccggacgcctctaggatcggacccgcgcgccccggatgcttggggctgccccggcgcgcccccctacaggcgcgacccgctgagtgacccggagggggcccgagctcgccccaggaggggcccccggcctcgggaccccgcgccggacctgctggggagccgacgatgtccgcgcagtcccaggcattgacgcgctcgacgcagcccagggaaggcggccggccgctgcccgccgagccctaggcgcacaaagcccgcgcccgccgcccggccccggcgcccgccgacgactttgccgcctgctccgcggctctttgtctccacttggggcgggcgcccgactctgggatttcgctgcgagaacgagctgggggggccgggggcgagctctcggtttcccggccgccccccgctcgggctcggctcccccctcccccgcacctccccggcccgggctctcggcgcttccacgctctcggaatcacgacccctccctgccatgtatccgcagggcagacatccggctccccatcaacccgggcagccgggatttaaattcacggtggctgagtcttgtgacaggatcaaagacgaattccagttcctgcaagctcagtatcacagcctcaaagtggagtacgacaagctggcaaacgagaagacggagatgcagcgccattatgtgatgtactatgagatgtcctatggcttgaacattgaaatgcacaagcagacagagattgcgaagagactgaacacaattttagcacagatcatgcctttcctgtcacaagagcaccagcagcaggtggcgcaggcagtggagcgcgccaagcaggtcaccatgacggagctgaacgccatcatcgggcagcagcagctccaggcgcagcacctctcccatgccacacacggccccccggtccagttgccaccccacccgtcaggtctccagcctccaggaatccccccagtgacagggagcagctccgggctgctggcactgggcgccctgggcagccaggcccatctgacggtgaaggatgagaagaaccaccatgaactcgatcacagagagaggagttcagcttctaataactctgtgtcaccctcggaaagcctccgggccagtgagaagcaccggggctctgcggactacagcatggaagccaagaagcggaaggcggaggagaaggacagcttgagccgatacgacagtgatggagacaagagtgatgatctggtggtggatgtttccaatgaggaccccgcaacgccccgggtcagcccggcacactcccctcctgaaaatgggctggacaaggcccgtagcctgaaaaaagatgcccccaccagccctgcctcggtggcctcttccagtagcacaccttcctccaagaccaaagaccttggtcataacgacaaatcctccacccctgggctcaagtccaacacaccaaccccaaggaacgacgccccaactccaggcaccagcacgaccccagggctcaggtcgatgccgggtaaacctccgggcatggacccgatagcctcggctctgcgcacgcccatctccatcaccagctcctatgcggcgcccttcgccatgatgagccaccatgagatgaacggctccctcaccagtcctggcgcctacgccggcctccacaacatcccaccccagatgagcgccgccgccgctgctgcagccgctgcctatggccgatcgccaatggttggttttgaccctcaccccccgatgcgggccacaggcctcccctcaagcctggcctccattcctggaggaaaaccagcgtactcattccatgtgagtgctgatgggcagatgcagcccgtgcccttcccccacgacgccctggcaggccccggcatcccgaggcacgcccggcagatcaacacactcagccacggggaggtggtgtgtgccgtgaccatcagcaaccccacgaggcacgtctacacaggtggcaagggctgcgtgaagatctgggacatcagccagccaggcagcaagagccccatctcccagctggactgcctgaacagggacaattacatccgctcctgcaagctgctccctgatgggcgcacgctcatcgtgggcggcgaggccagcacgctcaccatctgggacctggcctcgcccacgccccgcatcaaggccgagctgacgtcctcggctcccgcctgttatgccctggccattagccctgacgccaaagtctgcttctcctgctgcagcgatgggaacattgctgtctgggacctgcacaaccagaccctggtcaggcagttccagggccacacagatggggccagctgcatagacatctcccatgatggcaccaaactgtggacagggggcctggacaacacggtgcgctcctgggacctgcgggagggccgacagctacagcagcatgacttcacttcccagatcttctcgctgggctactgccccactggggagtggctggctgtgggcatggagagcagcaacgtggaggtgctgcaccacaccaagcctgacaagtaccagctgcacctgcacgagagctgcgtgctctccctcaagttcgcctactgcggcaagtggttcgtgagcactgggaaagataaccttctcaacgcctggaggacgccttatggagccagcatattccagtctaaagaatcctcgtctgtcttgagttgtgacatttcagcggatgacaaatacattgtaacaggctctggtgacaagaaggccacagtttatgaggtcatctactaaacaagaactccagcagggctgtcaaactctgggagaaaccgactcggctctgacagggagacccccaggcgaggggccccgaggatggcggaggatgggccgcaggcagccgagcgttcagggctgcgctccggccggctgagagggcacgtgccccgtcacagtctggactcctgggcctggattgatgtgtctcacagactcggaagggttctgctcctcctcctccccctgaacaatgctggcagttgctacaaatagatttattggaggcttatggctccggttcccccacagacccgctcatgagtctctgtttgttcttcccttttcttttgccctgtccctcaccttgggtcgggggtgctggagtggaccacaatgttgtgctgggggatgggggggtctctctttgccgattgtgcagtgcacaagatttgtgaaaaatgtaaataacagactcctattgcggactgatcagtgggagaggaggccccttcccaccggaaactctgagtgtgtatttcgcctgctgtatttgtaatccactcgtggtggtggcttttttttttttttttttttaaataaacagatgctctcacctgggaagaggagacagggaggggaaccaattgaagaaagaggagaaaagtcttagagtgtggaaaaggcaaccaggttggccgtaaggtgcctgctggaatgcgtgtgcctccacacgggtctgggcatccggactgataaccagccggccagactgagggatggaaggcactgagatgggggcccgtccaggcggacacccgcagaaatggagctttctgtggtctcttgcactctggctgcctcttgccctctctgtgtctctctttcttggtctctccctctctcctcctcagcctggtctttctctttggtgcacacttagttattgttgtgagcaatggaagttcaaaggaactccctctccagctcttctgaatcttgggacacagcctaaaaaggacaaaaagttagaagacagcatagcaactcagctcagggagctaccagagaaaaatagcaactgatgtgggtgctttttttttttttttaatttgaataaaaagaattagaagtgatgtccttttataaaatgccttctcccccttcccgcctacagtctcttcctctccccttagaggggggaaagtgtataaacctacagggttgtgagtctgaaaagaggatccccctcacccccaccctgggcagagcagtgggggttggggggtgggagagggggacacagatcctggcacactgtggatatttcttgcagattgcagtctcttgtggcccaaacaggttaggtagactatcgcctctggcaggtgccaccttttggtaccaacatgttctgaggtgttaggatttgggttgggttttttttgtttgttttttttttccttttggtctttttttttttctccttttaaagaaaagctaaaggccgctgtgagtcctggtggcaggctctccatggatgtagcatatcgaagataatttttatactgcatttttatggattattttgtaatgtgtgattccgtctgctgaggaggtgggaggggctccagggaaagccacccaccttcagtgaggttgctccccagctgagcgcaccgggcatgggatgtggaggctggcgacacaccctgtgcctctccaaggctgggcgcgtggggcgtccagagtctctctgggtctcagatgtccatctgccacctcttgttaaggctctagccagaagggagggtgagggtagaagaaagttattcccgaagaaaaaaagaatgaaaagtcattgtactgaactgtttttatatttttaaaagttactatttaaaggtt

SEQ ID NO: 103137 - DNA, 2295 bp, Artificial Sequence
  derived and/or modified sequence
atgtatccgcagggcagacatccggctccccatcaacccgggcagccgggatttaaattcacggtggctgagtcttgtgacaggatcaaagacgaattccagttcctgcaagctcagtatcacagcctcaaagtggagtacgacaagctggcaaacgagaagacggagatgcagcgccattatgtgatgtactatgagatgtcctatggcttgaacattgaaatgcacaagcagacagagattgcgaagagactgaacacaattttagcacagatcatgcctttcctgtcacaagagcaccagcagcaggtggcgcaggcagtggagcgcgccaagcaggtcaccatgacggagctgaacgccatcatcgggcagcagcagctccaggcgcagcacctctcccatgccacacacggccccccggtccagttgccaccccacccgtcaggtctccagcctccaggaatccccccagtgacagggagcagctccgggctgctggcactgggcgccctgggcagccaggcccatctgacggtgaaggatgagaagaaccaccatgaactcgatcacagagagagagaatccagtgcgaataactctgtgtcaccctcggaaagcctccgggccagtgagaagcaccggggctctgcggactacagcatggaagccaagaagcggaaggcggaggagaaggacagcttgagccgatacgacagtgatggagacaagagtgatgatctggtggtggatgtttccaatgaggaccccgcaacgccccgggtcagcccggcacactcccctcctgaaaatgggctggacaaggcccgtagcctgaaaaaagatgcccccaccagccctgcctcggtggcctcttccagtagcacaccttcctccaagaccaaagaccttggtcataacgacaaatcctccacccctgggctcaagtccaacacaccaaccccaaggaacgacgccccaactccaggcaccagcacgaccccagggctcaggtcgatgccgggtaaacctccgggcatggacccgatagcctcggctctgcgcacgcccatctccatcaccagctcctatgcggcgcccttcgccatgatgagccaccatgagatgaacggctccctcaccagtcctggcgcctacgccggcctccacaacatcccaccccagatgagcgccgccgccgctgctgcagccgctgcctatggccgatcgccaatggttggttttgaccctcaccccccgatgcgggccacaggcctcccctcaagcctggcctccattcctggaggaaaaccagcgtactcattccatgtgagtgctgatgggcagatgcagcccgtgcccttcccccacgacgccctggcaggccccggcatcccgaggcacgcccggcagatcaacacactcagccacggggaggtggtgtgtgccgtgaccatcagcaaccccacgaggcacgtctacacaggtggcaagggctgcgtgaagatctgggacatcagccagccaggcagcaagagccccatctcccagctggactgcctgaacagggacaattacatccgctcctgcaagctgctccctgatgggcgcacgctcatcgtgggcggcgaggccagcacgctcaccatctgggacctggcctcgcccacgccccgcatcaaggccgagctgacgtcctcggctcccgcctgttatgccctggccattagccctgacgccaaagtctgcttctcctgctgcagcgatgggaacattgctgtctgggacctgcacaaccagaccctggtcaggcagttccagggccacacagatggggccagctgcatagacatctcccatgatggcaccaaactgtggacagggggcctggacaacacggtgcgctcctgggacctgcgggagggccgacagctacagcagcatgacttcacttcccagatcttctcgctgggctactgccccactggggagtggctggctgtgggcatggagagcagcaacgtggaggtgctgcaccacaccaagcctgacaagtaccagctgcacctgcacgagagctgcgtgctctccctcaagttcgcctactgcggcaagtggttcgtgagcactgggaaagataaccttctcaacgcctggaggacgccttatggagccagcatattccagtctaaagaatcctcgtctgtcttgagttgtgacatttcagcggatgacaaatacattgtaacaggctctggtgacaagaaggccacagtttatgaggtcatctactaa

SEQ ID NO: 103138 - protein, 772 aa, Artificial Sequence
  derived and/or modified sequence
MPPPPPLSCLRGLQAPHQPGQPGFKFTVAESCDRIKDEFQFLQAQYHSLKVEYDKLANEKTEMQRHYVMYYEMSYGLNIEMHKQTEIAKRLNTILAQIMPFLSQEHQQQVAQAVERAKQVTMTELNAIIGQQLQAQHLSHATHGPPVQLPPHPSGLQPPGIPPVTGSSSGLLALGALGSQAHLTVKDEKNHHELDHRERESSANNSVSPSESLRASEKHRGSADYSMEAKKRKAEEKDSLSRYDSDGDKSDDLVVDVSNEDPATPRVSPAHSPPENGLDKARSLKKDAPTSPASVASSSSTPSSKTKDLGHNDKSSTPGLKSNTPTPRNDAPTPGTSTTPGLRSMPGKPPGMDPIGIMASALRTPISITSSYAAPFAMMSHHEMNGSLTSPGAYAGLHNIPPQMSAAAAAAAAAYGRSPMVGFDPHPPMRATGLPSSLASIPGGKPAYSFHVSADGQMQPVPFPHDALAGPGIPRHARQINTLSHGEVVCAVTISNPTRHVYTGGKGCVKIWDISQPGSKSPISQLDCLNRDNYIRSCKLLPDGRTLIVGGEASTLTIWDLASPTPRIKAELTSSAPACYALAISPDAKVCFSCCSDGNIAVWDLHNQTLVRQFQGHTDGASCIDISHDGTKLWTGGLDNTVRSWDLREGRQLQQHDFTSQIFSLGYCPTGEWLAVGMESSNVEVLHHTKPDKYQLHLHESCVLSLKFAYCGKWFVSTGKDNLLNAWRTPYGASIFQSKESSSVLSCDISADDKYIVTGSGDKKATVYEVIY

SEQ ID NO: 103139 - DNA, 2319 bp, Artificial Sequence
  derived and/or modified sequence
atgcccccccccccccccctgagctgcctgagaggcctgcaggccccccaccagcccggccagcccggcttcaagttcaccgtggccgagagctgcgacagaatcaaggacgagttccagttcctgcaggcccagtaccacagcctgaaggtggagtacgacaagctggccaacgagaagaccgagatgcagagacactacgtgatgtactacgagatgagctacggcctgaacatcgagatgcacaagcagaccgagatcgccaagagactgaacaccatcctggcccagatcatgcccttcctgagccaggagcaccagcagcaggtggcccaggccgtggagagagccaagcaggtgaccatgaccgagctgaacgccatcatcggccagcagctgcaggcccagcacctgagccacgccacccacggcccccccgtgcagctgcccccccaccccagcggcctgcagccccccggcatcccccccgtgaccggcagcagcagcggcctgctggccctgggcgccctgggcagccaggcccacctgaccgtgaaggacgagaagaaccaccacgagctggaccacagagagagagagagcagcgccaacaacagcgtgagccccagcgagagcctgagagccagcgagaagcacagaggcagcgccgactacagcatggaggccaagaagagaaaggccgaggagaaggacagcctgagcagatacgacagcgacggcgacaagagcgacgacctggtggtggacgtgagcaacgaggaccccgccacccccagagtgagccccgcccacagcccccccgagaacggcctggacaaggccagaagcctgaagaaggacgcccccaccagccccgccagcgtggccagcagcagcagcacccccagcagcaagaccaaggacctgggccacaacgacaagagcagcacccccggcctgaagagcaacacccccacccccagaaacgacgcccccacccccggcaccagcaccacccccggcctgagaagcatgcccggcaagccccccggcatggaccccatcggcatcatggccagcgccctgagaacccccatcagcatcaccagcagctacgccgcccccttcgccatgatgagccaccacgagatgaacggcagcctgaccagccccggcgcctacgccggcctgcacaacatccccccccagatgagcgccgccgccgccgccgccgccgccgcctacggcagaagccccatggtgggcttcgacccccacccccccatgagagccaccggcctgcccagcagcctggccagcatccccggcggcaagcccgcctacagcttccacgtgagcgccgacggccagatgcagcccgtgcccttcccccacgacgccctggccggccccggcatccccagacacgccagacagatcaacaccctgagccacggcgaggtggtgtgcgccgtgaccatcagcaaccccaccagacacgtgtacaccggcggcaagggctgcgtgaagatctgggacatcagccagcccggcagcaagagccccatcagccagctggactgcctgaacagagacaactacatcagaagctgcaagctgctgcccgacggcagaaccctgatcgtgggcggcgaggccagcaccctgaccatctgggacctggccagccccacccccagaatcaaggccgagctgaccagcagcgcccccgcctgctacgccctggccatcagccccgacgccaaggtgtgcttcagctgctgcagcgacggcaacatcgccgtgtgggacctgcacaaccagaccctggtgagacagttccagggccacaccgacggcgccagctgcatcgacatcagccacgacggcaccaagctgtggaccggcggcctggacaacaccgtgagaagctgggacctgagagagggcagacagctgcagcagcacgacttcaccagccagatcttcagcctgggctactgccccaccggcgagtggctggccgtgggcatggagagcagcaacgtggaggtgctgcaccacaccaagcccgacaagtaccagctgcacctgcacgagagctgcgtgctgagcctgaagttcgcctactgcggcaagtggttcgtgagcaccggcaaggacaacctgctgaacgcctggagaaccccctacggcgccagcatcttccagagcaaggagagcagcagcgtgctgagctgcgacatcagcgccgacgacaagtacatcgtgaccggcagcggcgacaagaaggccaccgtgtacgaggtgatctactag

SEQ ID NO: 103140 - DNA, 2319 bp, Artificial Sequence
  derived and/or modified sequence
atgccccctcccccgccactgtcctgcctgcgcggtcttcaggctccccatcagcccggccagcccggctttaaatttaccgtggccgagagctgtgatcgaattaaggatgaattccaatttttgcaggcccaatatcattccctgaaagtggagtatgacaaacttgccaatgagaagaccgagatgcagagacactacgtcatgtattacgagatgagctacgggttaaacatagaaatgcacaagcagacagagatcgcgaagaggctgaacaccatcctcgcccaaatcatgccatttcttagccaggaacaccagcagcaggtcgcacaggccgtggagcgggcaaaacaggtgacaatgacggaactgaacgccataatcggccagcaactccaggcacagcacctgtcccatgcaacacacggtcctcctgtgcagcttcctcctcaccccagtggcctgcagccccctggtattccaccggttacaggcagttcctccggactcctggcattaggtgccctcggctcacaggcccacttaactgtgaaggatgagaagaaccatcacgagctagatcacagagaacgagaaagctcagcgaacaactccgtgagtccatctgagtctttgcgggctagcgagaaacatcggggctccgcggattactctatggaggcgaagaagcgaaaggcggaggagaaggactcattaagccggtatgacagtgacggcgacaagtcagatgacctcgtcgttgacgtaagtaacgaggacccagcaactccgcgcgtaagcccagcccattcccctccagagaatgggctggacaaggctcgcagcctgaaaaaggacgcccccacctcgcccgcaagcgtggccagttcttccagcactccctctagtaaaaccaaggacctgggccacaacgacaaaagcagcacacccggcctgaagagcaacaccccaacacctcgcaatgatgccccaacgccggggacatctactacacccggattgaggagcatgcccgggaagcccccagggatggacccaatcgggatcatggctagcgctttgagaacgccaatctccataacttcaagctatgcagcaccttttgccatgatgagtcatcatgaaatgaatggctccctcactagcccaggagcttacgctggcctgcacaatatcccaccccagatgtccgcagcagccgctgcagccgccgccgcctatggtcgtagcccgatggttggatttgatccccacccccccatgagagccacggggctaccttcaagcctggcttctatccctggcggcaagcctgcatactcctttcatgtatctgccgacggacagatgcagcccgttccctttcctcatgatgcgctcgccgggcccggcattccgcgacacgccaggcagattaatacccttagccatggagaagtagtctgcgcagtgacaattagtaatcccactaggcacgtctacacaggaggcaagggttgcgtgaagatttgggacatatcgcagccaggcagcaagtctccaatctcccagttagattgcctcaatagagataactatatccgttcatgtaagttactgcctgatgggaggaccttgatcgtgggcggggaggcttcaaccctgactatttgggatctggcatccccaaccccaagaattaaggccgaattgacatcatccgcccccgcctgttatgcgctcgcaatcagccctgatgcaaaggtgtgctttagttgctgctccgatggaaacatcgcagtctgggatctccataatcagaccctggtccgtcaatttcagggacacaccgacggcgccagctgtatcgatatctcacacgatgggacaaagctttggaccggcggtctggacaacacggtgcgctcatgggatctgcgggagggcagacagctccagcagcacgactttacaagccagatattcagtttaggttattgtcctacaggggaatggctggcggtgggaatggaatcaagcaacgtggaggtgctgcaccacactaagcctgacaagtatcagctccaccttcacgagtcttgcgtgttaagcctgaagttcgcctattgcggaaagtggtttgtctcgactggaaaagataacctgctgaacgcctggagaacaccctacggtgcttcgatctttcagagcaaggaaagttcatcggttctttcttgcgatatttctgcagatgacaagtatattgtaaccggatctggggacaaaaaagccacagtgtatgaagtgatatactag

SEQ ID NO: 103141 - DNA, 2319 bp, Artificial Sequence
  derived and/or modified sequence
atgcctcctcctccacccctgagctgcctgcggggcctgcaggccccccaccagcccggccagcccggcttcaagttcaccgtggccgagagctgtgaccgcatcaaggatgagttccagttcctgcaggcccagtaccacagcctgaaggtggagtatgacaagctggccaatgagaagacagagatgcagaggcactacgtgatgtactatgagatgtcctatggcctgaacatcgagatgcacaagcagacagaaattgccaagaggctgaacaccatcctggcccagatcatgcccttcctgagccaggagcaccagcagcaggtggcccaggccgtggagcgggccaagcaggtgaccatgacagagctgaatgccatcatcggccagcagctgcaggcccagcacctgagccacgccacccacggcccccctgtgcagctgcccccccaccccagcggcctgcagcccccaggcatcccccctgtgacaggcagcagcagcggcctgctggccctgggcgccctgggcagccaggcccacctgactgtgaaggatgagaagaaccaccacgagctggaccaccgggagcgggagagcagcgccaacaacagcgtgagccccagcgagagcctgcgggccagcgagaagcaccggggcagcgctgactacagcatggaggccaagaagaggaaggccgaggagaaggacagcctgagccgctatgacagtgatggagacaagagtgatgacctggtggtggatgtgtccaatgaagatcctgccaccccccgggtgtccccagcccacagccccccagaaaatggcctggacaaggcccggagcctgaagaaggatgcccccaccagccctgcctctgtggccagcagcagcagcacccccagcagcaagaccaaggacctgggccacaatgacaagagcagcaccccaggcctgaagagcaacacccccaccccaagaaatgatgcccccaccccaggcaccagcaccaccccaggcctgcgctccatgcctgggaagcccccaggcatggaccccatcggcatcatggccagcgccctgcggacccccatcagcatcaccagcagctatgctgccccctttgccatgatgagccaccacgagatgaatggcagcctgaccagccctggggcctatgccggcctgcacaacatccccccccagatgtctgctgctgctgctgctgctgctgctgcctacggccgcagccccatggtgggctttgacccccacccccccatgagggccaccggcctgcccagcagcctggccagcatccctgggggcaagccagcctacagcttccacgtgtctgcagatggccagatgcagcctgtgcccttcccccatgatgccctggccggccctggcatccccaggcatgcccggcagatcaacaccctgagccatggagaggtggtgtgtgctgtgaccatcagcaaccccaccaggcatgtgtacacaggaggcaagggctgtgtgaagatctgggacatcagccagcccggcagcaagagccccatcagccagctggactgcctgaacagagacaactacatccgcagctgcaagctgctgcctgatggccgcaccctcatcgtgggcggggaggccagcaccctgaccatctgggacctggccagccccaccccccgcatcaaggccgagctgaccagcagcgccccagcctgctacgccctggccatcagcccagatgccaaggtgtgcttcagctgctgcagtgatggcaacattgctgtgtgggacctgcacaaccagaccctggtgcggcagttccagggccacacagatggagccagctgcatcgacatcagccatgatggcaccaagctgtggacaggaggcctggacaacacagtgcgctcctgggacctgcgggagggccggcagctgcagcagcacgacttcaccagccagatcttcagcctgggctactgccccaccggggagtggctggccgtgggcatggagagcagcaatgtggaggtgctgcaccacaccaagccagacaagtaccagctgcacctgcacgagagctgtgtgctgagcctgaagtttgcctactgcggcaagtggtttgtgtccacaggcaaggacaacctgctgaatgcctggaggaccccctatggagccagcatcttccagagcaaggagagcagctctgtgctgagctgtgacatctctgcagatgacaagtacatcgtgacaggcagcggggacaagaaggccaccgtgtatgaggtgatctactag

SEQ ID NO: 103142 - DNA, 2319 bp, Artificial Sequence
  derived and/or modified sequence
atgcccccccccccccccctgagctgcctgcggggcctgcaggccccccatcagcccggccaacccggcttcaagttcacagtggcagagtcttgtgaccgaatcaaagacgaatttcaatttttacaggcccagtatcactcgctgaaagtggagtacgacaaacttgctaacgaaaagaccgaaatgcagagacactacgtgatgtattacgaaatgagttacgggcttaatatcgagatgcacaaacaaacagaaatcgctaagcgccttaacaccattcttgctcaaattatgccattcctctcccaagaacaccagcagcaagtcgcccaggccgtagaacgggccaagcaggtgaccatgacggaactgaatgccatcatcggacagcaactccaagcccagcacctgtcccacgcgacccacggcccaccagtgcagcttccgcctcatcccagcggccttcagcccccagggattccgccagtgaccgggtccagcagtgggctgctggcacttggcgctctgggtagtcaggcccatttgacagtcaaagatgaaaagaaccatcatgagctggaccaccgcgaaagagagagcagtgccaacaattccgtttcacccagcgagtctcttcgcgccagcgaaaaacacagagggtccgctgactatagcatggaggccaaaaaaagaaaagccgaagaaaaggatagcctctcacggtatgatagcgacggcgacaagagcgatgatcttgttgtggatgtcagcaatgaggatccagctacacccagagtaagccccgctcattccccccccgagaatggattggacaaggctaggagtctaaagaaggatgccccaaccagtccagcgagcgtagcatcctctagctcaacaccttcaagtaaaactaaggatcttggccataatgacaaaagttcaacgcccgggctgaaatctaacactccaacaccaagaaatgacgctcctacccctgggacctccaccacacccggcctgagaagtatgcccggaaaacccccgggaatggacccaattgggatcatggcaagcgccctcaggacccccatatccatcacaagctcttatgcggctcccttcgcaatgatgtcgcatcacgaaatgaatggttctttgacctcgccaggggcatacgcaggcctgcacaatataccacctcagatgagcgcagcagccgccgccgcggctgctgcatatgggcggagcccgatggtggggttcgatccacacccacctatgcgggcaacgggcctacccagcagcctcgcctctattcctgggggtaagcccgcctatagcttccacgttagtgctgacggacagatgcaaccggtgccatttccacacgatgccctagctgggcccggaattcctcgccatgctcgtcagataaataccctcagccacggagaagtggtatgcgccgtgacaatttccaatccaacgagacatgtgtacaccgggggaaaggggtgcgtcaaaatctgggacataagccagcctggtagtaaatcacctatcagccaattagactgtctaaaccgcgataactatattcgctcctgcaaactgctgccagacggcagaacactgattgtgggcggggaggccagtacactaaccatctgggatctcgcctctcccacgccaagaataaaggcagagctgacaagctctgcccccgcatgttacgcactggcgatctcaccggacgcaaaggtgtgttttagctgttgcagtgacggtaacattgccgtctgggatctgcacaatcagaccctggtaaggcaatttcaaggccatacagatggtgccagctgtatcgatatctcacacgatgggaccaagctgtggactggcggcttagacaatacagttcgctcatgggaccttcgtgaaggcagacagctacagcagcacgactttacttcacagatcttcagtctgggctactgtcctactggcgagtggctggcagtaggtatggaatccagtaatgtggaggtcctccaccacacgaagccggacaaataccagctgcatttgcacgagtcttgtgtgctgagtctgaaattcgcatactgcgggaagtggtttgtgagcacgggaaaggacaatctgcttaatgcatggcgtaccccctacggggcatccatatttcagtctaaggagagtagcagcgtcctgtcctgcgacataagcgccgacgataaatacatcgtgactggcagcggcgataagaaggccactgtgtatgaggtgatatactag

SEQ ID NO: 103143 - DNA, 2319 bp, Artificial Sequence
  derived and/or modified sequence
atgcccccaccgccaccactgagttgtctgcggggtttgcaagctccacatcagccaggacaacctgggttcaagttcactgtggccgaatcatgcgaccggataaaagatgaatttcaatttctccaggctcagtatcattccttgaaagtcgagtacgataaactggcgaacgagaagaccgaaatgcagcgtcactacgtgatgtactacgaaatgagctatggcctaaacatcgagatgcataagcagaccgaaatcgcgaaacggctgaataccattctggctcagatcatgccattcctttcgcaggagcatcagcaacaggtggcacaagctgttgaacgcgctaaacaggtcactatgaccgagctgaacgccattattgggcagcagctacaggcacaacatctgagccatgcgacccacggtcctcccgtacagttgccaccccacccttctggcctgcagccgcctggtatacctcccgtgaccgggtcctcgtccggacttcttgccctcggagcccttggctctcaggctcacctaactgtgaaggatgaaaagaatcatcacgaactcgatcacagggagagggaaagctccgcaaacaactccgtctcgccctccgaatcgctgagggctagcgaaaagcaccgtggatccgcggactattcgatggaggctaaaaagcggaaggcagaggagaaagacagcttatcacgctacgacagtgacggagacaagtctgatgacctcgtggtggatgttagcaatgaagacccagccaccccaagggtctctccagcacactctcccccagagaacggtctagataaagctcgctctctgaagaaggacgcccctacctcacccgctagcgtggcctcatcttcgagtactccatcgtccaaaaccaaggatttggggcacaacgacaaatctagtacccctggtctcaaatctaacaccccaaccccgagaaatgacgccccaacaccaggcacatctacgacccccggactcaggtctatgccagggaagcccccaggtatggaccccataggaatcatggcttcagccctccgcactcctatctccattactagctcttatgccgctcctttcgcaatgatgtcccaccatgagatgaatggcagccttacctcacctggtgcttatgcgggactgcataacattccacctcagatgtccgcggcagcggcagccgcagccgcagcttacggaaggtctccaatggttgggttcgatccacatccacctatgagagcgactggcctcccgagctccctggcttccatcccaggagggaagcccgcatactcctttcatgttagcgccgacgggcagatgcagcctgttccattcccccacgatgcactcgccggacccggtatccctcgtcacgccagacagatcaacactctctcccacggagaagtggtgtgcgcggttacaatctccaatcccacccgccatgtgtacacggggggaaaaggatgtgtgaagatttgggacattagccagcccggtagtaaaagcccgataagccagttagattgtctcaatcgagacaattacatccggagctgtaagctcttgcctgacggcagaactctcatagttgggggagaagcctcaacactaacaatctgggacctggcctcacctacaccccgaattaaggccgagctcacttcctccgcaccagcctgttacgcgctcgccatctcaccagacgccaaggtctgcttcagttgttgttcggacggcaacatagccgtctgggatctccataatcaaaccctggtgcggcagttccaaggtcataccgacggcgcttcttgcatagacatcagccacgatggaacaaagctgtggacaggtgggcttgataacactgtgcgatcctgggacctccgtgaagggcgacagctgcaacagcacgacttcaccagccaaatattctccctcggttactgtcccacaggggagtggctggcggttggcatggagtcctctaatgtggaagtgttgcaccacaccaagccagacaagtatcagctccatctgcatgaatcatgtgtcctgtcactgaagttcgcctattgcggcaagtggttcgtgtccacgggtaaagacaatctgctcaatgcttggcggaccccttatggagcatctatttttcagagcaaggagtcctcctctgttctgtcttgtgatatcagcgccgacgataaatacatcgtgaccggatccggggataaaaaggcgactgtatatgaagtgatttattag

SEQ ID NO: 103144 - DNA, 2918 bp, Artificial Sequence
  derived and/or modified sequence
aattccgcgcgagtggcgcggggggctgcttgtgttccagggggagctgttcacgcggtccccggccccgctctgaagtctcccaactcacccggcttgtctcccgcccccgccttactggggagagggaggcccttggtgaaaggcatgggagccccgctgccgacggggagagatggggcgccccccctccgccccgtcggagagctgagaaacttgctgggaaggttctgggctgagggtggcctcttttggttgggcgccgttggggaggggccggggccgctctgagcgcggtctcatgcccccgccccctcccctgtcttgtcttcgcgggctccaggctccccatcaacccgggcagccgggatttaaattcacggtggctgagtcttgtgacaggatcaaagacgaattccagttcctgcaagctcagtatcacagcctcaaagtggagtacgacaagctggcaaacgagaagacggagatgcagcgccattatgtgatgtactatgagatgtcctatggcttgaacattgaaatgcacaagcagacagagattgcgaagagactgaacacaattttagcacagatcatgcctttcctgtcacaagagcaccagcagcaggtggcgcaggcagtggagcgcgccaagcaggtcaccatgacggagctgaacgccatcatcgggcagcagctccaggcgcagcacctctcccatgccacacacggccccccggtccagttgccaccccacccgtcaggtctccagcctccaggaatccccccagtgacagggagcagctccgggctgctggcactgggcgccctgggcagccaggcccatctgacggtgaaggatgagaagaaccaccatgaactcgatcacagagagagagaatccagtgcgaataactctgtgtcaccctcggaaagcctccgggccagtgagaagcaccggggctctgcggactacagcatggaagccaagaagcggaaggcggaggagaaggacagcttgagccgatacgacagtgatggagacaagagtgatgatctggtggtggatgtttccaatgaggaccccgcaacgccccgggtcagcccggcacactcccctcctgaaaatgggctggacaaggcccgtagcctgaaaaaagatgcccccaccagccctgcctcggtggcctcttccagtagcacaccttcctccaagaccaaagaccttggtcataacgacaaatcctccacccctgggctcaagtccaacacaccaaccccaaggaacgacgccccaactccaggcaccagcacgaccccagggctcaggtcgatgccgggtaaacctccgggcatggacccgataggtataatggcctcggctctgcgcacgcccatctccatcaccagctcctatgcggcgcccttcgccatgatgagccaccatgagatgaacggctccctcaccagtcctggcgcctacgccggcctccacaacatcccaccccagatgagcgccgccgccgctgctgcagccgctgcctatggccgatcgccaatggttggttttgaccctcaccccccgatgcgggccacaggcctcccctcaagcctggcctccattcctggaggaaaaccagcgtactcattccatgtgagtgctgatgggcagatgcagcccgtgcccttcccccacgacgccctggcaggccccggcatcccgaggcacgcccggcagatcaacacactcagccacggggaggtggtgtgtgccgtgaccatcagcaaccccacgaggcacgtctacacaggtggcaagggctgcgtgaagatctgggacatcagccagccaggcagcaagagccccatctcccagctggactgcctgaacagggacaattacatccgctcctgcaagctgctccctgatgggcgcacgctcatcgtgggcggcgaggccagcacgctcaccatctgggacctggcctcgcccacgccccgcatcaaggccgagctgacgtcctcggctcccgcctgttatgccctggccattagccctgacgccaaagtctgcttctcctgctgcagcgatgggaacattgctgtctgggacctgcacaaccagaccctggtcaggcagttccagggccacacagatggggccagctgcatagacatctcccatgatggcaccaaactgtggacagggggcctggacaacacggtgcgctcctgggacctgcgggagggccgacagctacagcagcatgacttcacttcccagatcttctcgctgggctactgccccactggggagtggctggctgtgggcatggagagcagcaacgtggaggtgctgcaccacaccaagcctgacaagtaccagctgcacctgcacgagagctgcgtgctctccctcaagttcgcctactgcggcaagtggttcgtgagcactgggaaagataaccttctcaacgcctggaggacgccttatggagccagcatattccagtctaaagaatcctcgtctgtcttgagttgtgacatttcagcggatgacaaatacattgtaacaggctctggtgacaagaaggccacagtttatgaggtcatctactaaacaagaactccagcagggctgtcaaactctgggagaaaccgactcggctctgacagggagacccccaggcgaggggccccgaggatggcggaggatgggccgcaggcagccgagcgttcagggctgcgctccggccggctgagagggcacgtgccccgtcacagtctggactcctgggcctggattgatgtgtctcacagactcggaagggttctgctcctcctcctccccctgaacaatgctggcagttgctacaaatagatttattggaggcttatggctccggttcccccacaga

SEQ ID NO: 103145 - protein, 762 aa, Artificial Sequence
  derived and/or modified sequence
MAPHQPGQPGFKFTVAESCDRIKDEFQFLQAQYHSLKVEYDKLANEKTEMQRHYVMYYEMSYGLNIEMHKQTEIAKRLNTILAQIMPFLSQEHQQQVAQAVERAKQVTMTELNAIIGQQQLQAQHLSHATHGPPVQLPPHPSGLQPPGIPPVTGSSSGLLALGALGSQAHLTVKDEKNHHELDHRERESSANNSVSPSESLRASEKHRGSADYSMEAKKRKAEEKDSLSRYDSDGDKSDDLVVDVSNEDPATPRVSPAHSPPENGLDKARSLKKDAPTSPASVASSSSTPSSKTKDLGHNDKSSTPGLKSNTPTPRNDAPTPGTSTTPGLRSMPGKPPGMDPIASALRTPISITSSYAAPFAMMSHHEMNGSLTSPGAYAGLHNIPPQMSAAAAAAAAAYGRSPMVSFGAVGFDPHPPMRATGLPSSLASIPGGKPAYSFHVSADGQMQPVPFPHDALAGPGIPRHARQINTLSHGEVVCAVTISNPTRHVYTGGKGCVKIWDISQPGSKSPISQLDCLNRDNYIRSCKLLPDGRTLIVGGEASTLTIWDLASPTPRIKAELTSSAPACYALAISPDAKVCFSCCSDGNIAVWDLHNQTLVRQFQGHTDGASCIDISHDGTKLWTGGLDNTVRSWDLREGRQLQQHDFTSQIFSLGYCPTGEWLAVGMESSNVEVLHHTKPDKYQLHLHESCVLSLKFAYCGKWFVSTGKDNLLNAWRTPYGASIFQSKESSSVLSCDISADDKYIVTGSGDKKATVYEVIY

SEQ ID NO: 103146 - protein, 774 aa, Artificial Sequence
  derived and/or modified sequence
MPPPPPLSCLRGLQAPHQPGQPGFKFTVAESCDRIKDEFQFLQAQYHSLKVEYDKLANEKTEMQRHYVMYYEMSYGLNIEMHKQTEIAKRLNTILAQIMPFLSQEHQQQVAQAVERAKQVTMTELNAIIGQQLQAQHLSHATHGPPVQLPPHPSGLQPPGIPPVTGSSSGLLALGALGSQAHLTVKDEKNHHELDHRERESSANNSVSPSESLRASEKHRGSADYSMEAKKRKAEEKDSLSRYDSDGDKSDDLVVDVSNEDPATPRVSPAHSPPENGLDKARSLKKDAPTSPASVASSSSTPSSKTKDLGHNDKSSTPGLKSNTPTPRNDAPTPGTSTTPGLRSMPGKPPGMDPIASALRTPISITSSYAAPFAMMSHHEMNGSLTSPGAYAGLHNIPPQMSAAAAAAAAAYGRSPMVSFGAVGFDPHPPMRATGLPSSLASIPGGKPAYSFHVSADGQMQPVPFPHDALAGPGIPRHARQINTLSHGEVVCAVTISNPTRHVYTGGKGCVKIWDISQPGSKSPISQLDCLNRDNYIRSCKLLPDGRTLIVGGEASTLTIWDLASPTPRIKAELTSSAPACYALAISPDAKVCFSCCSDGNIAVWDLHNQTLVRQFQGHTDGASCIDISHDGTKLWTGGLDNTVRSWDLREGRQLQQHDFTSQIFSLGYCPTGEWLAVGMESSNVEVLHHTKPDKYQLHLHESCVLSLKFAYCGKWFVSTGKDNLLNAWRTPYGASIFQSKESSSVLSCDISADDKYIVTGSGDKKATVYEVIY

SEQ ID NO: 103147 - DNA, 2289 bp, Artificial Sequence
  derived and/or modified sequence
atggccccccaccagcccggccagcccggcttcaagttcaccgtggccgagagctgcgacagaatcaaggacgagttccagttcctgcaggcccagtaccacagcctgaaggtggagtacgacaagctggccaacgagaagaccgagatgcagagacactacgtgatgtactacgagatgagctacggcctgaacatcgagatgcacaagcagaccgagatcgccaagagactgaacaccatcctggcccagatcatgcccttcctgagccaggagcaccagcagcaggtggcccaggccgtggagagagccaagcaggtgaccatgaccgagctgaacgccatcatcggccagcagcagctgcaggcccagcacctgagccacgccacccacggcccccccgtgcagctgcccccccaccccagcggcctgcagccccccggcatcccccccgtgaccggcagcagcagcggcctgctggccctgggcgccctgggcagccaggcccacctgaccgtgaaggacgagaagaaccaccacgagctggaccacagagagagagagagcagcgccaacaacagcgtgagccccagcgagagcctgagagccagcgagaagcacagaggcagcgccgactacagcatggaggccaagaagagaaaggccgaggagaaggacagcctgagcagatacgacagcgacggcgacaagagcgacgacctggtggtggacgtgagcaacgaggaccccgccacccccagagtgagccccgcccacagcccccccgagaacggcctggacaaggccagaagcctgaagaaggacgcccccaccagccccgccagcgtggccagcagcagcagcacccccagcagcaagaccaaggacctgggccacaacgacaagagcagcacccccggcctgaagagcaacacccccacccccagaaacgacgcccccacccccggcaccagcaccacccccggcctgagaagcatgcccggcaagccccccggcatggaccccatcgccagcgccctgagaacccccatcagcatcaccagcagctacgccgcccccttcgccatgatgagccaccacgagatgaacggcagcctgaccagccccggcgcctacgccggcctgcacaacatccccccccagatgagcgccgccgccgccgccgccgccgccgcctacggcagaagccccatggtgagcttcggcgccgtgggcttcgacccccacccccccatgagagccaccggcctgcccagcagcctggccagcatccccggcggcaagcccgcctacagcttccacgtgagcgccgacggccagatgcagcccgtgcccttcccccacgacgccctggccggccccggcatccccagacacgccagacagatcaacaccctgagccacggcgaggtggtgtgcgccgtgaccatcagcaaccccaccagacacgtgtacaccggcggcaagggctgcgtgaagatctgggacatcagccagcccggcagcaagagccccatcagccagctggactgcctgaacagagacaactacatcagaagctgcaagctgctgcccgacggcagaaccctgatcgtgggcggcgaggccagcaccctgaccatctgggacctggccagccccacccccagaatcaaggccgagctgaccagcagcgcccccgcctgctacgccctggccatcagccccgacgccaaggtgtgcttcagctgctgcagcgacggcaacatcgccgtgtgggacctgcacaaccagaccctggtgagacagttccagggccacaccgacggcgccagctgcatcgacatcagccacgacggcaccaagctgtggaccggcggcctggacaacaccgtgagaagctgggacctgagagagggcagacagctgcagcagcacgacttcaccagccagatcttcagcctgggctactgccccaccggcgagtggctggccgtgggcatggagagcagcaacgtggaggtgctgcaccacaccaagcccgacaagtaccagctgcacctgcacgagagctgcgtgctgagcctgaagttcgcctactgcggcaagtggttcgtgagcaccggcaaggacaacctgctgaacgcctggagaaccccctacggcgccagcatcttccagagcaaggagagcagcagcgtgctgagctgcgacatcagcgccgacgacaagtacatcgtgaccggcagcggcgacaagaaggccaccgtgtacgaggtgatctactag

SEQ ID NO: 103148 - DNA, 2289 bp, Artificial Sequence
  derived and/or modified sequence
atggcaccgcaccaaccaggacagcctggtttcaaatttactgttgccgagtcctgtgatagaataaaagatgaattccagttccttcaggcacaatatcactccctgaaagttgaatacgacaagcttgccaatgagaagacagaaatgcagaggcactacgttatgtattacgaaatgagttacggattgaatatcgaaatgcataagcagacagagatagcaaaaagacttaacaccattctcgcccaaatcatgcctttcctgtcccaggagcatcagcagcaagtggcccaagcagtagaaagagctaagcaggttacaatgactgagttgaacgccatcatcgggcagcagcagttgcaagcccagcacttaagccacgccacgcacggccctccggttcagttgccgccccacccatctggcctccaaccgcctggaatccctccagtcaccggaagcagctcaggacttctggcgctgggagccctgggctcacaggcccacttgaccgttaaggacgagaaaaaccaccatgaactggatcaccgcgagagagagagctcagctaataattccgtgagcccatccgagtcacttagagcctctgagaagcatagaggaagcgccgattacagtatggaggcaaagaagagaaaggcagaggaaaaggatagcttgagccgctatgatagtgatggcgataaatctgatgacttggtggtcgacgtttccaacgaggacccagctacacctagagtctcccccgcccattccccccccgagaacggactcgataaggctcgaagcctcaagaaagacgcgcccaccagcccagcaagtgtagcctcctcaagtagtactccgtccagcaagacaaaagatcttgggcacaacgacaagagcagtacccctggcctgaagtcaaacacacctaccccacggaacgacgcccctactccagggactagcacaacacccgggctaagatccatgcccggaaaaccaccaggaatggaccccatagcaagtgccctgcggaccccgatcagcataacatcctcttacgccgcaccattcgcaatgatgtctcatcacgagatgaacgggagcttgacaagccccggagcttacgctggactgcacaatattcctcctcaaatgtctgctgctgccgcggccgcagccgccgcctacggacgatcacctatggttagctttggtgccgtgggctttgatcctcacccacctatgcgagccaccggactgccctcttcattagcgtcgattccgggaggcaagcccgcctattcattccacgtgtccgctgatggtcaaatgcagccagtcccttttcctcatgatgccctggctggcccgggcatcccgcgacacgcaaggcaaattaacacactgtcccatggagaggtcgtgtgcgccgttacgatctccaatcctacgcgccatgtgtataccgggggcaaaggctgcgtaaaaatttgggacattagtcagccgggctctaaatctccaatttctcaacttgactgcctaaacagagataactacatccggtcctgcaaactgctgcccgacggcaggacgctcatagttggcggggaagccagtacattaaccatctgggacttagcaagccctaccccaagaattaaagcagagctgacaagcagcgcccctgcctgttacgctttggccatctcccccgacgctaaagtttgcttttcctgctgctctgatggaaatattgcagtgtgggatctgcacaaccagaccctcgtgcggcagttccagggccacacagacggcgcctcttgtattgacatatcccacgatggaactaaattgtggactggcggcttggataatactgtgcggtcctgggacttacgcgagggacggcaactgcagcagcacgattttacttcacagatcttctctcttggctattgtcctactggagagtggctcgcagttggcatggagtcatccaatgtggaggttttgcatcacacaaaacccgacaaataccagttgcacctccacgagagctgcgttctctctctgaagttcgcatattgcgggaagtggttcgtgtccaccgggaaagacaacctcctcaatgcctggcggaccccctacggggctagcatattccagtctaaggagagctccagcgtgttgtcttgcgatattagtgctgatgataaatatatcgtgacgggttctggagataaaaaggctactgtttacgaagtgatttactag

SEQ ID NO: 103149 - DNA, 2289 bp, Artificial Sequence
  derived and/or modified sequence
atggccccccaccagcccggccagcccggcttcaagttcaccgtggccgagagctgtgaccgcatcaaggatgagttccagttcctgcaggcccagtaccacagcctgaaggtggagtatgacaagctggccaatgagaagacagagatgcagaggcactacgtgatgtactatgagatgtcctatggcctgaacatcgagatgcacaagcagacagagatcgccaagaggctgaacaccatcctggcccagatcatgcccttcctgagccaggagcaccagcagcaggtggcccaggccgtggagcgggccaagcaggtgaccatgacagagctgaatgccatcatcggccagcagcagctgcaggcccagcacctgagccacgccacccacggcccccctgtgcagctgcccccccaccccagcggcctgcagcccccaggcatcccccctgtgacaggcagcagcagcggcctgctggccctgggcgccctgggcagccaggcccacctgactgtgaaggatgagaagaaccaccacgagctggaccaccgggagcgggagagcagcgccaacaacagcgtgagccccagcgagagcctgcgggccagcgagaagcaccggggcagcgctgactacagcatggaggccaagaagaggaaggccgaggagaaggacagcctgagccgctatgacagtgatggagacaagagtgatgacctggtggtggatgtgtccaatgaagatcctgccaccccccgggtgtccccagcccacagccccccagaaaatggcctggacaaggcccggagcctgaagaaggatgcccccaccagccctgcctctgtggccagcagcagcagcacccccagcagcaagaccaaggacctgggccacaatgacaagagcagcaccccaggcctgaagagcaacacccccaccccaagaaatgatgcccccaccccaggcaccagcaccaccccaggcctgcgctccatgcctgggaagcccccaggcatggaccccatcgccagcgccctgcggacccccatcagcatcaccagcagctatgctgccccctttgccatgatgagccaccacgagatgaatggcagcctgaccagccctggggcctatgccggcctgcacaacatccccccccagatgtctgctgctgctgctgctgctgctgctgcctacggccgcagccccatggtgtcctttggagctgtgggctttgacccccacccccccatgagggccaccggcctgcccagcagcctggccagcatccctgggggcaagccagcctacagcttccacgtgtctgcagatggccagatgcagcctgtgcccttcccccatgatgccctggccggccctggcatccccaggcatgcccggcagatcaacaccctgagccatggagaggtggtgtgtgctgtgaccatcagcaaccccaccaggcatgtgtacacaggaggcaagggctgtgtgaagatctgggacatcagccagcccggcagcaagagccccatcagccagctggactgcctgaacagagacaactacatccgcagctgcaagctgctgcctgatggccgcaccctcatcgtgggcggggaggccagcaccctgaccatctgggacctggccagccccaccccccgcatcaaggccgagctgaccagcagcgccccagcctgctacgccctggccatcagcccagatgccaaggtgtgcttcagctgctgcagtgatggcaacattgctgtgtgggacctgcacaaccagaccctggtgcggcagttccagggccacacagatggagccagctgcatcgacatcagccatgatggcaccaagctgtggacaggaggcctggacaacacagtgcgctcctgggacctgcgggagggccggcagctgcagcagcacgacttcaccagccagatcttcagcctgggctactgccccaccggggagtggctggccgtgggcatggagagcagcaatgtggaggtgctgcaccacaccaagccagacaagtaccagctgcacctgcacgagagctgtgtgctgagcctgaagtttgcctactgcggcaagtggtttgtgtccacaggcaaggacaacctgctgaatgcctggaggaccccctatggagccagcatcttccagagcaaggagagcagctctgtgctgagctgtgacatctctgcagatgacaagtacatcgtgacaggcagcggggacaagaaggccaccgtgtatgaggtgatctactag

SEQ ID NO: 103150 - DNA, 2289 bp, Artificial Sequence
  derived and/or modified sequence
atggccccccaccagcccggccagcccggcttcaagttcaccgtggcagagtcttgtgacagaatcaaagatgagtttcaatttctgcaggcccagtatcattcactcaaggtggaatatgacaaactggccaacgaaaaaacagaaatgcaacggcactatgtcatgtactacgagatgtcctacggcctgaatatagagatgcacaaacaaactgaaatcgccaagcgcctcaatacaatcctggcgcagatcatgcccttcctttctcaagaacatcaacaacaggtcgcgcaagcggtggaaagggccaagcaggtcaccatgaccgagttaaatgccataattgggcagcagcagttacaggctcagcatctgagccacgcaacccacggcccaccggtccagctgcctccacacccctccgggctacagccgccgggaatcccccctgtgaccggatccagctccggactgctcgctctgggcgctttaggtagccaagcgcatcttactgtgaaagatgagaagaaccatcacgaactcgaccacagagagagggagtcttctgccaataactcagtcagcccaagtgaatcactgcgggctagtgaaaagcatcggggtagcgctgactactcaatggaggccaaaaagcggaaggctgaagagaaggacagcctgtcacgctatgattccgacggtgataaatcagatgacctggtggttgatgtgagcaacgaggacccagctacgcccagagtctctccagctcacagccctccggaaaatggtctcgacaaagccaggagtcttaagaaggacgccccgactagccccgcgtccgtggcttctagtagttccacacctagctccaaaacaaaggacctgggtcataacgataagtctagcacccccggactgaagtcaaacacccctaccccgcgcaacgatgcacccactcccggaacaagcaccacgccaggattgcggtcaatgccggggaagcctcccggtatggacccgatagcaagcgccttgcggacacctataagcatcaccagttcctatgcggccccctttgctatgatgtcacaccatgagatgaacgggagtcttacttccccaggagcctatgccggtctgcataatattccaccgcagatgagcgcagccgcagcagccgcagcagcggcctatggtcgcagcccaatggtgtcttttggagccgtcgggttcgatccacatccacccatgcgcgctacaggcctgccatcaagcttggccagtatccccggagggaagccagcctactcctttcacgtctccgccgacggtcagatgcaaccagtcccgtttccgcacgacgctctggcggggccaggcattccacgccatgcaaggcaaatcaacacactttcacatggtgaggtcgtctgtgccgtcactatatcaaaccctactcggcatgtgtataccgggggcaaagggtgtgttaagatctgggacatctcccagccaggctcgaagtcgcctataagccaattagactgcctgaacagggacaactacatcagatcgtgcaagctgcttcccgatggacggacactcatcgtgggcggggaagcatctactctgacaatatgggaccttgcttctcccacccccaggatcaaggctgagcttacatcatcggctcccgcatgctacgcactcgccattagccccgatgcaaaggtgtgtttcagctgctgctccgacggcaacatcgcggtttgggaccttcataaccagacccttgtccgccagttccagggccacactgacggcgcctcgtgcatagatatctcgcacgatggcactaagctgtggacaggcggcttagataatacggtgcgatcttgggatcttagagagggcagacagctgcagcagcatgattttacatcccagatcttcagtttagggtattgccctaccggggaatggttagctgtgggaatggaaagctctaacgtggaggtgctccaccatacgaaacccgataagtaccagctgcatttgcacgaaagttgcgtgttgtccctgaagttcgcttactgtggaaagtggttcgtctccaccggtaaggataatctcctgaacgcctggcggaccccgtatggagccagcatttttcaaagcaaagagtcatcaagcgtccttagctgtgacatcagtgctgatgacaaatatattgttacagggtcaggagacaagaaggctactgtgtatgaggttatttactag

SEQ ID NO: 103151 - DNA, 2289 bp, Artificial Sequence
  derived and/or modified sequence
atggctccccaccagcccggtcagcccggatttaaatttactgtggccgaatcctgtgatcgcattaaggatgagttccagttcctgcaggctcagtaccattctctcaaagtggaatacgacaaattggcaaatgaaaagactgagatgcagaggcactatgtgatgtactatgaaatgtcatacgggcttaacattgaaatgcacaagcaaaccgaaatcgcaaagcgactcaatacgatattggcacagattatgccctttctcagccaggaacaccagcagcaagttgctcaagcagttgagcgcgcaaaacaggtcaccatgacggaattaaatgccattatcggacagcaacagctccaggcccagcacctcagtcacgctacccacgggcctcctgtacagttgcctccacacccgtcaggtttacagccacctggtatccccccagtgaccgggtcatcaagcggcctcctggccttgggggcactgggctctcaggcacatctgaccgtcaaggacgagaaaaatcatcatgaactggaccatcgcgaacgggagagcagcgcaaacaatagcgtttcccctagcgaaagtctgagggccagcgaaaagcatcgcggttccgccgattactccatggaagcgaagaaacgaaaggccgaagaaaaggacagtttgtcccgctacgatagtgacggtgacaaatctgatgaccttgttgtggacgtctctaatgaggacccagcgactcccagagtgtctccagctcattctccacctgagaacggcctagacaaagcacggagtttaaaaaaagatgccccaacctctcccgcttctgtggcatctagttcatccacaccctcctccaagacaaaagacctagggcataatgacaagtcctctacccccggtctcaaatccaatacacccaccccccgaaacgacgcccctacccccggtacatcgacaactcctggactcagatctatgcctggaaaacctccaggcatggatcccattgccagcgccttgagaacaccaatatccataacctccagttatgcagccccttttgctatgatgagtcatcacgaaatgaatggctctctaacaagtccaggggcttatgctggtctgcacaatatccctccccaaatgtctgccgctgccgcagccgctgccgcagcttatggaaggtcaccaatggtatctttcggtgctgtaggatttgaccctcatccacccatgagggcaaccggccttcccagctccttagctagcatccccggtgggaagcccgcatattcgttccacgtcagtgccgatggacagatgcagccagtgcctttcccgcacgatgctttggccggacctggcatcccaaggcacgcccgtcaaattaacaccctgagccatggcgaagtcgtgtgcgccgtgacaatttcaaaccccacccggcatgtgtacacaggagggaaaggatgtgtgaaaatctgggacatctcacagcccggatccaagagcccgatttcacagttggattgtctaaaccgagataattacataagaagctgtaagctgttgccagacggcaggaccttaatagtgggtggtgaagcaagtactttgaccatttgggacctggccagtcccacacccagaattaaggctgaactgacttcatctgcacccgcttgctacgccttggctatctcccctgacgcaaaagtatgcttctcctgctgtagcgacgggaatatcgcagtatgggacctccacaatcagacactggtgaggcagttccagggacacacagacggggcaagctgtatcgatatttctcacgacggtactaagttatggacgggagggttggacaataccgtcaggagctgggacctgagagagggtcggcagcttcaacagcacgactttacatcacagattttttcattgggctattgtcctacaggagagtggttggccgtcgggatggagtcctcaaacgtagaggtgttacaccacaccaagccagacaaatatcagctgcacctccatgaatcgtgtgtgctgtctctgaagtttgcctactgcggaaagtggttcgtctccaccggcaaagataacctgctgaacgcttggagaaccccctatggcgctagcatctttcagagcaaggaatcctcttctgttctgtcatgtgacatcagtgctgacgataaatatattgtaactggatcgggcgacaagaaggccacagtgtacgaagtgatttattag

SEQ ID NO: 103152 - DNA, 2657 bp, Artificial Sequence
  derived and/or modified sequence
atttaagcatctatcatggcagggtaaacgaggcagtttatctggcacctccattttgcttgttgctacctttatggctccccatcaacccgggcagccgggatttaaattcacggtggctgagtcttgtgacaggatcaaagacgaattccagttcctgcaagctcagtatcacagcctcaaagtggagtacgacaagctggcaaacgagaagacggagatgcagcgccattatgtgatgtactatgagatgtcctatggcttgaacattgaaatgcacaagcagacagagattgcgaagagactgaacacaattttagcacagatcatgcctttcctgtcacaagagcaccagcagcaggtggcgcaggcagtggagcgcgccaagcaggtcaccatgacggagctgaacgccatcatcgggcagcagcagctccaggcgcagcacctctcccatgccacacacggccccccggtccagttgccaccccacccgtcaggtctccagcctccaggaatccccccagtgacagggagcagctccgggctgctggcactgggcgccctgggcagccaggcccatctgacggtgaaggatgagaagaaccaccatgaactcgatcacagagagagagaatccagtgcgaataactctgtgtcaccctcggaaagcctccgggccagtgagaagcaccggggctctgcggactacagcatggaagccaagaagcggaaggcggaggagaaggacagcttgagccgatacgacagtgatggagacaagagtgatgatctggtggtggatgtttccaatgaggaccccgcaacgccccgggtcagcccggcacactcccctcctgaaaatgggctggacaaggcccgtagcctgaaaaaagatgcccccaccagccctgcctcggtggcctcttccagtagcacaccttcctccaagaccaaagaccttggtcataacgacaaatcctccacccctgggctcaagtccaacacaccaaccccaaggaacgacgccccaactccaggcaccagcacgaccccagggctcaggtcgatgccgggtaaacctccgggcatggacccgatagcctcggctctgcgcacgcccatctccatcaccagctcctatgcggcgcccttcgccatgatgagccaccatgagatgaacggctccctcaccagtcctggcgcctacgccggcctccacaacatcccaccccagatgagcgccgccgccgctgctgcagccgctgcctatggccgatcgccaatggtgagctttggagctgttggttttgaccctcaccccccgatgcgggccacaggcctcccctcaagcctggcctccattcctggaggaaaaccagcgtactcattccatgtgagtgctgatgggcagatgcagcccgtgcccttcccccacgacgccctggcaggccccggcatcccgaggcacgcccggcagatcaacacactcagccacggggaggtggtgtgtgccgtgaccatcagcaaccccacgaggcacgtctacacaggtggcaagggctgcgtgaagatctgggacatcagccagccaggcagcaagagccccatctcccagctggactgcctgaacagggacaattacatccgctcctgcaagctgctccctgatgggcgcacgctcatcgtgggcggcgaggccagcacgctcaccatctgggacctggcctcgcccacgccccgcatcaaggccgagctgacgtcctcggctcccgcctgttatgccctggccattagccctgacgccaaagtctgcttctcctgctgcagcgatgggaacattgctgtctgggacctgcacaaccagaccctggtcaggcagttccagggccacacagatggggccagctgcatagacatctcccatgatggcaccaaactgtggacagggggcctggacaacacggtgcgctcctgggacctgcgggagggccgacagctacagcagcatgacttcacttcccagatcttctcgctgggctactgccccactggggagtggctggctgtgggcatggagagcagcaacgtggaggtgctgcaccacaccaagcctgacaagtaccagctgcacctgcacgagagctgcgtgctctccctcaagttcgcctactgcggcaagtggttcgtgagcactgggaaagataaccttctcaacgcctggaggacgccttatggagccagcatattccagtctaaagaatcctcgtctgtcttgagttgtgacatttcagcggatgacaaatacattgtaacaggctctggtgacaagaaggccacagtttatgaggtcatctactaaacaagaactccagcagggctgtcaaactctgggagaaaccgactcggctctgacagggagacccccaggcgaggggccccgaggatggcggaggatgggccgcaggcagccgagcgttcagggctgcgctccggccggctgagagggcacgtgccccgtcacagtctggactcctgggcctggattgatgtgtctcacagactcggaagggttctgctcctcctcctccccctgaacaatgctggcagttgctacaaatagatttattggaggcttatggctccggttcccccac

SEQ ID NO: 103153 - DNA, 153 bp, Artificial Sequence
  derived and/or modified sequence
atgctgcggagcaccttcaccgtgcactggaccaccatcctgggcatctgccggcccatcaagcccatctacaagagccaggcctgccccctgtctgagaagagaaatgctgacaaccacctggtgtctgaggacaacaccttcaaggtgtag

SEQ ID NO: 103154 - DNA, 297 bp, Artificial Sequence
  derived and/or modified sequence
atgctgcggagcaccttcaccgtgcactggaccaccatcctgggcatctgccggcccatcaagcccatctacaagagccaggcctgccccctgtctgagaagagaaatgctgacaaccacctggtgtctgaggacaacaccttcaaggagcctgagcgctacatcagcagcagctgtgtgctgaccagcatcctgtacctgggggagaagaccttctccttccgcaccctcatcagcccccggggcatgaagctggtggagatcctgcagcagcccagcctgaccatggtggcctag

SEQ ID NO: 103155 - protein, 647 aa, Artificial Sequence
  derived and/or modified sequence
MGEIEGTYRVLQTAGMRLGAQTPVGVSTLEPGQTLLPRMQEKHLHLRVKLLDNTMEIFDIEPKCDGQVLLTQVWKRLNLVECDYFGMEFQNTQSYWIWLEPMKPIIRQIRRPKNVVLRLAVKFFPPDPGQLQEEYTRYLFALQLKRDLLEERLTCADTTAALLTSHLLQSEIGDYDETLDREHLKVNEYLPGQQHCLEKILEFHQKHVGQTPAESDFQVLEIARKLEMYGIRFHMASDREGTKIQLAVSHMGVLVFQGTTKINTFNWSKVRKLSFKRKRFLIKLHPEVHGPYQDTLEFLLGSRDECKNFWKICVEYHTFFRLLDQPKPKAKAVFFSRGSSFRYSGRTQKQLVDYFKDSGMKRIPYERRHSKTHTSVRALTADLPKQSISFPEGLRTPASPSSANAFYSLSPSTLVPSGLPEFKDSSSSLTDPQVSYVKSPAAERRSGAVAGGPDTPSAQPLGPPALQPGPGLSTKSPQPSPSSRKSPLSLSPAFQVPLGPAEQGSSPLLSPVLSDAGGAGMDCEEPRHKRVPADEAYFIVKEILATERTYLKDLEVITVWFRSAVVKEDAMPATLMTLLFSNIDPIYEFHRGFLREVEQRLALWEGPSKAHTKGSHQRIGDILLRNMRQLKVFQLHEGHVAGVTKME

SEQ ID NO: 103156 - DNA, 1944 bp, Artificial Sequence
  derived and/or modified sequence
atgggcgagatcgagggcacctacagagtgctgcagaccgccggcatgagactgggcgcccagacccccgtgggcgtgagcaccctggagcccggccagaccctgctgcccagaatgcaggagaagcacctgcacctgagagtgaagctgctggacaacaccatggagatcttcgacatcgagcccaagtgcgacggccaggtgctgctgacccaggtgtggaagagactgaacctggtggagtgcgactacttcggcatggagttccagaacacccagagctactggatctggctggagcccatgaagcccatcatcagacagatcagaagacccaagaacgtggtgctgagactggccgtgaagttcttcccccccgaccccggccagctgcaggaggagtacaccagatacctgttcgccctgcagctgaagagagacctgctggaggagagactgacctgcgccgacaccaccgccgccctgctgaccagccacctgctgcagagcgagatcggcgactacgacgagaccctggacagagagcacctgaaggtgaacgagtacctgcccggccagcagcactgcctggagaagatcctggagttccaccagaagcacgtgggccagacccccgccgagagcgacttccaggtgctggagatcgccagaaagctggagatgtacggcatcagattccacatggccagcgacagagagggcaccaagatccagctggccgtgagccacatgggcgtgctggtgttccagggcaccaccaagatcaacaccttcaactggagcaaggtgagaaagctgagcttcaagagaaagagattcctgatcaagctgcaccccgaggtgcacggcccctaccaggacaccctggagttcctgctgggcagcagagacgagtgcaagaacttctggaagatctgcgtggagtaccacaccttcttcagactgctggaccagcccaagcccaaggccaaggccgtgttcttcagcagaggcagcagcttcagatacagcggcagaacccagaagcagctggtggactacttcaaggacagcggcatgaagagaatcccctacgagagaagacacagcaagacccacaccagcgtgagagccctgaccgccgacctgcccaagcagagcatcagcttccccgagggcctgagaacccccgccagccccagcagcgccaacgccttctacagcctgagccccagcaccctggtgcccagcggcctgcccgagttcaaggacagcagcagcagcctgaccgacccccaggtgagctacgtgaagagccccgccgccgagagaagaagcggcgccgtggccggcggccccgacacccccagcgcccagcccctgggcccccccgccctgcagcccggccccggcctgagcaccaagagcccccagcccagccccagcagcagaaagagccccctgagcctgagccccgccttccaggtgcccctgggccccgccgagcagggcagcagccccctgctgagccccgtgctgagcgacgccggcggcgccggcatggactgcgaggagcccagacacaagagagtgcccgccgacgaggcctacttcatcgtgaaggagatcctggccaccgagagaacctacctgaaggacctggaggtgatcaccgtgtggttcagaagcgccgtggtgaaggaggacgccatgcccgccaccctgatgaccctgctgttcagcaacatcgaccccatctacgagttccacagaggcttcctgagagaggtggagcagagactggccctgtgggagggccccagcaaggcccacaccaagggcagccaccagagaatcggcgacatcctgctgagaaacatgagacagctgaaggtgttccagctgcacgagggccacgtggccggcgtgaccaagatggagtag

SEQ ID NO: 103157 - DNA, 2580 bp, Artificial Sequence
  derived and/or modified sequence
gcgacgccgacgcgagtctggcggctgctgcttgcgactgcggaggccgggcgaggccggtgaggacgcggcgggcgagcgagaggccgaggtgttttcttcactcatggtgaagaatgggggagatagaaggaacatacagagtcctgcagactgcagggatgcgcttgggtgcccagacccctgtgggagttagcacccttgagcctgggcagactctcttgcccagaatgcaagagaagcacctgcacctcagagtaaagctgctggacaacaccatggaaatatttgacattgagcctaaatgcgatggccaggtattactgacacaagtgtggaagcgtttaaacctggtagaatgtgactacttcgggatggagtttcaaaatactcagtcctactggatttggcttgaacctatgaaacccatcattaggcaaatacgaaggccaaagaatgtggtgcttcgcctagctgtaaaattttttccacctgatcctggtcagctacaagaagaatatacaagatacttgtttgccttgcaacttaagagagacctgctggaagagcgtttgacctgtgctgacaccacagcggcccttctcacgtcccatctcctgcagtcggaaataggagattacgatgaaacgctggaccgagagcacctcaaagtgaacgagtatttgcctggccagcagcactgccttgagaagatactagaattccatcagaagcacgtgggccagacacctgctgagtcggatttccaggtgctcgaaattgctcgaaagttggaaatgtacggcatcagatttcacatggcttctgacagggaaggaaccaagattcaactggcagtttcccacatgggtgtactcgtgttccagggcaccaccaaaatcaacactttcaactggtccaaggtccgtaaactaagcttcaagaggaaaagatttcttatcaaacttcatccagaggttcatggaccttaccaggacacattagaatttttgttgggtagtagagatgaatgtaagaacttctggaagatttgtgtggagtatcacaccttttttagacttttggaccaacctaagccaaaagcaaaagccgtcttcttcagccggggctcctccttcagatacagtggaagaactcagaaacaactagtagattatttcaaagacagtggaatgaagagaattccatatgaaagaaggcacagcaagacccacacgtccgttcgagctctgactgcagacctaccaaaacagagcatctcattccccgagggattgaggactcctgcctccccatcttcagcgaatgccttttactcgctctctccctccactctggtcccctctggcctgccagagtttaaggacagcagcagctccctcacagatccccaggtttcctacgtcaagagtccagctgcagagaggcgcagtggagcagtggctggaggccccgacacaccatcggcccagcccctcgggccccccgcactccagcctggtccaggcctttccacgaagagtcctcagccttctccctccagccggaagagccccctgagtctgagccctgcatttcaggtgcctttgggcccagctgaacagggctcatccccactcctgagccctgtcctcagtgatgctggcggagccgggatggactgcgaggagcccagacacaagcgcgtgcctgcagacgaggcctacttcatagtcaaagagattctcgctacagaacgaacatacctcaaggatttagaagttattaccgtgtggttccgcagcgcagtggtgaaggaggacgccatgcctgcgactctgatgacgctgctcttctccaacatcgatcccatctatgagttccacagaggcttcctgcgcgaggtggagcagaggctggcactctgggaagggccctccaaagcccacacaaaaggcagtcatcaacgaatcggggacatcctgctcaggaacatgcgccagttaaaggtgttccagctccacgaagggcatgtagcaggggtcacaaaaatggagtagacttttggataggcaggggcagcactgggggaagtgagatttctcttcaataggagcaacggtacaggtgttcacatgtggacaacagtgcaggtcgtgcattgactgttcaggggtctcactcttgcttaacgtgcctggaacagttctccctccctctcaggctgctcatgagttcaccacgtgaccgcccaaggtgtggagctctgcataacaccatgaagctgagccacagtgacgacgacgactcaagctccccctcctccatccctcgcctgtcccaccttctacccaatcctgcgagactctggccactcctcacacctagagttcccaagggactataggttttgctgttctgtgttgagatagccccacttgaagaactgcattcagcctaggtgcccttttcctgcctcgacggaagctgagtcaggttgttaatgagaaagttctacttatcccaaaggcagttgcactaatttaaaattgaaatatacacaaatctgtttgatccaga

SEQ ID NO: 103158 - DNA, 1944 bp, Artificial Sequence
  derived and/or modified sequence
atgggcgaaatcgaaggcacatatcgcgtgctgcagacggcagggatgaggctaggagcacaaacacccgtcggagtctcaactctggagcctggacagacattattaccccggatgcaggagaagcatttacatctgcgcgtgaaactgctagacaataccatggagatctttgacatcgagcccaagtgcgacgggcaggtcctcctgacacaggtgtggaaaagactgaacctggtagagtgtgactattttgggatggaatttcagaatacccagtcatattggatctggctggagccgatgaagccaatcatcaggcagatcaggcgccccaaaaacgtagtccttagattggcagtcaagttcttccccccagaccccggccagctgcaggaggaatataccagatacctgtttgccctccagcttaagcgcgacctgctcgaggaaagactcacttgtgccgacacgaccgcagcactcctgacaagtcacctgctgcagtccgagatcggggactacgacgaaacacttgatcgtgaacaccttaaagtgaacgagtatctgcccggccagcagcattgcttggagaaaattttggaatttcaccagaaacacgtgggacaaaccccggcagaatccgatttccaggtcctggagatagccaggaaattagagatgtatgggattcgcttccacatggcttctgaccgcgaggggacaaaaatccagctcgccgttagccatatgggcgtcctggtgtttcagggcactacgaaaatcaatacatttaactggtcaaaggtgcgcaaattgtcattcaagcgtaagcggttccttataaaacttcatcctgaagtccacggcccttatcaggacaccctggaattcctgctgggctcacgggacgagtgcaaaaatttctggaagatctgcgttgaatatcatacattctttcgcctgctcgatcagcccaagccgaaggccaaagcagtgttcttcagtaggggcagttcttttaggtactctgggcggacccagaagcagttggtggactacttcaaggactctggaatgaagcgcatcccatacgagcgtaggcactctaagacacatacttcagtgagggcactaaccgcggacttaccgaagcagagtatctcatttcctgagggcctgagaacgccagcttccccttctagcgctaacgctttttatagcttgtcgccatctacgctggtcccatccggtctacccgaattcaaagactccagcagttctctaaccgatcctcaagtgagctatgtcaagtcaccagcggcagaacgccggtcaggagcagtggctggcgggccagacaccccctctgcgcagcccctagggcccccagcactgcagcctgggccaggtctgtcgactaaaagcccacagcctagcccaagttcaagaaagtcacctctgtcattgtcccctgccttccaggtgcccctcggtcccgcggagcaggggtcttctccattactatcacctgtgctgagcgatgcagggggagccggaatggattgtgaggagccaagacataagcgagtgcccgctgatgaagcctactttatcgtgaaggagattttagctacggagcggacgtatttaaaggacttagaggtaatcactgtctggttcagatcggccgtggtgaaagaagatgcaatgcctgcaaccctgatgacacttttgttttctaatatcgatccaatatatgaattccaccggggattcttgcgggaagtcgagcagcggttagcactttgggaaggaccaagtaaagcccacacaaaggggagccaccagagaatcggcgacattcttctgaggaatatgaggcagctaaaagttttccaactgcatgagggccacgtggcaggggtcacaaaaatggagtag

SEQ ID NO: 103159 - DNA, 1944 bp, Artificial Sequence
  derived and/or modified sequence
atgggagaaattgagggcacctacagagtgctgcagacagctggcatgaggctgggcgcccagacccctgtgggcgtgtccaccctggagcccggccagaccctgctgcccaggatgcaggagaagcacctgcacctgcgggtgaagctgctggacaacaccatggagatctttgacatcgagcccaagtgtgatggccaggtgctgctgacccaggtgtggaagaggctgaacctggtggagtgtgactacttcggcatggagttccagaacacccagagctactggatctggctggagcccatgaagcccatcatccggcagatccggcggcccaagaatgtggtgctgcggctggccgtgaagttcttccccccagaccccggccagctgcaggaggagtacacccgctacctgtttgccctgcagctgaagagggacctgctggaggagcggctgacctgtgccgacaccacagctgccctgctgaccagccacctgctgcagagcgagatcggggactatgatgagaccctggaccgggagcacctgaaggtgaatgagtacctgcccggccagcagcactgcctggagaagatcctggagttccaccagaagcacgtgggccagaccccagctgagagtgacttccaggtgctggagatcgccaggaagctggagatgtatggcatccgcttccacatggccagtgaccgggagggcaccaagatccagctggccgtgagccacatgggcgtgctggtgttccagggcaccaccaagatcaacaccttcaactggagcaaggtgaggaagctgtccttcaagaggaagcgcttcctgatcaagctgcaccctgaggtgcacggcccctaccaggacaccctggagttcctgctgggcagcagagatgagtgcaagaacttctggaagatctgtgtggagtaccacaccttcttccggctgctggaccagcccaagcccaaggccaaggctgtgttcttcagccggggcagcagcttccgctacagcggccgcacccagaagcagctggtggactacttcaaggacagcggcatgaagaggatcccctatgaaagaagacacagcaagacccacacctctgtgcgggccctgacagctgacctgcccaagcagagcatctccttccctgagggcctgcggaccccagccagccccagcagcgccaatgccttctacagcctgagccccagcaccctggtgcccagcggcctgcctgagttcaaggacagcagcagcagcctgacagacccccaggtgtcctatgtgaagagccctgctgctgagcggcgcagcggggctgtggccggcggccctgacaccccatctgcccagcccctgggccccccagccctgcagcccggccctggcctgagcaccaagagcccccagcccagccccagcagcaggaagagccccctgagcctgagccctgccttccaggtgcccctgggccctgctgagcagggcagcagccccctgctgagccctgtgctgagtgatgctgggggcgccggcatggactgtgaggagcccaggcacaagagggtgcctgcagatgaggcctacttcatcgtgaaggagatcctggccacagagaggacctacctgaaggacctggaggtgatcaccgtgtggttccgctctgctgtggtgaaggaggatgccatgcctgccaccctgatgaccctgctcttcagcaacatcgaccccatctatgagttccaccggggcttcctgcgggaggtggagcagaggctggccctgtgggagggccccagcaaggcccacaccaagggcagccaccagagaattggagacatcctgctgaggaacatgaggcagctgaaggtgttccagctgcacgagggccacgtggccggcgtgaccaagatggagtag

SEQ ID NO: 103160 - DNA, 1944 bp, Artificial Sequence
  derived and/or modified sequence
atgggcgagatcgagggcacctaccgggtgctgcagaccgccggcatgcgtttgggagctcagacccctgtgggggtcagcaccctggagcctggccaaactttgctgcctcgtatgcaggagaagcatcttcatctccgcgtgaagcttttagacaataccatggagatcttcgacatcgaaccaaaatgtgatggccaggtgctgctcacccaggtctggaaacgactgaatctagtggagtgcgactatttcggtatggagttccaaaacacacagagttactggatatggctggaacctatgaaacctatcatccgccagatccgccggcctaagaacgttgtgctgaggctggccgtgaagttcttcccacccgaccccggccaactgcaggaagagtacaccaggtacttattcgctctgcagttgaaacgcgacctgctggaggagaggcttacctgtgccgataccactgccgcgctcctgacgagccacctgctgcagagcgagatcggagactatgatgaaactctcgaccgtgaacacctaaaggttaatgaatacctccccgggcagcagcactgcctggaaaaaatccttgaattccaccagaagcacgtaggtcaaacgccggccgagtccgatttccaggttctggagattgcgagaaagttggaaatgtacggtattcgatttcatatggcctctgatcgcgaggggactaagattcagctagccgtgagtcacatgggcgttctcgtgtttcagggaaccacaaaaatcaatacatttaactggagcaaggtgagaaagctctcatttaagcgcaaacggtttctcatcaaattgcatccggaggtacacggcccttaccaggacactctagaatttcttctcgggtccagagatgagtgcaagaatttctggaaaatctgcgtagagtaccacaccttcttcagactcctggaccagccgaaacctaaggcgaaagccgtcttcttctcccggggcagctcttttaggtacagcggtcgcacccagaagcagctcgtcgattacttcaaggattcaggcatgaagaggatcccatatgagagaaggcatagcaagacacataccagtgtgcgagccctcaccgccgatttgcctaagcaaagtatctcgttccccgaaggcctgcggactcccgcttcccccagttccgccaatgccttttattctctgagtccgagcactctggtgccatccggacttcccgaattcaaggatagttcttccagtctcacagaccctcaggtgagttatgttaagtcccctgcagctgaaagacgttcaggcgcagtggcaggcgggccagacactcccagcgcacagcctttaggaccacccgcactgcagcctggacccggtttgtccactaaatccccgcagcccagtccatcttcgcggaaatcccccctctctctctcacccgccttccaagtgccactgggccccgctgaacaaggtagctccccattactgtcacccgtgctttcagatgccgggggcgccggtatggattgcgaggaaccaaggcacaaaagagtgccagccgatgaggcctattttattgtgaaggagatcctcgcaacagagagaacataccttaaggacctggaggttattaccgtctggttccggagtgcagtcgtcaaggaagacgccatgcccgccacacttatgacgctgctcttctccaacattgatccgatatatgaatttcaccgtggcttcctacgcgaagtggaacagcgcctagccctctgggagggaccttcaaaggcacacacgaaggggtcccatcaaaggataggtgatatactgctgaggaacatgagacagttgaaagtgtttcaactgcacgagggacatgtcgccggcgtcacgaaaatggagtag

SEQ ID NO: 103161 - DNA, 1944 bp, Artificial Sequence
  derived and/or modified sequence
atgggggagattgagggcacatatcgggtgcttcaaaccgccggaatgaggctaggcgcacaaaccccagtcggggtgagcacacttgaaccgggacagacacttctacccagaatgcaggagaagcatctccatctcagagtaaagcttctagacaacaccatggaaatttttgatatcgagccgaaatgcgacgggcaggttcttttaactcaggtttggaagcggctcaaccttgtggaatgcgactacttcggaatggaatttcagaatacccaaagctattggatttggctcgagcctatgaagcccattattagacaaatccgcaggcccaagaacgtcgtgttacggctcgcagttaagttctttccgcctgatccaggtcaactacaggaagaatatacccgctacttgtttgccctgcagctgaagagagacctgctggaagaaagactgacttgtgcagacactactgccgcattgctcacaagtcacctgctgcagtctgaaatcggcgactatgatgagacgttggacagagagcacctgaaggtcaatgaatatctgcccggacaacagcattgcctggagaagattcttgagtttcaccagaagcacgtcgggcaaacccctgctgagtccgacttccaggtcttggaaatcgctcgaaagctcgagatgtacggaatacgcttccatatggcctctgacagagaaggcactaagatacagctcgctgtgagccatatgggcgtactggtgttccagggtactaccaagatcaacacctttaactggtcaaaagtgaggaagcttagcttcaagagaaaacgttttctgattaaactccatccggaggtgcacggaccctaccaggatactttggagttcctgttgggaagtagagatgagtgtaaaaatttctggaaaatatgcgttgagtatcataccttttttaggttgctggaccaaccaaagcctaaggcaaaggccgtttttttctccaggggttcaagttttagatatagtgggaggacacagaaacagctggtcgactacttcaaagactcagggatgaagcgcataccctatgagagaaggcactcaaaaacccatacctccgtgcgggctttaaccgctgacctgccaaagcagtctatctcctttccagagggcctgagaacgccagccagtccatcaagcgcgaacgccttctacagcctgtcaccgtccaccctggttcctagcggcctgccagaatttaaagacagttcgtccagtcttaccgaccctcaggtcagttacgttaagtctcccgcagctgaacgaagaagtggggcagtggctggagggccagatacaccatccgctcagcccctggggccaccggctcttcaacccggtcctgggctgtcaaccaaatctccccagccttcccctagctcaaggaagagccctttatctctctccccagcttttcaggtgccactggggccagcggagcaggggtcaagtccgctgctgtcccctgttctctcagacgcgggaggagctggcatggactgcgaggagccacgccataagagagtgccggcagacgaggcatactttatagttaaggaaatcctggcgaccgaaaggacttatctcaaggacctcgaggtgataactgtctggttccgatctgcggttgttaaagaagacgctatgccggctacacttatgacactgttattctccaacattgatccaatctacgaattccatcgaggctttctgcgggaagttgaacagaggcttgccctgtgggagggtccatctaaggcgcacaccaaaggatctcaccagcgaatcggggacatcctgctcagaaacatgagacagctgaaggtcttccagctgcacgaagggcacgtggcaggcgtcaccaaaatggaatag

SEQ ID NO: 103162 - protein, 93 aa, Artificial Sequence
  derived and/or modified sequence
MGEIEGTYRVLQTAGMRLGAQTPVGVSTLEPGQTLLPRMQEKHLHLRVKLLDNTMEIFDIEPKCDGQVLLTQVWKRLNLVECDYFGMEFQNTQ

SEQ ID NO: 103163 - protein, 638 aa, Artificial Sequence
  derived and/or modified sequence
MGEIEGTYRVLQTAGMRLGAQTPVGVSTLEPGQTLLPRMQEKHLHLRVKLLDNTMEIFDIEPKCDGQVLLTQVWKRLNLVECDYFGMEFQNTQSYWIWLEPMKPIIRQIRRPKNVVLRLAVKFFPPDPGQLQEEYTRYLFALQLKRDLLEERLTCADTTAALLTSHLLQSEIGDYDETLDREHLKVNEYLPGQQHCLEKILEFHQKHVGQTPAESDFQVLEIARKLEMYGIRFHMASDREGTKIQLAVSHMGVLVFQGTTKINTFNWSKVRKLSFKRKRFLIKLHPEVHGPYQDTLEFLLGSRDECKNFWKICVEYHTFFRLLDQPKPKAKAVFFSRGSSFRYSGRTQKQLVDYFKDSGMKRIPYERRHSKTHTSVRALTADLPKQSISFPEGLRTPASPSSANAFYSLSPSTLVPSGLPEFKDSSSSLTDPQVSYVKSPAAERRSGAVAGGPDTPSAQPLGPPALQPGPGLSTKSPQPSPSSRKSPLSLSPAFQVPLGPAEQGSSPLLSPVLSDAGGAGMDCEEPRHKRVPADEAYFIVKEILATERTYLKDLEVITVWFRSAVVKEDAMPATLMTLLFSNIDPIYEFHRGFLREVEQRLALWEGPSKAHTKGSHQRIGDILLRNMRQLKAAHEFTT

SEQ ID NO: 103164 - DNA, 405 bp, Artificial Sequence
  derived and/or modified sequence
atgggcgagatcgagggcacctacagagtgctgcagaccgccggcatgagactgggcgcccagacccccgtgggcgtgagcaccctggagcccggccagaccctgctgcccagaatgcaggagaagcacctgcacctgagagtgaagctgctggacaacaccatggagatcttcgacatcgagcccaagtgcgacggccaggtgctgctgacccaggtgtggaagagactgaacctggtggagtgcgactacttcggcatggagttccagaacacccagagctactggatctggctggagcccatgaagcccatcatcagacagatcagaagacccaagaacgtggtgctgagactggccgtgaagttcttcccccccgaccccggccagctgcaggaggagtag

SEQ ID NO: 103165 - DNA, 282 bp, Artificial Sequence
  derived and/or modified sequence
atgggcgagatcgagggcacctacagagtgctgcagaccgccggcatgagactgggcgcccagacccccgtgggcgtgagcaccctggagcccggccagaccctgctgcccagaatgcaggagaagcacctgcacctgagagtgaagctgctggacaacaccatggagatcttcgacatcgagcccaagtgcgacggccaggtgctgctgacccaggtgtggaagagactgaacctggtggagtgcgactacttcggcatggagttccagaacacccagtag

SEQ ID NO: 103166 - DNA, 1917 bp, Artificial Sequence
  derived and/or modified sequence
atgggcgagatcgagggcacctacagagtgctgcagaccgccggcatgagactgggcgcccagacccccgtgggcgtgagcaccctggagcccggccagaccctgctgcccagaatgcaggagaagcacctgcacctgagagtgaagctgctggacaacaccatggagatcttcgacatcgagcccaagtgcgacggccaggtgctgctgacccaggtgtggaagagactgaacctggtggagtgcgactacttcggcatggagttccagaacacccagagctactggatctggctggagcccatgaagcccatcatcagacagatcagaagacccaagaacgtggtgctgagactggccgtgaagttcttcccccccgaccccggccagctgcaggaggagtacaccagatacctgttcgccctgcagctgaagagagacctgctggaggagagactgacctgcgccgacaccaccgccgccctgctgaccagccacctgctgcagagcgagatcggcgactacgacgagaccctggacagagagcacctgaaggtgaacgagtacctgcccggccagcagcactgcctggagaagatcctggagttccaccagaagcacgtgggccagacccccgccgagagcgacttccaggtgctggagatcgccagaaagctggagatgtacggcatcagattccacatggccagcgacagagagggcaccaagatccagctggccgtgagccacatgggcgtgctggtgttccagggcaccaccaagatcaacaccttcaactggagcaaggtgagaaagctgagcttcaagagaaagagattcctgatcaagctgcaccccgaggtgcacggcccctaccaggacaccctggagttcctgctgggcagcagagacgagtgcaagaacttctggaagatctgcgtggagtaccacaccttcttcagactgctggaccagcccaagcccaaggccaaggccgtgttcttcagcagaggcagcagcttcagatacagcggcagaacccagaagcagctggtggactacttcaaggacagcggcatgaagagaatcccctacgagagaagacacagcaagacccacaccagcgtgagagccctgaccgccgacctgcccaagcagagcatcagcttccccgagggcctgagaacccccgccagccccagcagcgccaacgccttctacagcctgagccccagcaccctggtgcccagcggcctgcccgagttcaaggacagcagcagcagcctgaccgacccccaggtgagctacgtgaagagccccgccgccgagagaagaagcggcgccgtggccggcggccccgacacccccagcgcccagcccctgggcccccccgccctgcagcccggccccggcctgagcaccaagagcccccagcccagccccagcagcagaaagagccccctgagcctgagccccgccttccaggtgcccctgggccccgccgagcagggcagcagccccctgctgagccccgtgctgagcgacgccggcggcgccggcatggactgcgaggagcccagacacaagagagtgcccgccgacgaggcctacttcatcgtgaaggagatcctggccaccgagagaacctacctgaaggacctggaggtgatcaccgtgtggttcagaagcgccgtggtgaaggaggacgccatgcccgccaccctgatgaccctgctgttcagcaacatcgaccccatctacgagttccacagaggcttcctgagagaggtggagcagagactggccctgtgggagggccccagcaaggcccacaccaagggcagccaccagagaatcggcgacatcctgctgagaaacatgagacagctgaaggccgcccacgagttcaccacctag

SEQ ID NO: 103167 - DNA, 456 bp, Artificial Sequence
  derived and/or modified sequence
acaataactgtttgggctggtggcgagagtgttttcttcactcatggtgaagaatgggggagatagaaggaacatacagagtcctgcagactgcagggatgcgcttgggtgcccagacccctgtgggagttagcacccttgagcctgggcagactctcttgcccagaatgcaagagaagcacctgcacctcagagtaaagctgctggacaacaccatggaaatatttgacattgagcctaaatgcgatggccaggtattactgacacaagtgtggaagcgtttaaacctggtagaatgtgactacttcgggatggagtttcaaaatactcagtcctactggatttggcttgaacctatgaaacccatcattaggcaaatacgaaggccaaagaatgtggtgcttcgcctagctgtaaaattttttccacctgatcctggtcagctacaagaagaat

SEQ ID NO: 103168 - DNA, 538 bp, Artificial Sequence
  derived and/or modified sequence
agcatctggaaatattgttattgagggtggtgcttgttattttatgctccacctatgagtgcctgagtagaaaataatcttttgtaacactttcttttgacgtgattaagactcacagaagttgcagtaatagtacagaggattcccgtgtctccgataatttgtcttttaccttgttttagtacctaaataatgtgataattccttcatgtggtttttttttttttcattttagtgttttcttcactcatggtgaagaatgggggagatagaaggaacatacagagtcctgcagactgcagggatgcgcttgggtgcccagacccctgtgggagttagcacccttgagcctgggcagactctcttgcccagaatgcaagagaagcacctgcacctcagagtaaagctgctggacaacaccatggaaatatttgacattgagcctaaatgcgatggccaggtattactgacacaagtgtggaagcgtttaaacctggtagaatgtgactacttcgggatggagtttcaaaatactcag

SEQ ID NO: 103169 - DNA, 2122 bp, Artificial Sequence
  derived and/or modified sequence
gggagcaggcgacgccgacgcgagtctggcggctgctgcttgcgactgcggaggccgggcgaggccggtgaggacgcggcgggcgagcgagaggccgaggtgttttcttcactcatggtgaagaatgggggagatagaaggaacatacagagtcctgcagactgcagggatgcgcttgggtgcccagacccctgtgggagttagcacccttgagcctgggcagactctcttgcccagaatgcaagagaagcacctgcacctcagagtaaagctgctggacaacaccatggaaatatttgacattgagcctaaatgcgatggccaggtattactgacacaagtgtggaagcgtttaaacctggtagaatgtgactacttcgggatggagtttcaaaatactcagtcctactggatttggcttgaacctatgaaacccatcattaggcaaatacgaaggccaaagaatgtggtgcttcgcctagctgtaaaattttttccacctgatcctggtcagctacaagaagaatatacaagatacttgtttgccttgcaacttaagagagacctgctggaagagcgtttgacctgtgctgacaccacagcggcccttctcacgtcccatctcctgcagtcggaaataggagattacgatgaaacgctggaccgagagcacctcaaagtgaacgagtatttgcctggccagcagcactgccttgagaagatactagaattccatcagaagcacgtgggccagacacctgctgagtcggatttccaggtgctcgaaattgctcgaaagttggaaatgtacggcatcagatttcacatggcttctgacagggaaggaaccaagattcaactggcagtttcccacatgggtgtactcgtgttccagggcaccaccaaaatcaacactttcaactggtccaaggtccgtaaactaagcttcaagaggaaaagatttcttatcaaacttcatccagaggttcatggaccttaccaggacacattagaatttttgttgggtagtagagatgaatgtaagaacttctggaagatttgtgtggagtatcacaccttttttagacttttggaccaacctaagccaaaagcaaaagccgtcttcttcagccggggctcctccttcagatacagtggaagaactcagaaacaactagtagattatttcaaagacagtggaatgaagagaattccatatgaaagaaggcacagcaagacccacacgtccgttcgagctctgactgcagacctaccaaaacagagcatctcattccccgagggattgaggactcctgcctccccatcttcagcgaatgccttttactcgctctctccctccactctggtcccctctggcctgccagagtttaaggacagcagcagctccctcacagatccccaggtttcctacgtcaagagtccagctgcagagaggcgcagtggagcagtggctggaggccccgacacaccatcggcccagcccctcgggccccccgcactccagcctggtccaggcctttccacgaagagtcctcagccttctccctccagccggaagagccccctgagtctgagccctgcatttcaggtgcctttgggcccagctgaacagggctcatccccactcctgagccctgtcctcagtgatgctggcggagccgggatggactgcgaggagcccagacacaagcgcgtgcctgcagacgaggcctacttcatagtcaaagagattctcgctacagaacgaacatacctcaaggatttagaagttattaccgtgtggttccgcagcgcagtggtgaaggaggacgccatgcctgcgactctgatgacgctgctcttctccaacatcgatcccatctatgagttccacagaggcttcctgcgcgaggtggagcagaggctggcactctgggaagggccctccaaagcccacacaaaaggcagtcatcaacgaatcggggacatcctgctcaggaacatgcgccagttaaaggctgctcatgagttcaccacgtgaccgcccaaggtgtggagctctgcataacaccatgaagctgagccacagtgacgacgacgactcaagctccccctcctccat

SEQ ID NO: 103170 - DNA, 405 bp, Artificial Sequence
  derived and/or modified sequence
atgggagagattgaaggaacttacagagtgctccagacagccggcatgcggctgggcgcacaaacacctgttggagtttcaacactcgagcccggacagaccctcctgcctaggatgcaggagaagcatctccatctgcgcgtgaaacttctggacaacaccatggagattttcgacatcgaacccaaatgcgatggacaagtactgctgacacaggtctggaaaagactgaatctcgtcgagtgcgattatttcgggatggaattccaaaatacacaaagctactggatctggcttgaaccgatgaaacccattattcgtcagatccgaagacccaaaaacgttgttttgcgactagctgtcaagttctttcctcccgatcccggacagttgcaagaagagtag

SEQ ID NO: 103171 - DNA, 282 bp, Artificial Sequence
  derived and/or modified sequence
atgggagagattgagggcacgtaccgcgtgctgcaaacagcaggcatgcggctgggcgcacagacccctgttggtgtcagtaccttggagcccggacagaccttattgccccggatgcaagagaagcaccttcatctgcgagtgaaactgctggacaatactatggaaatttttgatatcgagcctaaatgcgacggtcaagttctgctcacgcaagtttggaaacgcctgaatttggtggagtgcgactactttgggatggaatttcagaacacacagtag

SEQ ID NO: 103172 - DNA, 1917 bp, Artificial Sequence
  derived and/or modified sequence
atgggggaaattgagggaacttatagggtcctgcagactgccgggatgcgtctcggagcccagacacccgtcggggtgtccaccctggagcctggtcaaacactgctaccaaggatgcaggaaaagcatctacacctgagggtgaagctgttggacaataccatggagatctttgacatcgagccaaagtgcgacggccaggtgttgctgacccaggtctggaagaggttaaacctcgtggaatgcgattacttcggcatggagttccaaaatactcagagctactggatctggctggagcctatgaagcccattattcgccagattagaagaccaaaaaatgtcgtgcttcgactggccgtgaagttttttccgcccgaccctgggcaactgcaagaagaatatacccgatacctgtttgctctgcaactgaagagagatctgctggaggagaggctgacatgcgcagacaccacggccgccctcctaacatctcacctactgcagagcgagatcggcgactatgacgagaccttagatcgtgagcatctaaaggtgaatgagtatctccctggacagcagcactgtctcgagaagattcttgagttccaccaaaaacatgtggggcagacaccagccgaaagtgattttcaggtgctggaaattgcccgcaagctggagatgtacggcattaggttccacatggcttccgacagggaggggaccaagatacagctggcagtcagccacatgggcgtgttggtcttccagggcacaacaaagatcaacacctttaactggtcaaaggtaaggaagctgtccttcaagcgcaaacgatttctgattaagcttcacccagaggtgcatggcccgtatcaggatactctagaattcctcctgggctcccgcgacgaatgcaagaacttctggaaaatatgtgtagagtatcacaccttcttccgcctactggaccagcccaagcccaaggccaaagccgtgttcttctcacgaggatcgtctttccgctatagcggtcggacacaaaaacagttggttgactactttaaggacagtggaatgaaacgcatcccatatgagcgcagacattctaagacacacacatcagttagagcactgacagctgacttaccaaaacagagcataagtttccccgagggactgaggactccggccagcccatcatccgccaacgcattttacagtctatctcccagcacattagtcccatcaggcctgcccgagttcaaggattcgtcttcgtcactgacggaccctcaagtttcctacgttaagtcgcctgccgcagagcgacgctctggagcggtggccggggggcccgacacaccaagtgcccagcccctgggccctccggctctgcagccaggtcctgggctgtccaccaagtcaccccagccgtcaccttcatcacggaaatccccattgtcactgtcacctgcattccaggtacccttaggccctgccgaacagggatcctcacccctgctgtcgcctgtgctgagcgatgccggaggggccgggatggattgtgaagaacctcgccacaaacgcgtccccgctgacgaagcctacttcattgtcaaggaaatactggctacggaaagaacgtacttaaaggatctcgaggtgatcacagtatggttcagatcggctgtcgtcaaggaagatgctatgcccgcaacgctgatgacactgttgtttagcaatattgatccgatctatgaatttcaccgcggatttctgagggaagtagagcagagactcgctctgtgggaaggcccaagtaaagcgcacaccaaaggctcccatcagagaatcggtgatattctgctgagaaacatgagacaactgaaagcggctcatgaatttacgacttag

SEQ ID NO: 103173 - DNA, 405 bp, Artificial Sequence
  derived and/or modified sequence
atgggagaaattgagggcacctacagagtgctgcagacagctggcatgaggctgggcgcccagacccctgtgggcgtgtccaccctggagcccggccagaccctgctgcccaggatgcaggagaagcacctgcacctgcgggtgaagctgctggacaacaccatggagatctttgacatcgagcccaagtgtgatggccaggtgctgctgacccaggtgtggaagaggctgaacctggtggagtgtgactacttcggcatggagttccagaacacccagagctactggatctggctggagcccatgaagcccatcatccggcagatccggcggcccaagaatgtggtgctgcggctggccgtgaagttcttccccccagaccccggccagctgcaggaggagtag

SEQ ID NO: 103174 - DNA, 282 bp, Artificial Sequence
  derived and/or modified sequence
atgggagaaattgagggcacctacagagtgctgcagacagctggcatgaggctgggcgcccagacccctgtgggcgtgtccaccctggagcccggccagaccctgctgcccaggatgcaggagaagcacctgcacctgcgggtgaagctgctggacaacaccatggagatctttgacatcgagcccaagtgtgatggccaggtgctgctgacccaggtgtggaagaggctgaacctggtggagtgtgactacttcggcatggagttccagaacacccagtag

SEQ ID NO: 103175 - DNA, 1917 bp, Artificial Sequence
  derived and/or modified sequence
atgggagaaattgagggcacctacagagtgctgcagacagctggcatgaggctgggcgcccagacccctgtgggcgtgtccaccctggagcccggccagaccctgctgcccaggatgcaggagaagcacctgcacctgcgggtgaagctgctggacaacaccatggagatctttgacatcgagcccaagtgtgatggccaggtgctgctgacccaggtgtggaagaggctgaacctggtggagtgtgactacttcggcatggagttccagaacacccagagctactggatctggctggagcccatgaagcccatcatccggcagatccggcggcccaagaatgtggtgctgcggctggccgtgaagttcttccccccagaccccggccagctgcaggaggagtacacccgctacctgtttgccctgcagctgaagagggacctgctggaggagcggctgacctgtgccgacaccacagctgccctgctgaccagccacctgctgcagagcgagatcggggactatgatgagaccctggaccgggagcacctgaaggtgaatgagtacctgcccggccagcagcactgcctggagaagatcctggagttccaccagaagcacgtgggccagaccccagctgagagtgacttccaggtgctggagatcgccaggaagctggagatgtatggcatccgcttccacatggccagtgaccgggagggcaccaagatccagctggccgtgagccacatgggcgtgctggtgttccagggcaccaccaagatcaacaccttcaactggagcaaggtgaggaagctgtccttcaagaggaagcgcttcctgatcaagctgcaccctgaggtgcacggcccctaccaggacaccctggagttcctgctgggcagcagagatgagtgcaagaacttctggaagatctgtgtggagtaccacaccttcttccggctgctggaccagcccaagcccaaggccaaggctgtgttcttcagccggggcagcagcttccgctacagcggccgcacccagaagcagctggtggactacttcaaggacagcggcatgaagaggatcccctatgaaagaagacacagcaagacccacacctctgtgcgggccctgacagctgacctgcccaagcagagcatctccttccctgagggcctgcggaccccagccagccccagcagcgccaatgccttctacagcctgagccccagcaccctggtgcccagcggcctgcctgagttcaaggacagcagcagcagcctgacagacccccaggtgtcctatgtgaagagccctgctgctgagcggcgcagcggggctgtggccggcggccctgacaccccatctgcccagcccctgggccccccagccctgcagcccggccctggcctgagcaccaagagcccccagcccagccccagcagcaggaagagccccctgagcctgagccctgccttccaggtgcccctgggccctgctgagcagggcagcagccccctgctgagccctgtgctgagtgatgctgggggcgccggcatggactgtgaggagcccaggcacaagagggtgcctgcagatgaggcctacttcatcgtgaaggagatcctggccacagagaggacctacctgaaggacctggaggtgatcaccgtgtggttccgctctgctgtggtgaaggaggatgccatgcctgccaccctgatgaccctgctcttcagcaacatcgaccccatctatgagttccaccggggcttcctgcgggaggtggagcagaggctggccctgtgggagggccccagcaaggcccacaccaagggcagccaccagagaattggagacatcctgctgaggaacatgaggcagctgaaggccgcccacgagttcaccacctag

SEQ ID NO: 103176 - DNA, 405 bp, Artificial Sequence
  derived and/or modified sequence
atgggcgagatcgagggcacctaccgggtgctgcagaccgccggcatgcggttgggcgcacagacacctgtcggagtgagtacactggagcctggtcagacactcctacctaggatgcaggagaagcatcttcacctgagggtaaagcttttagataacactatggaaatcttcgacattgaacctaagtgtgacggacaggtgctactgacccaagtttggaagcgccttaatctggtagagtgcgactatttcggaatggaatttcaaaatacccagtcttattggatctggcttgaaccaatgaaacccataatcagacaaatcaggaggcccaagaacgtagtgcttagactggcggtgaagttctttcccccagaccccgggcagctgcaggaagagtag

SEQ ID NO: 103177 - DNA, 282 bp, Artificial Sequence
  derived and/or modified sequence
atgggcgagatcgagggcacctaccgggtgctgcagaccgccggcatgagactgggtgcccagactccagtgggtgtaagcactctggaaccaggccagaccctgcttccaagaatgcaggagaagcacctacacctgcgcgtgaaactgctagataacacaatggaaatcttcgacattgagccaaagtgcgatggccaagtcctgctgacccaggtctggaagaggcttaacttagtggagtgcgactatttcgggatggagtttcagaacacgcagtag

SEQ ID NO: 103178 - DNA, 1917 bp, Artificial Sequence
  derived and/or modified sequence
atgggcgagatcgagggcacctaccgggtgctgcagaccgccggcatgagattgggtgcccagacacctgtgggagtttcaactctggagcccggccagaccctactacctaggatgcaggaaaaacacctccacctgcgggtgaagctgctggataacactatggagattttcgatatagagcccaaatgcgacggccaagtgcttctcacacaggtgtggaaaaggcttaacctcgtggagtgtgattatttcggcatggagtttcaaaatacacaaagctactggatctggctggagccaatgaaacctatcatccgccaaatccgacgtccaaagaatgtggttctgagattggccgtcaagtttttcccccccgatccagggcagctccaggaggagtacacacggtaccttttcgctctccagttaaagcgggacctgctagaggagaggcttacctgcgctgatacaactgctgctcttcttactagccacctccttcagagcgaaattggggactatgacgagaccctggatagagaacatctcaaggtcaacgaataccttcccggacagcagcactgcttagagaagattctggagttccatcaaaaacacgttggccagacgcccgctgagtcagacttccaggttctggaaattgcccgcaagttggaaatgtatggcattagatttcacatggccagcgacagggagggcaccaagatacagttggcggtgagtcacatgggagttctcgtctttcaggggaccactaagattaacaccttcaattggagcaaagtgcgcaagcttagctttaagcggaagagattcttgattaagctgcatcccgaagtgcacggtccataccaggacactttggagtttctgcttgggtcaagggatgagtgtaaaaacttctggaagatctgcgtggagtatcataccttttttaggctgttagatcagccaaaacccaaggccaaggcagtatttttcagtcgcggatcgtcattccggtattctgggagaacgcaaaaacagctcgtggattatttcaaggactctggcatgaagcgcataccctacgaacgacgccactccaagactcatacctctgtcagggcactgacagccgatttgcctaagcaatccatttcctttccagagggtttaagaacccccgcttctccttctagcgccaacgcgttttactccctaagcccctcaaccctcgtaccttccggcctacccgaattcaaagacagctcctcctccttaaccgatccccaggtgtcatacgtgaagagccccgccgccgaacgcagaagcggcgccgtcgccggcgggcccgatacacctagcgcccagccacttggccccccagcactgcaacctggacctgggctgagcactaagagccctcagccctccccttcatcaagaaaatccccgctatctttatccccagccttccaggtccccctagggcccgctgaacaaggctctagccccttactcagtccagtgctgagtgacgccgggggagcggggatggactgtgaagagccccgccacaagcgcgtccccgccgatgaggcttattttatcgttaaagagattttggctacagaacgaacatatctgaaagacctggaggttataactgtctggttccgatcagcagtcgtgaaggaagatgcaatgcctgccactttgatgacactcctgttctcaaacatcgatcctatatatgagtttcatagagggtttctacgggaagtggaacagcgtttggccctgtgggaggggccatctaaagcccacacaaaggggtcacatcaaagaataggggacatactcctgaggaatatgagacagctgaaagcagctcatgaatttactacatag

SEQ ID NO: 103179 - DNA, 405 bp, Artificial Sequence
  derived and/or modified sequence
atgggagagatagagggaacttaccgggtccttcagacagcgggaatgcggctgggcgcacagaccccagttggtgttagcactctggagccaggccagaccctactaccccgaatgcaggagaaacatctacacctccgcgtgaagttacttgataatacgatggaaatcttcgatattgaacctaagtgcgatggtcaggtcctcctgacccaggtatggaaacgtctgaatctggtcgaatgtgattattttggaatggagtttcaaaacactcagtcttactggatctggcttgaacctatgaagccaattatcagacagatccgcagacctaagaatgtagtcttacgattagcggtcaaattcttcccaccagatcctggccagctacaagaggagtag

SEQ ID NO: 103180 - DNA, 282 bp, Artificial Sequence
  derived and/or modified sequence
atgggcgaaatcgaaggaacttaccgcgtgttacagacagctgggatgcgtttgggcgcacaaactcctgtcggagtgagcactttggagcctgggcagaccctgttaccgagaatgcaggagaagcacttgcatctgagggttaaactgttagataataccatggagatatttgatatcgagccaaaatgcgacggccaggtgctgctcacgcaggtctggaagaggcttaacctggttgagtgcgattacttcggaatggaattccagaacactcagtag

SEQ ID NO: 103181 - DNA, 1917 bp, Artificial Sequence
  derived and/or modified sequence
atgggagaaatcgaaggcacttacagggtgctgcagacagccggtatgaggctgggcgcacagaccccagtgggcgtcagtacactcgaaccagggcaaacattgttgcccagaatgcaggagaagcacctacacctccgggtgaagcttctcgataatactatggaaatttttgacatcgaacccaagtgtgacgggcaggttttgctgacccaagtatggaaacggctgaatctggtggagtgcgattatttcggaatggaatttcagaacacccagagttattggatctggctggagcctatgaagccaatcatcaggcagattcgcagaccaaagaacgtggtcttgcgtcttgccgtaaagttctttccacctgatcctggacagctccaggaggaatataccagatacctgttcgcactgcaactgaaacgggacctcctggaggagcggttaacttgtgcagacaccacggctgccctcctcaccagccatctgcttcagtcagaaatcggcgactacgacgaaacactcgacagagagcatctcaaggtgaatgagtacttacctggccaacaacactgtctcgagaaaattctggagtttcaccaaaagcacgtagggcagactccggctgaaagcgatttccaggttctggagatcgcgcgaaaactggaaatgtatggaatccggtttcacatggctagcgaccgggagggcactaaaatccaacttgctgtgagtcacatgggcgtattggtgttccagggcacaacaaagattaacacgttcaactggagcaaagtaagaaagctcagctttaaaaggaagcgcttcctgattaaactgcacccagaggtgcatggaccttaccaggatacgctcgaatttctgctaggatctcgggacgaatgtaaaaatttctggaagatctgtgtggagtatcacaccttcttccggcttctagatcagcccaagccaaaggcaaaagcagtgttcttttcccgcggatcctcttttcgctactccggcagaacccaaaagcagttggttgattacttcaaagattctggtatgaagagaatcccctacgagcgtcgtcactcaaagactcatacgtccgtccgagctctcacggccgatttgccaaagcagagcatttcattccccgaggggcttcgcaccccggcaagcccaagcagcgccaacgccttttactccctcagcccgagcaccctggtcccatctggattgccagagttcaaagatagtagttcaagcttgaccgatccacaagtgtcatacgtgaaatcccccgctgccgagaggcggagcggagcagtggccggtggccctgacactccctcagcccagcctctggggcctccagctttgcaacctgggccaggccttagcaccaagagtccacagccttcaccttctagtcgcaagagccccctgtcccttagtcctgctttccaggtgcctttaggtcctgcagaacagggaagcagtcccctgcttagccccgtccttagcgacgccggaggagctgggatggactgtgaggagccacgccacaaaagagtgcctgcagatgaggcctacttcattgttaaggaaatccttgctaccgagaggacttatctcaaggacttggaagtgatcacagtgtggttcagatctgccgttgtgaaagaagatgctatgccagccactctaatgactctccttttcagcaatatcgatccaatctacgagtttcaccgaggattcttgcgggaggtggagcagagattggcactgtgggagggcccttccaaagcccatacaaaaggaagccaccagaggatcggtgacattcttttaaggaatatgaggcagctgaaggccgctcacgaatttaccacatag

SEQ ID NO: 103182 - DNA, 636 bp, Artificial Sequence
  derived and/or modified sequence
atgctgcggcagagctgcagcttccccgtgaccagcctgcccgccttggggggtgtctgtggtcgtgaaggagcaggcgcagaggtccctccagccgcctgcgggtgcgaaggaagagatcccgatacggaacgctcctgcggccgcagcagcactggtggatgctcgccttgttccggtcccggacccagtagcccgaggacgtctcggggtgcgctttcaccttccctgggacgcctcttcccacacctgcaggtggtcatcaaacttaggattcaactggcaccagccgtccatctcgcactgcccacttgctctttactcacaagttcccctccactggaaggttgctgccaccggctgaacgaagaagccgaggtccagaggggcttccgcccaatcgccgtggagctggaatttgagaatcaaccattaggcgcagagactagattacggaatggtcgccgggctggggtgaaaaggtccgaaggcagaggtcaggtacgaccaggacaggtccgtagcactggccccgaggggggcctcacgagaatggagcgcaaggcagcacgcctacagtgggattccgggtccattaagatgagtgagaatgagcaactgtgggaagaaccctag

SEQ ID NO: 103183 - protein, 170 aa, Artificial Sequence
  derived and/or modified sequence
MASSGMTRRDPLANKVALVTASTDGIGFAIARRLAQDGAHVVVSSRKQQNVDQAVATLQGEGLSVTGTVCHVGKAEDRERLVATAVKLHGGIDILVSNAAVNPFFGSIMDVTEEVWDKRRLSGDRVFHSSLQSISSLDGQGKRGKHERNPADKKVRRARGLCWHRVFPVL

SEQ ID NO: 103184 - protein, 188 aa, Artificial Sequence
  derived and/or modified sequence
MHKAGLLGLCARAWNSVRMASSGMTRRDPLANKVALVTASTDGIGFAIARRLAQDGAHVVVSSRKQQNVDQAVATLQGEGLSVTGTVCHVGKAEDRERLVATAVKLHGGIDILVSNAAVNPFFGSIMDVTEEVWDKRRLSGDRVFHSSLQSISSLDGQGKRGKHERNPADKKVRRARGLCWHRVFPVL

SEQ ID NO: 103185 - DNA, 513 bp, Artificial Sequence
  derived and/or modified sequence
atggcaagttccggcatgactcggcgcgacccactggcaaacaaggttgccttagtcactgcgtctactgatggcatcggattcgcgatcgctcggcgactggcccaggacggcgcacatgtggtcgtgtcctctaggaaacagcaaaacgtagaccaggccgtggccacactgcagggtgaggggctctccgtaacaggtacggtatgtcacgtcggtaaagccgaagaccgtgaacgactggttgctaccgcagtgaagctgcatggagggatagacatattggtctccaatgcggcagtaaatccttttttcgggagtattatggacgtgacagaggaggtgtgggacaagaggagattgagcggagatcgcgtatttcactcaagcctgcaaagtatcagcagtttagacggtcaggggaagcgaggcaaacatgagcggaatcctgccgataagaaggtcaggcgagcgcgagggctgtgctggcaccgtgtttttcccgttctctag

SEQ ID NO: 103186 - DNA, 567 bp, Artificial Sequence
  derived and/or modified sequence
atgcacaaagcaggcctacttggattgtgcgcgcgtgcatggaatagcgtccgaatggctagttctggaatgactagacgagatcccctggctaacaaggtggccctggtgaccgcatccactgatggtatcggctttgcgatagccagaaggctagcgcaggacggggcacatgtagtggtaagctcccgaaagcaacagaatgtggatcaagcagtagctacactgcagggcgaaggactctctgtaaccggcactgtttgccatgtgggaaaagccgaagaccgcgagcggttggttgctactgcggtgaagctacacggcggtatagatattttggtctctaacgctgccgtgaacccattttttgggagcataatggacgtgacagaggaggtttgggataaacgtaggctgtctggagatagggtatttcatagctcactgcagtctatctcatccctggacggccaaggcaaaaggggcaagcacgagagaaaccctgctgacaagaaggtgcgcagagctcgagggctctgctggcatagagtattccccgtgttgtag

SEQ ID NO: 103187 - DNA, 513 bp, Artificial Sequence
  derived and/or modified sequence
atggccagcagcggcatgacccggcgggaccccctggccaacaaggtggccctggtgacagccagcacagatggcatcggctttgccatcgcccggcggctggcccaggatggagcccacgtggtggtgagcagcaggaagcagcagaatgtggaccaggccgtggccaccctgcagggcgagggcctgtctgtgacaggcaccgtgtgccacgtgggcaaggccgaggaccgggagcggctggtggccacagctgtgaagctgcatggaggcatcgacatcctggtgtccaatgctgctgtgaaccccttcttcggcagcatcatggatgtgacagaggaggtgtgggacaagaggcggctgagcggggacagagtcttccacagcagcctgcagagcatcagcagcctggatggccagggcaagaggggcaagcatgagaggaacccagctgacaagaaggtgcggcgggcccggggcctgtgctggcacagggtcttccctgtgctgtag

SEQ ID NO: 103188 - DNA, 567 bp, Artificial Sequence
  derived and/or modified sequence
atgcacaaggccggcctgctgggcctgtgtgcccgggcctggaacagcgtgaggatggccagcagcggcatgacccggcgggaccccctggccaacaaggtggccctggtgacagccagcacagatggcatcggctttgccatcgcccggcggctggcccaggatggagcccacgtggtggtgagcagcaggaagcagcagaatgtggaccaggccgtggccaccctgcagggcgagggcctgtctgtgacaggcaccgtgtgccacgtgggcaaggccgaggaccgggagcggctggtggccacagctgtgaagctgcatggaggcatcgacatcctggtgtccaatgctgctgtgaaccccttcttcggcagcatcatggatgtgacagaggaggtgtgggacaagaggcggctgagcggggacagagtcttccacagcagcctgcagagcatcagcagcctggatggccagggcaagaggggcaagcatgagaggaacccagctgacaagaaggtgcggcgggcccggggcctgtgctggcacagggtcttccctgtgctgtag

SEQ ID NO: 103189 - DNA, 513 bp, Artificial Sequence
  derived and/or modified sequence
atggccagcagcggcatgacccggcgggaccccctggccaacaaggtcgccctggtcaccgccagtaccgatggtattggtttcgccatcgcccgccggctcgcacaggacggagcccatgtggtcgtgtctagccgcaaacagcaaaatgtcgatcaggccgtggccaccctccagggcgaggggctgagcgttacaggtaccgtgtgccatgtgggtaaggccgaggatcgagagaggcttgtggccacagcagtcaaactacacggcggcattgacattttggtctctaatgctgccgtcaaccctttctttgggtcaatcatggacgtcactgaggaggtatgggataagcgccgtctgtctggcgacagggtattccactcttccctgcagtcaatttcttctctggacggacaaggcaagcggggaaagcatgaaagaaaccccgccgacaagaaggtacggagggcgcgaggtctgtgttggcaccgggtgtttccggtgctgtag

SEQ ID NO: 103190 - DNA, 567 bp, Artificial Sequence
  derived and/or modified sequence
atgcacaaggccggcctgctgggcctgtgcgcccgggcctggaacagtgtcagaatggcttcttcgggcatgaccagacgggatcccctcgccaataaggtggcactggttaccgcttctactgatggcattggcttcgccatcgcccgtagactcgcacaggacggcgcccacgttgtggtgtccagccggaaacaacaaaacgttgatcaggctgtcgctaccctacagggtgaaggactctcagtcacaggcactgtgtgccacgttggcaaagcggaggaccgggagagattagtcgccactgccgtgaagttgcatggagggattgatattctggtttccaacgccgccgtgaacccgttctttgggtcaattatggacgtcactgaagaagtgtgggataaaaggcggctgagtggggacagagtgttccatagttcattgcagtcaatctcctccttggacggacagggtaagagggggaaacacgagaggaatcccgccgacaagaaagtcaggagagcacgtggactctgctggcatagggtattcccagtactgtag

SEQ ID NO: 103191 - DNA, 513 bp, Artificial Sequence
  derived and/or modified sequence
atggcatcctcagggatgacccgcagggatccgttagctaacaaggttgccctcgtgacagctagtacggacggtatcggctttgctattgccagacgcctggctcaggatggcgcacatgtagtcgtgtcctccaggaagcagcagaacgtggaccaggctgtagctacactgcagggggaagggctgtccgttacagggactgtctgtcatgtgggaaaggcagaggaccgggagcgtctcgtggcaacagctgtcaagctgcacgggggaatcgatatccttgttagtaacgccgcagtgaacccttttttcgggtctataatggatgtgactgaagaggtgtgggacaagcgcaggctttccggagacagggttttccactccagccttcagtcaataagctcgctcgacggccagggaaagcgcggaaaacacgaacggaaccctgccgacaagaaagtgcggagggcccgaggtctgtgctggcatcgcgtgttccctgtactgtag

SEQ ID NO: 103192 - DNA, 567 bp, Artificial Sequence
  derived and/or modified sequence
atgcataaggcgggacttctgggcctgtgtgcacgggcttggaacagcgtcaggatggcaagttcggggatgacccggagagaccccttggcaaataaagtggcgcttgttacagcgtccaccgatggaatcggcttcgccatcgcacggcgtctcgctcaagacggggctcatgtcgtcgtgtcaagccgtaagcaacagaacgttgatcaggcagtggcaaccctgcaaggggaaggcctgtccgttacgggtaccgtttgtcacgtaggtaaggcggaggaccgcgagagactggtggccaccgccgtcaaacttcacggaggaattgacattctggtttcaaacgctgcagtaaatccgtttttcgggagcattatggatgtcacagaagaggtgtgggacaagaggcggctctccggagacagggtgtttcactcttctctgcagagcatctcctcgcttgacggccagggcaagcgtggaaagcacgagcggaaccccgctgataaaaaggtcaggagggccagagggttatgctggcatagagtatttcctgttctctag

SEQ ID NO: 103193 - DNA, 513 bp, Artificial Sequence
  derived and/or modified sequence
atggccagcagcggcatgaccagaagagaccccctggccaacaaggtggccctggtgaccgccagcaccgacggcatcggcttcgccatcgccagaagactggcccaggacggcgcccacgtggtggtgagcagcagaaagcagcagaacgtggaccaggccgtggccaccctgcagggcgagggcctgagcgtgaccggcaccgtgtgccacgtgggcaaggccgaggacagagagagactggtggccaccgccgtgaagctgcacggcggcatcgacatcctggtgagcaacgccgccgtgaaccccttcttcggcagcatcatggacgtgaccgaggaggtgtgggacaagagaagactgagcggcgacagagtgttccacagcagcctgcagagcatcagcagcctggacggccagggcaagagaggcaagcacgagagaaaccccgccgacaagaaggtgagaagagccagaggcctgtgctggcacagagtgttccccgtgctgtag

SEQ ID NO: 103194 - DNA, 567 bp, Artificial Sequence
  derived and/or modified sequence
atgcacaaggccggcctgctgggcctgtgcgccagagcctggaacagcgtgagaatggccagcagcggcatgaccagaagagaccccctggccaacaaggtggccctggtgaccgccagcaccgacggcatcggcttcgccatcgccagaagactggcccaggacggcgcccacgtggtggtgagcagcagaaagcagcagaacgtggaccaggccgtggccaccctgcagggcgagggcctgagcgtgaccggcaccgtgtgccacgtgggcaaggccgaggacagagagagactggtggccaccgccgtgaagctgcacggcggcatcgacatcctggtgagcaacgccgccgtgaaccccttcttcggcagcatcatggacgtgaccgaggaggtgtgggacaagagaagactgagcggcgacagagtgttccacagcagcctgcagagcatcagcagcctggacggccagggcaagagaggcaagcacgagagaaaccccgccgacaagaaggtgagaagagccagaggcctgtgctggcacagagtgttccccgtgctgtag

SEQ ID NO: 103195 - DNA, 586 bp, Artificial Sequence
  derived and/or modified sequence
atacttgctggtctgatccatgcacaaggcggggctgctaggcctctgtgcccgggcttggaattcggtgcggatggccagctccgggatgacccgccgggacccgctcgcaaataaggtggccctggtaacggcctccaccgacgggatcggcttcgccatcgcccggcgtttggcccaggacggggcccatgtggtcgtcagcagccggaagcagcagaatgtggaccaggcggtggccacgctgcagggggaggggctgagcgtgacgggcaccgtgtgccatgtggggaaggcggaggaccgggagcggctggtggccacggctgtgaagcttcatggaggtatcgatatcctagtctccaatgctgctgtcaaccctttctttggaagcataatggatgtcactgaggaggtgtgggacaagaggcggctcagtggtgatcgtgtcttccatagcagccttcagtccatctcctctctggatggacaaggaaaaagaggaaagcatgaaagaaaccctgcggataagaaggttaggcgagccagaggattgtgctggcatcgtgtctttcctgtgctctga

SEQ ID NO: 103196 - DNA, 1089 bp, Artificial Sequence
  derived and/or modified sequence
cctactctgtcaccgcccctgggaagagtggaacccatacttgctggtctgatccatgcacaaggcggggctgctaggcctctgtgcccgggcttggaattcggtgcggatggccagctccgggatgacccgccgggacccgctcgcaaataaggtggccctggtaacggcctccaccgacgggatcggcttcgccatcgcccggcgtttggcccaggacggggcccatgtggtcgtcagcagccggaagcagcagaatgtggaccaggcggtggccacgctgcagggggaggggctgagcgtgacgggcaccgtgtgccatgtggggaaggcggaggaccgggagcggctggtggccacggctgtgaagcttcatggaggtatcgatatcctagtctccaatgctgctgtcaaccctttctttggaagcataatggatgtcactgaggaggtgtgggacaagaggcggctcagtggtgatcgtgtcttccatagcagccttcagtccatctcctctctggatggacaaggaaaaagaggaaagcatgaaagaaaccctgcggataagaaggttaggcgagccagaggattgtgctggcatcgtgtctttcctgtgctctgaagatgccagctacatcactggggaaacagtggtggtgggtggaggaaccccgtcccgcctctgaggaccgggagacagcccacaggccagagttgggctctagctcctggtgctgttcccgcattcacccactggcctttcccacctctgctcaccttactgttcacctcatcaaatcagttctgccctgtgaaaagatccagccttccctgccgtcaaggtggcgtcttactcgggatttctgctgttgttgtggccttgggtaaaggcctcccctgagaacacaggacaggcctgctgacaaggctgagtctaccttggcaaagaccaagatattttttcccgggccactggggaatctgaggggtgatgggagagaaggaacctggagtggaaggagcagagttgcaaattaacaacttgcaaatgaggtgcaaataaaatgcagatgattgcgcggctttgaa

SEQ ID NO: 103197 - protein, 215 aa, Artificial Sequence
  derived and/or modified sequence
MPFPCLSLPSSWDYRIGFAIARRLAQDRAHVVVSSRKQQNVDQAVATLQGEGLSVTGTVCHVGKAEDRERLVAMTLDINVKAPALMTKAVVPEMEKRGGGSVVIVSSIAAFSPSPGFSPYNVSKTALLGLNNTLAIELAPRNIRVNCLPGLIKTSFSRMLWMDKEKEESMKETLRIRRLGEPEDCAGIVSFLCSEDASYITGETVVVGGGTPSRL

SEQ ID NO: 103198 - protein, 57 aa, Artificial Sequence
  derived and/or modified sequence
MLWMDKEKEESMKETLRIRRLGEPEDCAGIVSFLCSEDASYITGETVVVGGGTPSRL

SEQ ID NO: 103199 - protein, 226 aa, Artificial Sequence
  derived and/or modified sequence
MASSGMTRRDPLANKVALVTASTDGIGFAIARRLAQDGAHVVVSSRKQQNVDQAVATLQGEGLSVTGTVCHVGKAEDRERLVATTLDINVKAPALMTKAVVPEMEKRGGGSVVIVSSIAAFSPSPGFSPYNVSKTALLGLTKTLAIELAPRNIRVNCLAPGLIKTSFSRMLWMDKEKEESMKETLRIRRLGEPEDCAGIVSFLCSEDASYITGETVVVGGGTPSRL

SEQ ID NO: 103200 - DNA, 648 bp, Artificial Sequence
  derived and/or modified sequence
atgcccttcccctgcctgagcctgcccagcagctgggactacagaatcggcttcgccatcgccagaagactggcccaggacagagcccacgtggtggtgagcagcagaaagcagcagaacgtggaccaggccgtggccaccctgcagggcgagggcctgagcgtgaccggcaccgtgtgccacgtgggcaaggccgaggacagagagagactggtggccatgaccctggacatcaacgtgaaggcccccgccctgatgaccaaggccgtggtgcccgagatggagaagagaggcggcggcagcgtggtgatcgtgagcagcatcgccgccttcagccccagccccggcttcagcccctacaacgtgagcaagaccgccctgctgggcctgaacaacaccctggccatcgagctggcccccagaaacatcagagtgaactgcctgcccggcctgatcaagaccagcttcagcagaatgctgtggatggacaaggagaaggaggagagcatgaaggagaccctgagaatcagaagactgggcgagcccgaggactgcgccggcatcgtgagcttcctgtgcagcgaggacgccagctacatcaccggcgagaccgtggtggtgggcggcggcacccccagcagactgtag

SEQ ID NO: 103201 - DNA, 648 bp, Artificial Sequence
  derived and/or modified sequence
atgcccttcccgtgtctgagcctgcctagctcctgggactacaggatcggatttgcgattgcacgcaggctagcccaggacagagcgcatgtcgtggtgagcagtaggaagcagcagaatgtggaccaggcggttgccacactgcagggtgagggcctatccgtcacgggaacagtatgtcatgtggggaaggccgaggatcgggagcgcctggtcgccatgactcttgacattaacgtgaaagctccagcactgatgacaaaggcagttgtccctgagatggaaaagcgagggggaggcagtgttgtgatcgtatcttccatagcagccttcagccccagcccaggcttttccccttacaatgtctctaagaccgccctgctcggacttaataataccttagcaattgaactggcaccccggaacatcagagttaactgcctgcccggactgattaaaaccagcttttcacgcatgctgtggatggacaaggagaaggaagagtcaatgaaggagacactgcgcatccggcgacttggcgagcctgaagattgtgccggaattgtgtccttcctttgctctgaagatgcctcctatatcaccggggagactgttgttgtaggggggggcaccccgtctcgcttgtag

SEQ ID NO: 103202 - DNA, 1049 bp, Artificial Sequence
  derived and/or modified sequence
atgccattcccctgcctcagcctcccgagtagctgggactacaggatcggcttcgccatcgcccggcgtttggcccaggacagggcccacgtggtcgtcagcagccggaagcagcagaatgtggaccaggcggtggccacgctgcagggggaggggctgagcgtgacgggcactgtgtgccatgtggggaaggcggaggaccgggagcggctggtggccatgactctggacattaatgtgaaggccccagccctgatgacaaaggcagtggtgccagaaatggagaaacgaggaggcggctcagtggtgatcgtgtcttccatagcagccttcagtccatctcctggcttcagtccttacaatgtcagtaaaacagccttgctgggcctcaacaataccctggccatagagctggccccaaggaacattagggtgaactgcctgcctggacttatcaagactagcttcagcaggatgctctggatggacaaggaaaaagaggaaagcatgaaagaaaccctgcggataagaaggttaggcgagccagaggattgtgctggcatcgtgtctttcctgtgctctgaagatgccagctacatcactggggaaacagtggtggtgggtggaggaaccccgtcccgcctctgaggaccgggagacagcccacaggccagagttgggctctagctcctggtgctgttcctgcattcacccactggcctttcccacctctgctcaccttactgttcacctcatcaaatcagttctgccctgtgaaaagatccagccttccctgccgtcaaggtggcgtcttactcgggattcctgctgttgttgtggccttgggtaaaggcctcccctgagaacacaggacaggcctgctgacaaggctgagtctaccttggcaaagaccaagatattttttcctgggccactggggaatctgaggggtgatgggagagaaggaacctggagtggaaggagcagagttgcaaattaacaacttgcaaatgaggtgcaaataaaatgcagatgattgcgcggctttg

SEQ ID NO: 103203 - DNA, 648 bp, Artificial Sequence
  derived and/or modified sequence
atgcccttcccctgcctgagcctgcccagctcctgggactaccgcatcggctttgccatcgcccggcggctggcccaggaccgggcccacgtggtggtgagcagcaggaagcagcagaatgtggaccaggccgtggccaccctgcagggcgagggcctgtctgtgacaggcaccgtgtgccacgtgggcaaggccgaggaccgggagcggctggtggccatgaccctggacatcaacgtgaaggccccagccctgatgaccaaggctgtggtgcctgagatggagaagaggggcggcggctctgtggtgattgtgagcagcattgctgccttcagccccagccctggcttcagcccctacaacgtgtccaagacagccctgctgggcctgaacaacaccctggccatcgagctggcccccaggaacatccgggtgaactgcctgcccggcctcatcaagaccagcttcagcaggatgctgtggatggacaaggagaaggaggagagcatgaaggagaccctgcgcatccggcggctgggggagcctgaggactgtgccggcatcgtgtccttcctgtgcagtgaagatgccagctacatcactggagagaccgtggtggtgggcggcggcacccccagccggctgtag

SEQ ID NO: 103204 - DNA, 648 bp, Artificial Sequence
  derived and/or modified sequence
atgcccttcccctgcctgagcctgcccagcagctgggactaccggatcggattcgctatcgctcggcgacttgctcaggacagggcgcacgttgtggtaagttctcgcaagcaacagaatgtcgatcaggcggtcgcaaccctgcaaggtgaaggcctcagcgtcaccggtacagtgtgtcacgtaggaaaagcggaagatagggagcgcctggtggccatgaccctggatatcaatgtcaaggcccctgccctgatgaccaaagctgtagtgccagagatggagaagagaggtggcgggtctgttgtgatcgtcagttctatcgcagcttttagccccagccctgggtttagcccttacaatgtttccaaaaccgcgctcttgggattaaacaataccctagccatagagctagcccctcgtaacatcagggtcaactgcctgccgggcctaatcaagacctccttcagtcggatgctgtggatggataaggagaaggaagagtccatgaaagagaccttgaggatcaggcggctgggagagcccgaagattgcgccgggatcgtatcattcctttgcagcgaggacgcctcctacataaccggtgaaaccgtggtggtgggaggtggcacgccatcacgcctttag

SEQ ID NO: 103205 - DNA, 648 bp, Artificial Sequence
  derived and/or modified sequence
atgcctttcccatgcctgtccctgccatcatcctgggattaccgtattggtttcgctattgctaggcggctggcccaggacagggcacatgtggtggtttctagccggaagcagcagaatgtggatcaagccgtcgctacactccaaggtgagggcctgagcgtgaccggcactgtgtgccacgtgggaaaagcagaagatcgagagagactggtggccatgaccctagacataaacgttaaggccccagcactcatgacgaaagccgtggtcccggaaatggagaaaagaggtggaggttctgtagtgatcgtcagcagcattgccgcattttcacctagtcctggattctcaccttataacgtgagtaagaccgcactcctcggtttgaataatacattggctattgaattagcgcctagaaatattagagttaattgcctgccgggtctcatcaagacctctttcagtagaatgctttggatggataaggagaaggaggagagcatgaaggagactctcagaatccgcagactgggcgagcctgaagactgcgccggaatagtctcctttctgtgtagtgaggacgcgagttacattaccggcgaaaccgtggtggtgggaggcggaacacccagccgcctctag

SEQ ID NO: 103206 - DNA, 681 bp, Artificial Sequence
  derived and/or modified sequence
atggcatccagcggcatgacgcggcgcgatccactggccaacaaggtcgccctggtcacggcctcgacagatggaattggcttcgcaatagcccggcggctcgcccaggacggggcccacgtggtagtatcgtcccggaagcagcagaatgttgaccaggccgttgcaacgctacagggggaagggctctccgtgaccggcaccgtgtgtcatgtgggaaaggccgaggacagagagcgactggtggccaccacccttgacattaatgtcaaggcacccgcactgatgacgaaagcagtcgttcccgaaatggagaagcggggtggcggatccgtggtgatcgtgtccagcatcgccgctttctccccgagccccggattctccccttataacgtgtcaaagacggccctcttaggtctcacaaagaccctagccatagagttagctccccggaatattcgcgtcaactgtcttgctcccgggctcatcaaaacctccttctccagaatgctctggatggacaaagagaaggaagagtcaatgaaagaaaccctgaggattagacggctgggggaaccagaggactgcgccgggattgtcagttttctgtgcagcgaagatgcctcctacatcaccggggagaccgtggtggtgggtggcggcacgccgagccggttatag

SEQ ID NO: 103207 - DNA, 681 bp, Artificial Sequence
  derived and/or modified sequence
atggccagcagcggcatgacccggcgggaccccctggccaacaaggtggccctggtgacagccagcacagatggcatcggctttgccatcgcccggcggctggcccaggatggagcccacgtggtggtgagcagcaggaagcagcagaatgtggaccaggccgtggccaccctgcagggcgagggcctgtctgtgacaggcaccgtgtgccacgtgggcaaggccgaggaccgggagcggctggtggccaccaccctggacatcaacgtgaaggccccagccctgatgaccaaggctgtggtgcctgagatggagaagaggggcggcggctctgtggtgattgtgagcagcattgctgccttcagccccagccctggcttcagcccctacaacgtgtccaagacagccctgctgggcctgaccaagaccctggccatcgagctggcccccaggaacatccgggtgaactgcctggcccctggcctcatcaagaccagcttcagcaggatgctgtggatggacaaggagaaggaggagagcatgaaggagaccctgcgcatccggcggctgggggagcctgaggactgtgccggcatcgtgtccttcctgtgcagtgaagatgccagctacatcaccggggagaccgtggtggtgggcggcggcacccccagccggctgtag

SEQ ID NO: 103208 - DNA, 681 bp, Artificial Sequence
  derived and/or modified sequence
atggccagcagcggcatgacccggcgggaccccctggccaacaaggtcgcactggtaaccgcaagcacagacgggatcggattcgccatcgcccgtagactggcacaggacggcgctcacgtggtagtgtcaagccggaaacagcaaaacgtggaccaagccgtggcaacgctgcaaggcgaaggcctgagtgttaccggaaccgtatgccacgtcgggaaagctgaggacagagaaaggctggtagccactacgctggatatcaatgtgaaggctccagctctcatgaccaaggctgtcgtccccgaaatggaaaagcggggtggcggatcggttgtgatcgtgagcagcatcgctgctttctcaccttcccccggcttttctccctataacgtgtccaaaacagctttactgggccttaccaaaacgcttgcaatcgagctggctccacgcaatatccgcgttaattgcctggccccaggcctcataaaaaccagtttttctaggatgttatggatggataaagaaaaagaagagagtatgaaggagacgctaagaatccgccggctcggagagccagaggattgcgctggcatcgtcagctttttgtgttctgaagacgcctcttacattaccggtgaaaccgtcgttgtaggcggcggcacccctagccgtctttag

SEQ ID NO: 103209 - DNA, 681 bp, Artificial Sequence
  derived and/or modified sequence
atggcttcttcaggaatgacgcgacgggatccattggcaaacaaagttgcactggttaccgcaagcacagatgggattgggtttgctatcgccagacgcctagcccaggacggagcccacgtggttgtgtcctctcgaaaacagcagaatgttgaccaagctgtggctaccctgcagggagagggactgtccgtaaccggaactgtttgtcacgtaggcaaggctgaggacagagagaggctggtcgcaacaactctcgatattaatgttaaagcccctgctctgatgacgaaggcagtagtccctgaaatggaaaagcgaggcggtgggagtgttgttattgtgagctcgattgccgcattttccccttcccctggattctctccctataatgtgtcaaaaactgctttgttgggcctgactaaaaccctggccattgagttggccccacgaaatattcgagtgaattgtctagctcctgggctgattaaaacgtctttctccaggatgctctggatggataaagaaaaggaggagtccatgaaggaaaccctgcggattcggaggctcggtgagccagaagattgcgccggaatcgtcagttttttgtgctctgaggacgcatcctacattacgggggagacagttgtggtggggggtggcaccccgagccggttatag

SEQ ID NO: 103210 - DNA, 681 bp, Artificial Sequence
  derived and/or modified sequence
atggccagcagcggcatgaccagaagagaccccctggccaacaaggtggccctggtgaccgccagcaccgacggcatcggcttcgccatcgccagaagactggcccaggacggcgcccacgtggtggtgagcagcagaaagcagcagaacgtggaccaggccgtggccaccctgcagggcgagggcctgagcgtgaccggcaccgtgtgccacgtgggcaaggccgaggacagagagagactggtggccaccaccctggacatcaacgtgaaggcccccgccctgatgaccaaggccgtggtgcccgagatggagaagagaggcggcggcagcgtggtgatcgtgagcagcatcgccgccttcagccccagccccggcttcagcccctacaacgtgagcaagaccgccctgctgggcctgaccaagaccctggccatcgagctggcccccagaaacatcagagtgaactgcctggcccccggcctgatcaagaccagcttcagcagaatgctgtggatggacaaggagaaggaggagagcatgaaggagaccctgagaatcagaagactgggcgagcccgaggactgcgccggcatcgtgagcttcctgtgcagcgaggacgccagctacatcaccggcgagaccgtggtggtgggcggcggcacccccagcagactgtag

SEQ ID NO: 103211 - DNA, 754 bp, Artificial Sequence
  derived and/or modified sequence
atacttgctggtctgatccatgcacaaggcggggctgctaggcctctgtgcccgggcttggaattcggtgcggatggccagctccgggatgacccgccgggacccgctcgcaaataaggtggccctggtaacggcctccaccgacgggatcggcttcgccatcgcccggcgtttggcccaggacggggcccatgtggtcgtcagcagccggaagcagcagaatgtggaccaggcggtggccacgctgcagggggaggggctgagcgtgacgggcaccgtgtgccatgtggggaaggcggaggaccgggagcggctggtggccacgactctggacattaatgtgaaggccccagccctgatgacaaaggcagtggtgccagaaatggagaaacgaggaggcggctcagtggtgatcgtgtcttccatagcagccttcagtccatctcctggcttcagtccttacaatgtcagtaaaacagccttgctgggcctgaccaagaccctggccatagagctggccccaaggaacattagggtgaactgcctagcacctggacttatcaagactagcttcagcaggatgctctggatggacaaggaaaaagaggaaagcatgaaagaaaccctgcggataagaaggttaggcgagccagaggattgtgctggcatcgtgtctttcctgtgctctgaagatgccagctacatcactggggaaacagtggtggtgggtggaggaaccccgtcccgcctctga

SEQ ID NO: 103212 - protein, 192 aa, Artificial Sequence
  derived and/or modified sequence
MHKAGLLGLCARAWNSVRMASSGMTRRDPLANKVALVTASTDGIGFAIARRLAQDGAHVVVSSRKQQNVDQAVATLQGEGLSVTGTVCHVGKAEDRERLVATAVKLHGGIDILVSNAAVNPFFGSIMDVTEEVWDKLWMDKEKEESMKETLRIRRLGEPEDCAGIVSFLCSEDASYITGETVVVGGGTPSRL

SEQ ID NO: 103213 - DNA, 579 bp, Artificial Sequence
  derived and/or modified sequence
atgcacaaagcaggactgctggggctctgcgctcgggcctggaactcagttcggatggcctcctccggcatgactcgccgagaccccttggccaataaagtcgccttagtgaccgcaagtacggatgggattggatttgccattgcccggaggttggctcaggacggggctcatgtggtggtctccagccgaaagcagcagaacgtggaccaagccgtcgctactctgcagggtgagggactatccgtgacggggacggtttgtcacgtaggcaaggctgaagaccgcgagaggttggttgccacggccgttaaacttcacggcgggatcgacatcctggtcagtaatgcagctgtgaatcctttcttcggtagcattatggacgtaactgaggaggtatgggataaactgtggatggataaagagaaagaagagtccatgaaggagacccttcgcatcagacgcctgggggagcccgaagactgcgcaggtattgtgtccttcctttgttccgaggatgcttcctatataacgggcgagacagtggtcgtagggggggggaccccttctagattatag

SEQ ID NO: 103214 - DNA, 579 bp, Artificial Sequence
  derived and/or modified sequence
atgcacaaggccggcctgctgggcctgtgtgcccgggcctggaacagcgtgaggatggccagcagcggcatgacccggcgggaccccctggccaacaaggtggccctggtgacagccagcacagatggcatcggctttgccatcgcccggcggctggcccaggatggagcccacgtggtggtgagcagcaggaagcagcagaatgtggaccaggccgtggccaccctgcagggcgagggcctgtctgtgacaggcaccgtgtgccacgtgggcaaggccgaggaccgggagcggctggtggccacagctgtgaagctgcatggaggcatcgacatcctggtgtccaatgctgctgtgaaccccttcttcggcagcatcatggatgtgacagaggaggtgtgggacaagctgtggatggacaaggagaaggaggagagcatgaaggagaccctgcgcatccggcggctgggggagcctgaggactgtgccggcatcgtgtccttcctgtgcagtgaagatgccagctacatcaccggggagaccgtggtggtgggcggcggcacccccagccggctgtag

SEQ ID NO: 103215 - DNA, 579 bp, Artificial Sequence
  derived and/or modified sequence
atgcacaaggccggcctgctgggcctgtgcgcccgggcctggaactctgtgcgaatggcatctagcggcatgaccagacgtgacccattagccaacaaggttgcccttgtcactgcatccactgatggaatcggtttcgctatcgcgaggcgactggcccaagatggtgcacacgtggtggtgtctagcaggaaacagcaaaacgtcgaccaggcagtggcaacgctgcagggcgaggggctttccgtgacagggactgtttgtcacgtcggcaaggcggaagacagagagcgcctcgttgccacagccgtgaaactccatggtggcatcgatatattggttagcaacgctgctgttaatccgttctttggtagcattatggacgtgactgaggaagtctgggataaactgtggatggacaaggaaaaagaggagtctatgaaggagaccttgagaatccgccggctaggggagcctgaggattgtgcggggatcgttagctttttgtgttctgaagatgctagctacataactggcgagacagttgtggtggggggggggacgcccagtaggctatag

SEQ ID NO: 103216 - DNA, 579 bp, Artificial Sequence
  derived and/or modified sequence
atgcataaggcaggcctgcttggcctctgtgctagagcgtggaattctgttcggatggcgtcctccggcatgacgcgaagggaccccctggctaataaagtggccttggttaccgcttcaacagacggtatcgggttcgccatcgctagaaggctggctcaggacggagcacacgtggtcgtttcatccaggaagcagcagaacgtcgatcaggccgttgccacactacagggcgagggactgtcagtgactggcaccgtctgccatgtggggaaagcagaggatcgcgagcggcttgtcgctaccgcggtgaagctgcacggtggcattgatatcctcgtttcaaacgctgcagttaatccatttttcggaagcattatggatgttacagaggaagtatgggataaattgtggatggacaaggagaaagaagagtcgatgaaggagactttgcgaatacgacgcttgggtgagccagaggactgcgccggtattgtctcattcctttgtagcgaggacgcgagctacatcaccggcgaaacagtagtggtaggagggggaacaccaagccgcttgtag

SEQ ID NO: 103217 - DNA, 579 bp, Artificial Sequence
  derived and/or modified sequence
atgcacaaggccggcctgctgggcctgtgcgccagagcctggaacagcgtgagaatggccagcagcggcatgaccagaagagaccccctggccaacaaggtggccctggtgaccgccagcaccgacggcatcggcttcgccatcgccagaagactggcccaggacggcgcccacgtggtggtgagcagcagaaagcagcagaacgtggaccaggccgtggccaccctgcagggcgagggcctgagcgtgaccggcaccgtgtgccacgtgggcaaggccgaggacagagagagactggtggccaccgccgtgaagctgcacggcggcatcgacatcctggtgagcaacgccgccgtgaaccccttcttcggcagcatcatggacgtgaccgaggaggtgtgggacaagctgtggatggacaaggagaaggaggagagcatgaaggagaccctgagaatcagaagactgggcgagcccgaggactgcgccggcatcgtgagcttcctgtgcagcgaggacgccagctacatcaccggcgagaccgtggtggtgggcggcggcacccccagcagactgtag

SEQ ID NO: 103218 - DNA, 727 bp, Artificial Sequence
  derived and/or modified sequence
ggtctgatccatgcacaaggcggggctgctaggcctctgtgcccgggcttggaattcggtgcggatggccagctccgggatgacccgccgggacccgctcgcaaataaggtggccctggtaacggcctccaccgacgggatcggcttcgccatcgcccggcgtttggcccaggacggggcccatgtggtcgtcagcagccggaagcagcagaatgtggaccaggcggtggccacgctgcagggggaggggctgagcgtgacgggcaccgtgtgccatgtggggaaggcggaggaccgggagcggctggtggccacggctgtgaagcttcatggaggtatcgatatcctagtctccaatgctgctgtcaaccctttctttggaagcataatggatgtcactgaggaggtgtgggacaagctctggatggacaaggaaaaagaggaaagcatgaaagaaaccctgcggataagaaggttaggcgagccagaggattgtgctggcatcgtgtctttcctgtgctctgaagatgccagctacatcactggggaaacagtggtggtgggtggaggaaccccgtcccgcctctgaggaccgggagacagcccacaggccagagttgggctctagctcctggtgctgttcccgcattcacccactggcctttcccacctctgctcaccttactgttcacctcatcaaatcagttctgccctgtgaaaagatcca

SEQ ID NO: 103219 - protein, 181 aa, Artificial Sequence
  derived and/or modified sequence
MASSGMTRRDPLANKVALVTASTDGIGFAIARRLAQDGAHVVVSSRKQQNVDQAVATLQGEGLSVTGTVCHVGKAEDRERLVATTLDINVKAPALMTKAVVPEMEKRGGGSVVIVSSIAAFSPSPLWMDKEKEESMKETLRIRRLGEPEDCAGIVSFLCSEDASYITGETVVVGGGTPSRL

SEQ ID NO: 103220 - protein, 199 aa, Artificial Sequence
  derived and/or modified sequence
MHKAGLLGLCARAWNSVRMASSGMTRRDPLANKVALVTASTDGIGFAIARRLAQDGAHVVVSSRKQQNVDQAVATLQGEGLSVTGTVCHVGKAEDRERLVATTLDINVKAPALMTKAVVPEMEKRGGGSVVIVSSIAAFSPSPLWMDKEKEESMKETLRIRRLGEPEDCAGIVSFLCSEDASYITGETVVVGGGTPSRL

SEQ ID NO: 103221 - DNA, 546 bp, Artificial Sequence
  derived and/or modified sequence
atggccagtagcggaatgacccggagggatccattggcaaataaggtggccctagtgactgcctctactgatggaataggttttgctatagcacggaggctcgcccaggacggagctcacgtcgtagtgtcgtccagaaagcagcaaaacgtagaccaggccgtggccactttgcagggcgaggggctgtccgtgactggcacggtgtgccatgtgggaaaagcggaagacagagagcgattggttgctaccacactggacatcaatgtcaaagcccctgccctgatgactaaggcagtagttccagaaatggaaaaacgcggaggcggtagcgtggtgattgtaagttcgatagccgcttttagccctagcccgctctggatggataaagagaaggaagagagcatgaaggaaacactgcggatccggcggctgggagaacccgaagattgcgcgggcatcgtgtcgtttttgtgtagtgaggacgctagctacataacaggagaaactgttgtcgtgggggggggtacgccatcgaggctgtag

SEQ ID NO: 103222 - DNA, 600 bp, Artificial Sequence
  derived and/or modified sequence
atgcacaaagcgggtctactgggcctgtgtgcacgcgcttggaactcagtacgaatggcttctagcggcatgacccggagagaccctttagccaacaaagtcgccctggtcactgcctcaaccgatggaatcgggttcgcaatcgctcggaggctggcccaggacggagcccatgtggtggttagttcgcgtaagcagcagaatgttgaccaggccgtggccacccttcagggggagggcctctccgtcacaggtactgtgtgtcacgtgggtaaagccgaagacagagagcgtcttgtcgctaccacactagatatcaacgtgaaagctcctgcgctgatgactaaggctgtcgtgccagagatggagaagcggggagggggctcagtcgtaatagtcagctctattgctgccttctcaccatcacccctgtggatggacaaggaaaaagaggagtccatgaaggagactcttcggattcggcgcctgggagagcccgaggactgcgctgggattgtcagctttttatgttcagaggatgccagctatattactggcgaaacagtggtcgtgggcgggggaacacccagccggctttag

SEQ ID NO: 103223 - DNA, 546 bp, Artificial Sequence
  derived and/or modified sequence
atggccagcagcggcatgacccggcgggaccccctggccaacaaggtggccctggtgacagccagcacagatggcatcggctttgccatcgcccggcggctggcccaggatggagcccacgtggtggtgagcagcaggaagcagcagaatgtggaccaggccgtggccaccctgcagggcgagggcctgtctgtgacaggcaccgtgtgccacgtgggcaaggccgaggaccgggagcggctggtggccaccaccctggacatcaacgtgaaggccccagccctgatgaccaaggctgtggtgcctgagatggagaagaggggcggcggctctgtggtgattgtgagcagcattgctgccttcagccccagccccctgtggatggacaaggagaaggaggagagcatgaaggagaccctgcgcatccggcggctgggggagcctgaggactgtgccggcatcgtgtccttcctgtgcagtgaagatgccagctacatcactggagagaccgtggtggtgggcggcggcacccccagccggctgtag

SEQ ID NO: 103224 - DNA, 600 bp, Artificial Sequence
  derived and/or modified sequence
atgcacaaggccggcctgctgggcctgtgtgcccgggcctggaacagcgtgaggatggccagcagcggcatgacccggcgggaccccctggccaacaaggtggccctggtgacagccagcacagatggcatcggctttgccatcgcccggcggctggcccaggatggagcccacgtggtggtgagcagcaggaagcagcagaatgtggaccaggccgtggccaccctgcagggcgagggcctgtctgtgacaggcaccgtgtgccacgtgggcaaggccgaggaccgggagcggctggtggccaccaccctggacatcaacgtgaaggccccagccctgatgaccaaggctgtggtgcctgagatggagaagaggggcggcggctctgtggtgattgtgagcagcattgctgccttcagccccagccccctgtggatggacaaggagaaggaggagagcatgaaggagaccctgcgcatccggcggctgggggagcctgaggactgtgccggcatcgtgtccttcctgtgcagtgaagatgccagctacatcactggagagaccgtggtggtgggcggcggcacccccagccggctgtag

SEQ ID NO: 103225 - DNA, 546 bp, Artificial Sequence
  derived and/or modified sequence
atggccagcagcggcatgacccggcgggaccccctggccaacaaggtggccctggttactgcctccaccgacggcattggatttgccattgctcgccggctggctcaggatggagcccacgttgtggttagcagtcgcaagcaacagaacgtggaccaggctgtggccaccttgcagggtgaaggcctgtctgttaccggaaccgtgtgtcacgtcggtaaggcggaagatagagagcgcttggttgctacaactctggacatcaatgtgaaggctccggcgctcatgacaaaggcagtggtcccagagatggagaagcggggcggaggcagcgtggtcatcgtgtcgagcatcgccgcgttctctccaagccctttgtggatggacaaggagaaggaggagtcaatgaaggagaccctgaggatcagacgcctcggcgagccggaggattgcgccggcatagtctcgtttctctgcagcgaggatgcctcctatataactggcgaaactgtcgtcgtcggtgggggaaccccctcccgcttgtag

SEQ ID NO: 103226 - DNA, 600 bp, Artificial Sequence
  derived and/or modified sequence
atgcacaaggccggcctgctgggcctgtgcgcccgggcctggaacagcgttcggatggctagcagtggcatgaccaggagagacccacttgcgaacaaggtggctctggtgacagcttctactgacggaattggatttgctattgcgcgcaggctggctcaggatggggctcatgtcgttgtatccagccggaagcagcagaacgtagatcaagcagtggcaaccctacagggcgaaggcctctcggtgactggtacagtgtgtcatgtgggtaaggcagaagatagagaaagactggtggcaactactcttgacatcaacgtgaaagcgcccgcgttgatgactaaggctgtcgttccagaaatggagaaaagagggggtggcagcgtcgtgatagtatctagcattgctgcctttagtccctcaccactctggatggataaagaaaaggaggagtcaatgaaggagaccctgcgcataaggaggctgggtgaacccgaggattgtgctggcatcgtcagcttcttgtgttccgaagacgcctcatacatcacaggagaaacagtggtcgtgggcggtggtacacccagccgcctgtag

SEQ ID NO: 103227 - DNA, 546 bp, Artificial Sequence
  derived and/or modified sequence
atggctagtagcggcatgactcggagagaccccctcgcgaataaggtggctctggtcacagcgagtacagacggaatcgggttcgccattgctcgcaggctggctcaggacggtgcccatgtggtggtgagttctagaaagcagcaaaacgttgaccaagccgttgcgaccctgcaaggagaaggccttagcgtcaccggcaccgtatgtcatgtggggaaagccgaggaccgggagagacttgtggcgacaacgttagatatcaatgtgaaggcgcctgccctgatgaccaaggctgtggtccccgagatggagaagaggggaggcggaagtgtcgtaatcgtgtctagtatagcagcatttagcccatcaccactttggatggataaggaaaaagaggagagcatgaaggagactctgcggattcgcaggttgggcgaacccgaggattgtgctggcatcgtgtctttcctttgttctgaggacgcatcctatattactggagagacagtggtggtagggggaggaacccccagtagattgtag

SEQ ID NO: 103228 - DNA, 600 bp, Artificial Sequence
  derived and/or modified sequence
atgcacaaggctggactactgggcctctgtgcaagagcatggaactcagtacgcatggcctcaagcggcatgacccgacgagaccctctggcaaacaaagtggcattggtcacagctagcacagatggtattgggttcgcaattgccagaaggcttgcccaagatggtgctcatgtagtggtctcatctcgaaagcagcagaatgtagaccaggctgtcgccacccttcagggcgagggtctctccgtgacgggtacagtgtgtcatgtaggcaaagccgaggatagggagaggttggttgccaccaccctagatatcaatgtgaaagccccagcactgatgaccaaagcagttgtcccagagatggagaagaggggcggaggttctgtagttatagtcagctcaattgccgcatttagtccatcacccttgtggatggacaaggagaaagaggagagcatgaaagaaacgctgcgcatccgccgattgggggagcccgaagattgcgccggtatagtttctttcctgtgctctgaagatgcttcctatattacaggggagacagttgtcgttggtggcggtactccttctagactatag

SEQ ID NO: 103229 - DNA, 546 bp, Artificial Sequence
  derived and/or modified sequence
atggccagcagcggcatgaccagaagagaccccctggccaacaaggtggccctggtgaccgccagcaccgacggcatcggcttcgccatcgccagaagactggcccaggacggcgcccacgtggtggtgagcagcagaaagcagcagaacgtggaccaggccgtggccaccctgcagggcgagggcctgagcgtgaccggcaccgtgtgccacgtgggcaaggccgaggacagagagagactggtggccaccaccctggacatcaacgtgaaggcccccgccctgatgaccaaggccgtggtgcccgagatggagaagagaggcggcggcagcgtggtgatcgtgagcagcatcgccgccttcagccccagccccctgtggatggacaaggagaaggaggagagcatgaaggagaccctgagaatcagaagactgggcgagcccgaggactgcgccggcatcgtgagcttcctgtgcagcgaggacgccagctacatcaccggcgagaccgtggtggtgggcggcggcacccccagcagactgtag

SEQ ID NO: 103230 - DNA, 600 bp, Artificial Sequence
  derived and/or modified sequence
atgcacaaggccggcctgctgggcctgtgcgccagagcctggaacagcgtgagaatggccagcagcggcatgaccagaagagaccccctggccaacaaggtggccctggtgaccgccagcaccgacggcatcggcttcgccatcgccagaagactggcccaggacggcgcccacgtggtggtgagcagcagaaagcagcagaacgtggaccaggccgtggccaccctgcagggcgagggcctgagcgtgaccggcaccgtgtgccacgtgggcaaggccgaggacagagagagactggtggccaccaccctggacatcaacgtgaaggcccccgccctgatgaccaaggccgtggtgcccgagatggagaagagaggcggcggcagcgtggtgatcgtgagcagcatcgccgccttcagccccagccccctgtggatggacaaggagaaggaggagagcatgaaggagaccctgagaatcagaagactgggcgagcccgaggactgcgccggcatcgtgagcttcctgtgcagcgaggacgccagctacatcaccggcgagaccgtggtggtgggcggcggcacccccagcagactgtag

SEQ ID NO: 103231 - DNA, 619 bp, Artificial Sequence
  derived and/or modified sequence
atacttgctggtctgatccatgcacaaggcggggctgctaggcctctgtgcccgggcttggaattcggtgcggatggccagctccgggatgacccgccgggacccgctcgcaaataaggtggccctggtaacggcctccaccgacgggatcggcttcgccatcgcccggcgtttggcccaggacggggcccatgtggtcgtcagcagccggaagcagcagaatgtggaccaggcggtggccacgctgcagggggaggggctgagcgtgacgggcaccgtgtgccatgtggggaaggcggaggaccgggagcggctggtggccacgactctggacattaatgtgaaggccccagccctgatgacaaaggcagtggtgccagaaatggagaaacgaggaggcggctcagtggtgatcgtgtcttccatagcagccttcagtccatctcctctctggatggacaaggaaaaagaggaaagcatgaaagaaaccctgcggataagaaggttaggcgagccagaggattgtgctggcatcgtgtctttcctgtgctctgaagatgccagctacatcactggggaaacagtggtggtgggtggaggaaccccgtcccgcctctga

SEQ ID NO: 103232 - DNA, 1003 bp, Artificial Sequence
  derived and/or modified sequence
atgcacaaggcggggctgctaggcctctgtgcccgggcttggaattcggtgcggatggccagctccgggatgacccgccgggacccgctcgcaaataaggtggccctggtaacggcctccaccgacgggatcggcttcgccatcgcccggcgtttggcccaggacggggcccatgtggtcgtcagcagccggaagcagcagaatgtggaccaggcggtggccacgctgcagggggaggggctgagcgtgacgggcaccgtgtgccatgtggggaaggcggaggaccgggagcggctggtggccacgactctggacattaatgtgaaggccccagccctgatgacaaaggcagtggtgccagaaatggagaaacgaggaggcggctcagtggtgatcgtgtcttccatagcagccttcagtccatctcctctctggatggacaaggaaaaagaggaaagcatgaaagaaaccctgcggataagaaggttaggcgagccagaggattgtgctggcatcgtgtctttcctgtgctctgaagatgccagctacatcactggggaaacagtggtggtgggtggaggaaccccgtcccgcctctgaggaccgggagacagcccacaggccagagttgggctctagctcctggtgctgttcccgcattcacccactggcctttcccacctctgctcaccttactgttcacctcatcaaatcagttctgccctgtgaaaagatccagccttccctgccgtcaaggtggcgtcttactcgggatttctgctgttgttgtggccttgggtaaaggcctcccctgagaacacaggacaggcctgctgacaaggctgagtctaccttggcaaagaccaagatattttttcccgggccactggggaatctgaggggtgatgggagagaaggaacctggagtggaaggagcagagttgcaaattaacaacttgcaaatgaggtgcaaataaaatgcagatgattgcgcggctttgaa

SEQ ID NO: 103233 - protein, 140 aa, Artificial Sequence
  derived and/or modified sequence
MASSGMTRRDPLANKVALVTASTDGIGFAIARRLAQDGAHVVVSSRKQQNVDQAVATLQGEGLSVTGTVCHVGKAEDRERLVATLWMDKEKEESMKETLRIRRLGEPEDCAGIVSFLCSEDASYITGETVVVGGGTPSRL

SEQ ID NO: 103234 - protein, 158 aa, Artificial Sequence
  derived and/or modified sequence
MHKAGLLGLCARAWNSVRMASSGMTRRDPLANKVALVTASTDGIGFAIARRLAQDGAHVVVSSRKQQNVDQAVATLQGEGLSVTGTVCHVGKAEDRERLVATLWMDKEKEESMKETLRIRRLGEPEDCAGIVSFLCSEDASYITGETVVVGGGTPSRL

SEQ ID NO: 103235 - DNA, 423 bp, Artificial Sequence
  derived and/or modified sequence
atggctagttccggtatgacaagacgagatccgctagccaacaaggtcgctctcgtgactgccagtaccgacgggatcggttttgctattgcgagacgactcgcccaggacggcgcccatgtggtcgtttcctcccgtaagcagcagaatgtggaccaagcagtggccaccctccaaggggaaggattatccgtgaccggcactgtgtgccatgtgggaaaagccgaagatcgggaacgactcgtcgcaactctctggatggataaggaaaaagaagagagtatgaaggaaactttgcgtatcagaagattgggcgagcccgaagattgcgccggtatcgtctccttcctttgctccgaagacgcttcatatattactggcgagactgtcgtggtcggcggcggaacccctagcagattgtag

SEQ ID NO: 103236 - DNA, 477 bp, Artificial Sequence
  derived and/or modified sequence
atgcataaagctggattgctcgggctgtgtgcccgcgcgtggaacagtgtcagaatggcttccagcgggatgactcggagagatcctctggctaacaaagtagctctggtgactgccagcacggacgggattggtttcgcaatcgccagacgcctggctcaggacggcgcccatgtggtggtctcctcacggaagcaacagaacgtggaccaggccgtggcaactttacagggagaggggctgagtgtgacaggaaccgtctgtcatgttgggaaagctgaggatcgggagcgactggtggctaccctgtggatggacaaggagaaggaagagtcgatgaaggagactctcaggatcaggcgacttggagaacccgaagactgcgcagggatcgtgtcctttctctgcagcgaggacgcatcctacattacgggagaaacagtggtcgtgggcggcggcacaccaagtcggctttag

SEQ ID NO: 103237 - DNA, 423 bp, Artificial Sequence
  derived and/or modified sequence
atggccagcagcggcatgacccggcgggaccccctggccaacaaggtggccctggtgacagccagcacagatggcatcggctttgccatcgcccggcggctggcccaggatggagcccacgtggtggtgagcagcaggaagcagcagaatgtggaccaggccgtggccaccctgcagggcgagggcctgtctgtgacaggcaccgtgtgccacgtgggcaaggccgaggaccgggagcggctggtggccaccctgtggatggacaaggagaaggaggagagcatgaaggagaccctgcgcatccggcggctgggggagcctgaggactgtgccggcatcgtgtccttcctgtgcagtgaagatgccagctacatcaccggggagaccgtggtggtgggcggcggcacccccagccggctgtag

SEQ ID NO: 103238 - DNA, 477 bp, Artificial Sequence
  derived and/or modified sequence
atgcacaaggccggcctgctgggcctgtgtgcccgggcctggaacagcgtgaggatggccagcagcggcatgacccggcgggaccccctggccaacaaggtggccctggtgacagccagcacagatggcatcggctttgccatcgcccggcggctggcccaggatggagcccacgtggtggtgagcagcaggaagcagcagaatgtggaccaggccgtggccaccctgcagggcgagggcctgtctgtgacaggcaccgtgtgccacgtgggcaaggccgaggaccgggagcggctggtggccaccctgtggatggacaaggagaaggaggagagcatgaaggagaccctgcgcatccggcggctgggggagcctgaggactgtgccggcatcgtgtccttcctgtgcagtgaagatgccagctacatcaccggggagaccgtggtggtgggcggcggcacccccagccggctgtag

SEQ ID NO: 103239 - DNA, 423 bp, Artificial Sequence
  derived and/or modified sequence
atggccagcagcggcatgacccggcgggaccccctggccaacaaggtagccctagtcacagcttctaccgacggaattggattcgccattgcccgccgcctggcacaggacggtgcccacgttgtcgtttcttctcgtaagcagcagaatgtcgaccaggcagtcgccactttacaaggggaggggttgagtgtgaccggcacagtatgccatgtcggaaaagctgaagatcgggaacgcctggtggctacattgtggatggataaagaaaaagaagagtccatgaaagagactctgcgtattaggagactgggtgagccagaagattgcgcaggaattgttagcttcctttgcagcgaagacgcaagctacataaccggcgaaacagtggtagttggtggaggtaccccctctagactctag

SEQ ID NO: 103240 - DNA, 477 bp, Artificial Sequence
  derived and/or modified sequence
atgcacaaggccggcctgctgggcctgtgcgcccgggcctggaactcggtcagaatggccagctccggcatgacaagacgggaccctttggcaaacaaggtggccttagtcactgcctccactgatggtattggattcgctattgctaggagactagctcaagacggagctcacgtggtggtgtcctcccgcaagcagcaaaatgtggatcaagccgtggcgaccctgcagggcgaagggctttccgttacaggcaccgtatgtcatgtggggaaggcagaggatcgggaacggttggtagccacgctatggatggacaaggaaaaggaagagtctatgaaagagaccctgaggatcagacgcctgggcgagcccgaggattgcgccggcatcgtgtctttcctgtgttccgaggacgcctcctacatcacaggagaaaccgtggtcgtgggaggcggcacaccttcccggttatag

SEQ ID NO: 103241 - DNA, 423 bp, Artificial Sequence
  derived and/or modified sequence
atggctagttccggaatgacccgacgggatccactggcaaacaaagtcgccctggtgaccgcgagtaccgacggaataggctttgctattgccagacggctggcccaggacggagcacacgtcgttgtgtcttcacggaaacagcagaatgttgaccaggctgtcgcaaccctccagggagaagggctgagcgtgacgggcaccgtttgtcacgttggaaaagccgaggacagggagcgactggtggcgactctgtggatggacaaagagaaagaggagtctatgaaagagacgttgaggatacggaggctgggtgaacccgaagactgcgcagggattgtctcatttctctgcagcgaggacgctagctatatcactggtgagaccgtggtcgtgggtggaggcactccttccaggctatag

SEQ ID NO: 103242 - DNA, 477 bp, Artificial Sequence
  derived and/or modified sequence
atgcataaagcgggacttctaggtctgtgtgccagagcttggaattccgttcgtatggcatcatccggaatgacgaggagggatccactggcgaacaaggtcgctcttgttacagcctctacagatggcattggtttcgcgattgcaagacgcctcgcccaggacggtgctcacgtcgtcgtgagttccagaaaacaacagaatgtagaccaagccgttgcaacactgcagggagagggactctcagtgaccggtactgtctgccacgtagggaaggcagaagatcgggaaagactggttgcaacattatggatggacaaagagaaggaggagtcgatgaaagagacgctacggatcaggaggctgggcgagcctgaggattgcgcaggaattgtgagctttctgtgctccgaagacgcctcttacatcactggagaaaccgttgtggtcgggggagggaccccgagtaggctttag

SEQ ID NO: 103243 - DNA, 423 bp, Artificial Sequence
  derived and/or modified sequence
atggccagcagcggcatgaccagaagagaccccctggccaacaaggtggccctggtgaccgccagcaccgacggcatcggcttcgccatcgccagaagactggcccaggacggcgcccacgtggtggtgagcagcagaaagcagcagaacgtggaccaggccgtggccaccctgcagggcgagggcctgagcgtgaccggcaccgtgtgccacgtgggcaaggccgaggacagagagagactggtggccaccctgtggatggacaaggagaaggaggagagcatgaaggagaccctgagaatcagaagactgggcgagcccgaggactgcgccggcatcgtgagcttcctgtgcagcgaggacgccagctacatcaccggcgagaccgtggtggtgggcggcggcacccccagcagactgtag

SEQ ID NO: 103244 - DNA, 477 bp, Artificial Sequence
  derived and/or modified sequence
atgcacaaggccggcctgctgggcctgtgcgccagagcctggaacagcgtgagaatggccagcagcggcatgaccagaagagaccccctggccaacaaggtggccctggtgaccgccagcaccgacggcatcggcttcgccatcgccagaagactggcccaggacggcgcccacgtggtggtgagcagcagaaagcagcagaacgtggaccaggccgtggccaccctgcagggcgagggcctgagcgtgaccggcaccgtgtgccacgtgggcaaggccgaggacagagagagactggtggccaccctgtggatggacaaggagaaggaggagagcatgaaggagaccctgagaatcagaagactgggcgagcccgaggactgcgccggcatcgtgagcttcctgtgcagcgaggacgccagctacatcaccggcgagaccgtggtggtgggcggcggcacccccagcagactgtag

SEQ ID NO: 103245 - DNA, 496 bp, Artificial Sequence
  derived and/or modified sequence
atacttgctggtctgatccatgcacaaggcggggctgctaggcctctgtgcccgggcttggaattcggtgcggatggccagctccgggatgacccgccgggacccgctcgcaaataaggtggccctggtaacggcctccaccgacgggatcggcttcgccatcgcccggcgtttggcccaggacggggcccatgtggtcgtcagcagccggaagcagcagaatgtggaccaggcggtggccacgctgcagggggaggggctgagcgtgacgggcaccgtgtgccatgtggggaaggcggaggaccgggagcggctggtggccacgctctggatggacaaggaaaaagaggaaagcatgaaagaaaccctgcggataagaaggttaggcgagccagaggattgtgctggcatcgtgtctttcctgtgctctgaagatgccagctacatcactggggaaacagtggtggtgggtggaggaaccccgtcccgcctctga

SEQ ID NO: 103246 - DNA, 785 bp, Artificial Sequence
  derived and/or modified sequence
tccatgcacaaggcggggctgctaggcctctgtgcccgggcttggaattcggtgcggatggccagctccgggatgacccgccgggacccgctcgcaaataaggtggccctggtaacggcctccaccgacgggatcggcttcgccatcgcccggcgtttggcccaggacggggcccatgtggtcgtcagcagccggaagcagcagaatgtggaccaggcggtggccacgctgcagggggaggggctgagcgtgacgggcaccgtgtgccatgtggggaaggcggaggaccgggagcggctggtggccacgctctggatggacaaggaaaaagaggaaagcatgaaagaaaccctgcggataagaaggttaggcgagccagaggattgtgctggcatcgtgtctttcctgtgctctgaagatgccagctacatcactggggaaacagtggtggtgggtggaggaaccccgtcccgcctctgaggaccgggagacagcccacaggccagagttgggctctagctcctggtgctgttcccgcattcacccactggcctttcccacctctgctcaccttactgttcacctcatcaaatcagttctgccctgtgaaaagatccagccttccctgccgtcaaggtggcgtcttactcgggatttctgctgttgttgtggccttgggtaaaggcctcccctgagaacacaggacaggcctgctgacaaggctgagtctaccttggcaaagaccaagatattttttcccgggccactggggaatctgaggggtg

SEQ ID NO: 103247 - protein, 99 aa, Artificial Sequence
  derived and/or modified sequence
MAFRDVAVDFTQDEWRLLSPAQRTLYREVMLENYSNLVSLGISFSKPELITQLEQGKETWREEKKCSPATCPDHQEYGNNCDLQKEADPEPELYLDPFC

SEQ ID NO: 103248 - protein, 559 aa, Artificial Sequence
  derived and/or modified sequence
MQHVLCNHPPWIFTCLCAEGNIQPGDPGPGDQEKQQQASEGRPWSDQAEGPEGEGAMPLFGRTKKRTLGAFSRPPQRQPVSSRNGLRGVELEASPAQSGNPEETDKLLKRIEVLGFGTVNCGECGLSFSKMTNLLSHQRIHSGEKPYVCGVCEKGFSLKKSLARHQKAHSGEKPIVCRECGRGFNRKSTLIIHERTHSGEKPYMCSECGRGFSQKSNLIIHQRTHSGEKPYVCRECGKGFSQKSAVVRHQRTHLEEKTIVCSDCGLGFSDRSNLISHQRTHSGEKPYACKECGRCFRQRTTLVNHQRTHSKEKPYVCGVCGHSFSQNSTLISHRRTHTGEKPYVCGVCGRGFSLKSHLNRHQNIHSGEKPIVCKDCGRGFSQQSNLIRHQRTHSGEKPMVCGECGRGFSQKSNLVAHQRTHSGERPYVCRECGRGFSHQAGLIRHKRKHSREKPYMCRQCGLGFGNKSALITHKRAHSEEKPCVCRECGQGFLQKSHLTLHQMTHTGEKPYVCKTCGRGFSLKSHLSRHRKTTSVHHRLPVQPDPEPCAGQPSDSLYSL

SEQ ID NO: 103249 - DNA, 300 bp, Artificial Sequence
  derived and/or modified sequence
atggccttcagagacgtggccgtggacttcacccaggacgagtggagactgctgagccccgcccagagaaccctgtacagagaggtgatgctggagaactacagcaacctggtgagcctgggcatcagcttcagcaagcccgagctgatcacccagctggagcagggcaaggagacctggagagaggagaagaagtgcagccccgccacctgccccgaccaccaggagtacggcaacaactgcgacctgcagaaggaggccgaccccgagcccgagctgtacctggaccccttctgctag

SEQ ID NO: 103250 - DNA, 300 bp, Artificial Sequence
  derived and/or modified sequence
atggcattccgagacgtcgccgtggactttacccaggacgagtggcggttgttatcccccgcccaacgcactctctaccgggaggtcatgcttgagaactattctaatctggtgtccctgggaattagcttctctaaacctgagctgattactcagctggaacaaggaaaggagacctggagggaagagaaaaagtgtagtcctgctacgtgccctgaccaccaagaatacggtaacaactgtgacttacagaaagaggccgaccctgaacccgagctgtatttggaccctttttgctag

SEQ ID NO: 103251 - DNA, 300 bp, Artificial Sequence
  derived and/or modified sequence
atggccttcagagatgtggccgtggacttcacccaggatgagtggaggctgctgagccctgcccagaggaccctgtaccgggaggtgatgctggagaactacagcaacctggtgtccctgggcatctccttcagcaagccagagctgatcacccagctggagcagggcaaggagacctggagggaggagaagaagtgcagccctgccacctgcccagaccaccaggagtatggcaacaactgtgacctgcagaaggaggccgaccctgagcctgagctgtacctggaccccttctgctag

SEQ ID NO: 103252 - DNA, 300 bp, Artificial Sequence
  derived and/or modified sequence
atggccttccgggacgtggccgtggacttcacccaggacgagtggcgattgctctctcctgcacagcgcaccctctaccgggaggtaatgctagaaaattactcgaacctcgtgagcttgggaataagcttctcaaaaccagaattgattacccagctggaacagggtaaggagacctggagggaagagaaaaagtgttctcctgccacttgtcctgatcatcaggaatacggaaataattgcgatttgcaaaaggaggctgaccccgaacccgagctttatctggatcctttctgctag

SEQ ID NO: 103253 - DNA, 300 bp, Artificial Sequence
  derived and/or modified sequence
atggcttttagagacgtcgcggtggacttcacacaggacgagtggagactattgtcaccagctcagcggaccctctaccgtgaggttatgctggagaattactctaacctggtttctcttgggatttctttcagcaagcccgaattgatcacacaactcgagcagggaaaggagacttggcgggaagagaagaagtgcagcccagccacctgtccagaccatcaggaatatggaaacaattgtgatctgcaaaaagaggccgaccctgagccagagctgtatctggatccgttctgttag

SEQ ID NO: 103254 - DNA, 481 bp, Artificial Sequence
  derived and/or modified sequence
ggcgctgtgccgaggattcggggtagtgtagtcctggcgccccgctggaggagctccccagctggtggctggagcgaccccttgttctttggtggcgctgatctaccttctgagatatcatccttcttcagggagataaggaaaaaaagccacagggtcccggagagccaggggaatggcacacatggcattcagggatgtggctgtggatttcacccaggatgagtggaggctgctgagccctgctcaaaggactctgtacagagaggtgatgctggagaactacagcaacctggtctcactgggaatttcattttctaaaccagaactcatcacccagctggagcaagggaaagagacctggagagaggaaaaaaaatgttcaccggcaacctgtccagatcatcaagaatatggaaacaactgtgacctacagaaagaagcagatccagagccagagctctacctcgatcctttctgc

SEQ ID NO: 103255 - DNA, 2316 bp, Artificial Sequence
  derived and/or modified sequence
attcggggtagtgtagtcctggcgccccgctggaggagctccccagctggtggctggagcgaccccttgttctttggtggcgctgttttgtgttacaggcacacatggcattcagggatgtggctgtggatttcacccaggatgagtggaggctgctgagccctgctcaaaggactctgtacagagaggtgatgctggagaactacagcaacctggtctcactgggaatttcattttctaaaccagaactcatcacccagctggagcaagggaaagagacctggagagaggaaaaaaaatgttcaccggcaacctgtccagaaaaacagcagctcttacaatgatgttgagcacattaaaaagaatgctgtacaatccaaggagcaagtcattgtggttgcccaggaagctgtcttggaaacccaaaatatatgtgtaacgggaggaagactgttctagcagatccagagccagagctctacctcgatcctttctgccctccgggtttctccagtcagaaattccccatgcagcatgtgctgtgtaatcatcccccctggatcttcacatgcttgtgtgcagaaggtaacatccagcctggggatccgggcccaggggaccaggagaagcagcaacaagcctctgaggggagaccctggagtgatcaagcagaaggtcctgagggagaaggtgccatgcctttgtttggaagaaccaagaaaaggactctgggagcgttctccaggccaccccagaggcagccagtcagctctcggaacggcctcagaggggtggagttagaagccagcccagctcagtcagggaaccctgaggaaacagacaaattgttgaagaggatagaagtcttaggatttggaacagtcaactgtggagagtgtggactgagcttcagcaagatgacaaacctgctcagtcaccagcggatacactcaggggagaagccctacgtgtgtggggtatgtgagaagggcttcagcctaaagaagagcctcgccagacaccagaaggcacactcgggggagaagccaattgtgtgcagggagtgtggacgaggctttaaccggaagtcaacgctaatcatacacgaacggacacactccggtgagaaaccttacatgtgcagtgagtgtgggcgaggcttcagccagaagtcaaacctcatcatacaccagaggacacactcaggggaaaagccttacgtgtgccgggaatgtggcaaaggcttcagccagaagtcagctgtcgtgagacaccagaggacacacttggaggagaagaccatcgtgtgcagtgactgtggcctgggcttcagcgacaggtcaaacctcatctcccaccagaggacgcactctggggagaagccctacgcctgcaaggagtgtgggcgatgcttcaggcagaggaccacccttgtcaaccaccagaggacacactcaaaggagaagccctatgtgtgcggggtgtgtgggcacagcttcagccagaattcaaccctcatctctcacaggcggacacacactggggagaagccgtatgtttgtggggtgtgtgggcgaggctttagtctcaagtcacacctcaacagacaccagaacatacactcaggagagaagcccattgtgtgcaaggactgtggccggggcttcagccagcaatccaacctcatcagacaccagaggacgcactcaggcgagaagcccatggtgtgtggggagtgcgggcgaggcttcagccagaagtcaaaccttgttgcacaccagaggacgcactcaggggagaggccgtatgtgtgccgagagtgcgggcgaggctttagccaccaggccggtctcatcaggcacaagcggaagcactcgagggagaagccctacatgtgcaggcagtgtggactgggctttggcaataagtcagctctaattacacacaagcgggctcactcggaagagaagccttgtgtgtgcagagagtgtggccaaggctttctccaaaagtcacacctcaccttacatcaaatgacacatacgggggagaagccatatgtgtgcaagacgtgtgggcggggcttcagcctcaagtctcacctcagcagacacaggaagaccacgtctgtccaccacagactgccagtgcagcccgaccctgagccgtgtgcagggcaaccttcggattccttatactctctctgaaggcaaagatggggacaaggactaagagtcagaatgttgacactttgatgaaatggagtagagaaatgcattctgtaagtggtcaaaggacatttgactgtttactttc

SEQ ID NO: 103256 - DNA, 540 bp, Artificial Sequence
  derived and/or modified sequence
atggccttcagagacgtggccgtggacttcacccaggacgagtggagactgctgagccccgcccagagaaccctgtacagagaggtgatgctggagaactacagcaacctggtgagcctgggcatcagcttcagcaagcccgagctgatcacccagctggagcagggcaaggagacctggagagaggagaagaagtgcagccccgccacctgccccgccgaccccgagcccgagctgtacctggaccccttctgcccccccggcttcagcagccagaagttccccatgcagcacgtgctgtgcaaccaccccccctggatcttcacctgcctgtgcgccgagggcaacatccagcccggcgaccccggccccggcgaccaggagaagcagcagcaggccagcgagggcagaccctggagcgaccaggccgagggccccgagggcgagggcgccatgcccctgttcggcagaaccaagaagagaaccctgggcgccttcagcagacccccccagagacagcccgtgagcagcagaaactag

SEQ ID NO: 103257 - DNA, 432 bp, Artificial Sequence
  derived and/or modified sequence
atggccttcagagacgtggccgtggacttcacccaggacgagtggagactgctgagccccgcccagagaaccctgtacagagaggtgatgctggagaactacagcaacctggtgagcctgggcatcagcttcagcaagcccgagctgatcacccagctggagcagggcaaggagacctggagagaggagaagaagtgcagccccgccacctgccccgccgaccccgagcccgagctgtacctggaccccttctgcccccccggcttcagcagccagaagttccccatgcagcacgtgctgtgcaaccaccccccctggatcttcacctgcctgtgcgccgagggcaacatccagcccggcgaccccggccccggcgaccaggagaagcagcagcaggccagcgagggcagaccctggagcgaccaggcctag

SEQ ID NO: 103258 - DNA, 540 bp, Artificial Sequence
  derived and/or modified sequence
atggcctttcgagacgtcgcggtcgattttacgcaggacgagtggcggctgctgtccccggctcagcgtaccctttaccgcgaggtcatgttggaaaattatagtaacctcgtgtctctggggatcagcttctctaaacccgagctcatcacccagcttgaacagggaaaagagacttggagggaggaaaaaaagtgcagtcctgcaacttgccccgccgatccagagccagaattatatctcgatcctttttgccccccgggcttttcctcccagaagtttcccatgcagcacgtgctgtgtaatcaccccccatggatctttacatgtttatgtgcggagggaaacatacagcccggggaccccggcccaggcgaccaagagaaacagcagcaggccagcgagggacgcccttggtcagaccaagccgagggacccgaaggggagggcgctatgcccctgtttggccgcacgaaaaagaggactctcggagccttttctcgaccaccacagagacagcctgtcagctctcgcaactag

SEQ ID NO: 103259 - DNA, 432 bp, Artificial Sequence
  derived and/or modified sequence
atggcttttcgcgacgtcgctgtcgattttacccaagatgagtggcgcctgctgtcacctgctcagcgcaccctctacagggaggtgatgctggagaactatagtaatctcgtctctctcgggatctccttttctaagcctgaattgatcacgcaattggagcagggcaaggaaacatggagagaagaaaaaaagtgctcgcctgcgacttgtcctgcggaccctgagcccgagctgtacctcgaccctttctgtccacctggttttagttcacagaagttcccaatgcagcacgtactgtgcaatcaccctccatggatcttcacatgcctctgcgcagaggggaatattcagccaggcgatccaggccccggggaccaagaaaaacaacagcaggcctctgaagggagaccttggtcagatcaggcctag

SEQ ID NO: 103260 - DNA, 540 bp, Artificial Sequence
  derived and/or modified sequence
atggccttcagagatgtggccgtggacttcacccaggatgagtggaggctgctgagccctgcccagaggaccctgtaccgggaggtgatgctggagaactacagcaacctggtgtccctgggcatctccttcagcaagccagagctgatcacccagctggagcagggcaaggagacctggagggaggagaagaagtgcagccctgccacctgcccagctgaccctgagcctgagctgtacctggaccccttctgccccccaggcttcagcagccagaagttccccatgcagcacgtgctgtgcaaccaccccccctggatcttcacctgcctgtgtgccgagggcaacatccagcccggggaccccggccctggggaccaggagaagcagcagcaggccagcgagggccggccctggagcgaccaggccgagggccctgagggggagggcgccatgcccctgtttggaagaaccaagaagaggaccctgggcgccttcagcaggcctccccagaggcagcctgtgagcagcaggaactag

SEQ ID NO: 103261 - DNA, 432 bp, Artificial Sequence
  derived and/or modified sequence
atggccttcagagatgtggccgtggacttcacccaggatgagtggaggctgctgagccctgcccagaggaccctgtaccgggaggtgatgctggagaactacagcaacctggtgtccctgggcatctccttcagcaagccagagctgatcacccagctggagcagggcaaggagacctggagggaggagaagaagtgcagccctgccacctgcccagctgaccctgagcctgagctgtacctggaccccttctgccccccaggcttcagcagccagaagttccccatgcagcacgtgctgtgcaaccaccccccctggatcttcacctgcctgtgtgccgagggcaacatccagcccggggaccccggccctggggaccaggagaagcagcagcaggccagcgagggccggccctggagcgaccaggcctag

SEQ ID NO: 103262 - DNA, 540 bp, Artificial Sequence
  derived and/or modified sequence
atggccttccgggacgtggccgtggacttcacccaggacgagtggcgcctactttctccggcccagcgcacgctctatagggaagtgatgctcgagaactactctaacttagttagtctgggcatcagcttctctaaaccggagttgattacacagcttgaacagggaaaagagacctggcgggaggagaaaaaatgtagcccagctacatgccctgcagacccagaaccagagttgtatttggacccattctgcccacctggcttttcctcacagaagttccccatgcagcacgtgctatgcaatcatcccccttggatatttacctgtctgtgcgcggaagggaacatacagccaggtgaccccggcccaggagaccaagagaaacagcagcaagcgtctgaagggagaccttggagcgatcaggcagaggggccagaaggggaaggcgccatgccactgttcggtagaacaaaaaagcggactctgggtgcttttagtagacctccacagcgccagcccgtctcttctagaaattag

SEQ ID NO: 103263 - DNA, 432 bp, Artificial Sequence
  derived and/or modified sequence
atggccttccgggacgtggccgtggacttcacccaggacgagtggaggctcctttctcctgctcagcggaccttataccgcgaagtcatgctggagaactacagtaacttagtatccttgggaatctccttcagcaagccagagctcattacccaactcgaacagggcaaagaaacctggagggaggagaagaagtgcagcccagccacttgccccgccgatcccgaaccagagctatacctggacccgttttgccctccaggattttccagccaaaaattcccaatgcaacacgtgctctgcaatcatcccccatggatcttcacctgcctctgtgccgaaggcaacattcagcctggcgaccccggccctggagaccaggaaaagcagcagcaggcgtcagagggacgtccatggtctgatcaggcttag

SEQ ID NO: 103264 - DNA, 540 bp, Artificial Sequence
  derived and/or modified sequence
atggcatttcgggacgtagccgtggattttactcaagatgagtggcgactactgtcccctgctcagcgtacactctaccgcgaggtaatgctggaaaactacagcaatctggtgtccttgggtatatcgttcagcaagccagaattgattacgcagttagagcaggggaaagagacttggcgggaagaaaagaagtgtagccctgctacatgcccggcagacccagaaccggaattgtacctggatccgttttgcccccctggcttctcctcacagaagtttccaatgcagcacgtgctctgcaatcacccaccttggatttttacttgtctctgcgccgaaggtaacatacagcctggagacccaggtcctggagatcaggaaaaacagcagcaagcttcggagggaagaccttggtccgatcaagctgaaggtcctgagggagagggagccatgcctctctttggacggacaaagaagcggacactgggggcattctctcgcccacctcaaagacagcccgtatcctcccgtaactag

SEQ ID NO: 103265 - DNA, 432 bp, Artificial Sequence
  derived and/or modified sequence
atggccttcagggacgtggccgtcgactttacccaagatgagtggaggcttttgtcccctgctcagagaacactttatcgtgaagttatgctggaaaactacagcaacttggtgagcctgggaatttccttttccaagcccgagctgattacccagctggagcagggcaaagagacatggagagaggagaaaaagtgttcaccggcaacatgtccagcagatcccgaaccggaactttacctggacccattttgccctccaggcttctccagccagaaatttcccatgcagcacgttctgtgtaaccatccgccttggatctttacatgtctgtgcgccgaaggcaatatccagccaggcgatcctggcccaggagaccaggagaagcagcagcaagcctcagaaggccgtccctggtctgaccaggcctag

SEQ ID NO: 103266 - protein, 143 aa, Artificial Sequence
  derived and/or modified sequence
MAFRDVAVDFTQDEWRLLSPAQRTLYREVMLENYSNLVSLGISFSKPELITQLEQGKETWREEKKCSPATCPADPEPELYLDPFCPPGFSSQKFPMQHVLCNHPPWIFTCLCAEGNIQPGDPGPGDQEKQQQASEGRPWSDQA

SEQ ID NO: 103267 - DNA, 637 bp, Artificial Sequence
  derived and/or modified sequence
gatgaatttttggactgagtggccaagaagctccatggtgagcactcacagtctaaggctggaagtttaatgaactgttttctacatttcacaggcacacatggcattcagggatgtggctgtggatttcacccaggatgagtggaggctgctgagccctgctcaaaggactctgtacagagaggtgatgctggagaactacagcaacctggtctcactgggaatttcattttctaaaccagaactcatcacccagctggagcaagggaaagagacctggagagaggaaaaaaaatgttcaccggcaacctgtccagcagatccagagccagagctctacctcgatcctttctgccctccgggtttctccagtcagaaattccccatgcagcatgtgctgtgtaatcatcccccctggatcttcacatgcttgtgtgcagaaggtaacatccagcctggggatccgggcccaggggaccaggagaagcagcaacaagcctctgaggggagaccctggagtgatcaagcagaaggtcctgagggagaaggtgccatgcctttgtttggaagaaccaagaaaaggactctgggagcgttctccaggccaccccagaggcagccagtcagctctcggaac

SEQ ID NO: 103268 - DNA, 523 bp, Artificial Sequence
  derived and/or modified sequence
agtgtagtcctggcgccccgctggaggagctccccagctggtggctggagcgaccccttgttctttggtggcgctgttttgtgttacaggcacacatggcattcagggatgtggctgtggatttcacccaggatgagtggaggctgctgagccctgctcaaaggactctgtacagagaggtgatgctggagaactacagcaacctggtctcactgggaatttcattttctaaaccagaactcatcacccagctggagcaagggaaagagacctggagagaggaaaaaaaatgttcaccggcaacctgtccagcagatccagagccagagctctacctcgatcctttctgccctccgggtttctccagtcagaaattccccatgcagcatgtgctgtgtaatcatcccccctggatcttcacatgcttgtgtgcagaaggtaacatccagcctggggatccgggcccaggggaccaggagaagcagcaacaagcctctgaggggagaccctggagtgatcaagc

SEQ ID NO: 103269 - DNA, 1999 bp, Artificial Sequence
  derived and/or modified sequence
agtgtagtcctggcgccccgctggaggagctccccagctggtggctggagcgaccccttgttctttggtggcgctgatccagagccagagctctacctcgatcctttctgccctccgggtttctccagtcagaaattccccatgcagcatgtgctgtgtaatcatcccccctggatcttcacatgcttgtgtgcagaaggtaacatccagcctggggatccgggcccaggggaccaggagaagcagcaacaagcctctgaggggagaccctggagtgatcaagcagaaggtcctgagggagaaggtgccatgcctttgtttggaagaaccaagaaaaggactctgggagcgttctccaggccaccccagaggcagccagtcagctctcggaacggcctcagaggggtggagttagaagccagcccagctcagtcagggaaccctgaggaaacagacaaattgttgaagaggatagaagtcttaggatttggaacagtcaactgtggagagtgtggactgagcttcagcaagatgacaaacctgctcagtcaccagcggatacactcaggggagaagccctacgtgtgtggggtatgtgagaagggcttcagcctaaagaagagcctcgccagacaccagaaggcacactcgggggagaagccaattgtgtgcagggagtgtggacgaggctttaaccggaagtcaacgctaatcatacacgaacggacacactccggtgagaaaccttacatgtgcagtgagtgtgggcgaggcttcagccagaagtcaaacctcatcatacaccagaggacacactcaggggaaaagccttacgtgtgccgggaatgtggcaaaggcttcagccagaagtcagctgtcgtgagacaccagaggacacacttggaggagaagaccatcgtgtgcagtgactgtggcctgggcttcagcgacaggtcaaacctcatctcccaccagaggacgcactctggggagaagccctacgcctgcaaggagtgtgggcgatgcttcaggcagaggaccacccttgtcaaccaccagaggacacactcaaaggagaagccctatgtgtgcggggtgtgtgggcacagcttcagccagaattcaaccctcatctctcacaggcggacacacactggggagaagccgtatgtttgtggggtgtgtgggcgaggctttagtctcaagtcacacctcaacagacaccagaacatacactcaggagagaagcccattgtgtgcaaggactgtggccggggcttcagccagcaatccaacctcatcagacaccagaggacgcactcaggcgagaagcccatggtgtgtggggagtgcgggcgaggcttcagccagaagtcaaaccttgttgcacaccagaggacgcactcaggggagaggccgtatgtgtgccgagagtgcgggcgaggctttagccaccaggccggtctcatcaggcacaagcggaagcactcgagggagaagccctacatgtgcaggcagtgtggactgggctttggcaataagtcagctctaattacacacaagcgggctcactcggaagagaagccttgtgtgtgcagagagtgtggccaaggctttctccaaaagtcacacctcaccttacatcaaatgacacatacgggggagaagccatatgtgtgcaagacgtgtgggcggggcttcagcctcaagtctcacctcagcagacacaggaagaccacgtctgtccaccacagactgccagtgcagcccgaccctgagccgtgtgcagggcaaccttcggattccttatactctctctgaaggcaaagatggggacaaggactaagagtcagaatgttgacactttgatgaaatggagtagagaaatgcattctgtaagtggtcaaaggacatttgactgtttactttctccacactaagtcttctccatgttttgtggccttcggttgtaataaacttggcttctttatacatctgt

SEQ ID NO: 103270 - DNA, 2064 bp, Artificial Sequence
  derived and/or modified sequence
agtcctggcgccccgctggaggagctccccagctggtggctggagcgaccccttgttctttggtggcgctgaactcatcacccagctggagcaagggaaagagacctggagagaggaaaaaaaatgttcaccggcaacctgtccagcagatccagagccagagctctacctcgatcctttctgccctccgggtttctccagtcagaaattccccatgcagcatgtgctgtgtaatcatcccccctggatcttcacatgcttgtgtgcagaaggtaacatccagcctggggatccgggcccaggggaccaggagaagcagcaacaagcctctgaggggagaccctggagtgatcaagcagaaggtcctgagggagaaggtgccatgcctttgtttggaagaaccaagaaaaggactctgggagcgttctccaggccaccccagaggcagccagtcagctctcggaacggcctcagaggggtggagttagaagccagcccagctcagtcagggaaccctgaggaaacagacaaattgttgaagaggatagaagtcttaggatttggaacagtcaactgtggagagtgtggactgagcttcagcaagatgacaaacctgctcagtcaccagcggatacactcaggggagaagccctacgtgtgtggggtatgtgagaagggcttcagcctaaagaagagcctcgccagacaccagaaggcacactcgggggagaagccaattgtgtgcagggagtgtggacgaggctttaaccggaagtcaacgctaatcatacacgaacggacacactccggtgagaaaccttacatgtgcagtgagtgtgggcgaggcttcagccagaagtcaaacctcatcatacaccagaggacacactcaggggaaaagccttacgtgtgccgggaatgtggcaaaggcttcagccagaagtcagctgtcgtgagacaccagaggacacacttggaggagaagaccatcgtgtgcagtgactgtggcctgggcttcagcgacaggtcaaacctcatctcccaccagaggacgcactctggggagaagccctacgcctgcaaggagtgtgggcgatgcttcaggcagaggaccacccttgtcaaccaccagaggacacactcaaaggagaagccctatgtgtgcggggtgtgtgggcacagcttcagccagaattcaaccctcatctctcacaggcggacacacactggggagaagccgtatgtttgtggggtgtgtgggcgaggctttagtctcaagtcacacctcaacagacaccagaacatacactcaggagagaagcccattgtgtgcaaggactgtggccggggcttcagccagcaatccaacctcatcagacaccagaggacgcactcaggcgagaagcccatggtgtgtggggagtgcgggcgaggcttcagccagaagtcaaaccttgttgcacaccagaggacgcactcaggggagaggccgtatgtgtgccgagagtgcgggcgaggctttagccaccaggccggtctcatcaggcacaagcggaagcactcgagggagaagccctacatgtgcaggcagtgtggactgggctttggcaataagtcagctctaattacacacaagcgggctcactcggaagagaagccttgtgtgtgcagagagtgtggccaaggctttctccaaaagtcacacctcaccttacatcaaatgacacatacgggggagaagccatatgtgtgcaagacgtgtgggcggggcttcagcctcaagtctcacctcagcagacacaggaagaccacgtctgtccaccacagactgccagtgcagcccgaccctgagccgtgtgcagggcaaccttcggattccttatactctctctgaaggcaaagatggggacaaggactaagagtcagaatgttgacactttgatgaaatggagtagagaaatgcattctgtaagtggtcaaaggacatttgactgtttactttctccacactaagtcttctccatgttttgtggccttcggttgtaataaacttggcttctttat

SEQ ID NO: 103271 - protein, 1400 aa, Artificial Sequence
  derived and/or modified sequence
MPKIVLNGVTVDFPFQPYKCQQEYMTKVLECLQQKVNGILESPTGTGKTLCLLCTTLAWREHLRDGISARKIAERAQGELFPDRALSSWGNAAAAAGDPIACYTDIPKIIYASRTHSQLTQVINELRNTSYRPKVCVLGSREQLCIHPEVKKQESNHLQIHLCRKKVASRSCHFYNNVEEKSLEQELASPILDIEDLVKSGSKHRVCPYYLSRNLKQQADIIFMPYNYLLDAKSRRAHNIDLKGTVVIFDEAHNVEKMCEESASFDLTPHDLASGLDVIDQVLEEQTKAAQQGEPHPEFSADSPSPGLNMELEDIAKLKMILLRLEGAIDAVELPGDDSGVTKPGSYIFELFAEAQITFQTKGCILDSLDQIIQHLAGRAGVFTNTAGLQKLADIIQIVFSVDPSEGSPGSPAGLGALQSYKVHIHPDAGHRRTAQRSDAWSTTAARKRGKVLSYWCFSPGHSMHELVRQGVRSLILTSGTLAPVSSFALEMQIPFPVCLENPHIIDKHQIWVGVVPRGPDGAQLSSAFDRRFSEECLSSLGKALGNIARVVPYGLLIFFPSYPVMEKSLEFWRARDLARKMEALKPLFVEPRSKGSFSETISAYYARVAAPGSTGATFLAVCRGKASEGLDFSDTNGRGVIVTGLPYPPRMDPRVVLKMQFLDEMKGQGGAGGQFLSGQEWYRQQASRAVNQAIGRVIRHRQDYGAVFLCDHRFAFADARAQLPSWVRPHVRVYDNFGHVIRDVAQFFRVAERTMPAPAPRATAPSVRGEDAVSEAKSPGPFFSTRKAKSLDLHVPSLKQRSSGSPAAGDPESSLCVEYEQEPVPARQRPRGLLAALEHSEQRAGSPGEEQAHSCSTLSLLSEKRPAEEPRGGRKKIRLVSHPEEPVAGAQTDRAKLFMVAVKQELSQANFATFTQALQDYKGSDDFAALAACLGPLFAEDPKKHNLLQGFYQFVRPHHKQQFEEVCIQLTGRGCGYRPEHSIPRRQRAQPVLDPTGRTAPDPKLTVSTAAAQQLDPQEHLNQGRPHLSPRPPPTGDPGSQPQWGSGVPRAGKQGQHAVSAYLADARRALGSAGCSQLLAALTAYKQDDDLDKVLAVLAALTTAKPEDFPLLHRFSMFVRPHHKQRFSQTCTDLTGRPYPGMEPPGPQEERLAVPPVLTHRAPQPGPSRSEKTGKTQSKISSFLRQRPAGTVGAGGEDAGPSQSSGPPHGPAASEWGEPHGRDIAGQQATGAPGGPLSAGCVCQGCGAEDVVPFQCPACDFQRCQACWQRHLQASRMCPACHTASRKQSVMQVFWPEPHKDHEGAGGARPVAAVPGVGAACPAAGAGCTRSGRNTHLPLAGRRDRGAAGVRPVPPRHLCAAAVPPRQPHDVWPVSTAPLHAVLELPRALPLLQRPLRGA

SEQ ID NO: 103272 - protein, 545 aa, Artificial Sequence
  derived and/or modified sequence
MPAPAPRATAPSVRGEDAVSEAKSPGPFFSTRKAKSLDLHVPSLKQRSSGSPAAGDPESSLCVEYEQEPVPARQRPRGLLAALEHSEQRAGSPGEEQAHSCSTLSLLSEKRPAEEPRGGRKKIRLVSHPEEPVAGAQTDRAKLFMVAVKQELSQANFATFTQALQDYKGSDDFAALAACLGPLFAEDPKKHNLLQGFYQFVRPHHKQQFEEVCIQLTGRGCGYRPEHSIPRRQRAQPVLDPTGRTAPDPKLTVSTAAAQQLDPQEHLNQGRPHLSPRPPPTGDPGSQPQWGSGVPRAGKQGQHAVSAYLADARRALGSAGCSQLLAALTAYKQDDDLDKVLAVLAALTTAKPEDFPLLHRFSMFVRPHHKQRFSQTCTDLTGRPYPGMEPPGPQEERLAVPPVLTHRAPQPGPSRSEKTGKTQSKISSFLRQRPAGTVGAGGEDAGPSQSSGPPHGPAASEWGEPHGRDIAGQQATGAPGGPLSAGCVCQGCGAEDVVPFQCPACDFQRCQACWQRHLQASRMCPACHTASRKQSVMQVFWPEPQ

SEQ ID NO: 103273 - DNA, 4203 bp, Artificial Sequence
  derived and/or modified sequence
atgcccaagatcgtgctgaacggcgtgaccgtggacttccccttccagccctacaagtgccagcaggagtacatgaccaaggtgctggagtgcctgcagcagaaggtgaacggcatcctggagagccccaccggcaccggcaagaccctgtgcctgctgtgcaccaccctggcctggagagagcacctgagagacggcatcagcgccagaaagatcgccgagagagcccagggcgagctgttccccgacagagccctgagcagctggggcaacgccgccgccgccgccggcgaccccatcgcctgctacaccgacatccccaagatcatctacgccagcagaacccacagccagctgacccaggtgatcaacgagctgagaaacaccagctacagacccaaggtgtgcgtgctgggcagcagagagcagctgtgcatccaccccgaggtgaagaagcaggagagcaaccacctgcagatccacctgtgcagaaagaaggtggccagcagaagctgccacttctacaacaacgtggaggagaagagcctggagcaggagctggccagccccatcctggacatcgaggacctggtgaagagcggcagcaagcacagagtgtgcccctactacctgagcagaaacctgaagcagcaggccgacatcatcttcatgccctacaactacctgctggacgccaagagcagaagagcccacaacatcgacctgaagggcaccgtggtgatcttcgacgaggcccacaacgtggagaagatgtgcgaggagagcgccagcttcgacctgaccccccacgacctggccagcggcctggacgtgatcgaccaggtgctggaggagcagaccaaggccgcccagcagggcgagccccaccccgagttcagcgccgacagccccagccccggcctgaacatggagctggaggacatcgccaagctgaagatgatcctgctgagactggagggcgccatcgacgccgtggagctgcccggcgacgacagcggcgtgaccaagcccggcagctacatcttcgagctgttcgccgaggcccagatcaccttccagaccaagggctgcatcctggacagcctggaccagatcatccagcacctggccggcagagccggcgtgttcaccaacaccgccggcctgcagaagctggccgacatcatccagatcgtgttcagcgtggaccccagcgagggcagccccggcagccccgccggcctgggcgccctgcagagctacaaggtgcacatccaccccgacgccggccacagaagaaccgcccagagaagcgacgcctggagcaccaccgccgccagaaagagaggcaaggtgctgagctactggtgcttcagccccggccacagcatgcacgagctggtgagacagggcgtgagaagcctgatcctgaccagcggcaccctggcccccgtgagcagcttcgccctggagatgcagatccccttccccgtgtgcctggagaacccccacatcatcgacaagcaccagatctgggtgggcgtggtgcccagaggccccgacggcgcccagctgagcagcgccttcgacagaagattcagcgaggagtgcctgagcagcctgggcaaggccctgggcaacatcgccagagtggtgccctacggcctgctgatcttcttccccagctaccccgtgatggagaagagcctggagttctggagagccagagacctggccagaaagatggaggccctgaagcccctgttcgtggagcccagaagcaagggcagcttcagcgagaccatcagcgcctactacgccagagtggccgcccccggcagcaccggcgccaccttcctggccgtgtgcagaggcaaggccagcgagggcctggacttcagcgacaccaacggcagaggcgtgatcgtgaccggcctgccctacccccccagaatggaccccagagtggtgctgaagatgcagttcctggacgagatgaagggccagggcggcgccggcggccagttcctgagcggccaggagtggtacagacagcaggccagcagagccgtgaaccaggccatcggcagagtgatcagacacagacaggactacggcgccgtgttcctgtgcgaccacagattcgccttcgccgacgccagagcccagctgcccagctgggtgagaccccacgtgagagtgtacgacaacttcggccacgtgatcagagacgtggcccagttcttcagagtggccgagagaaccatgcccgcccccgcccccagagccaccgcccccagcgtgagaggcgaggacgccgtgagcgaggccaagagccccggccccttcttcagcaccagaaaggccaagagcctggacctgcacgtgcccagcctgaagcagagaagcagcggcagccccgccgccggcgaccccgagagcagcctgtgcgtggagtacgagcaggagcccgtgcccgccagacagagacccagaggcctgctggccgccctggagcacagcgagcagagagccggcagccccggcgaggagcaggcccacagctgcagcaccctgagcctgctgagcgagaagagacccgccgaggagcccagaggcggcagaaagaagatcagactggtgagccaccccgaggagcccgtggccggcgcccagaccgacagagccaagctgttcatggtggccgtgaagcaggagctgagccaggccaacttcgccaccttcacccaggccctgcaggactacaagggcagcgacgacttcgccgccctggccgcctgcctgggccccctgttcgccgaggaccccaagaagcacaacctgctgcagggcttctaccagttcgtgagaccccaccacaagcagcagttcgaggaggtgtgcatccagctgaccggcagaggctgcggctacagacccgagcacagcatccccagaagacagagagcccagcccgtgctggaccccaccggcagaaccgcccccgaccccaagctgaccgtgagcaccgccgccgcccagcagctggacccccaggagcacctgaaccagggcagaccccacctgagccccagacccccccccaccggcgaccccggcagccagccccagtggggcagcggcgtgcccagagccggcaagcagggccagcacgccgtgagcgcctacctggccgacgccagaagagccctgggcagcgccggctgcagccagctgctggccgccctgaccgcctacaagcaggacgacgacctggacaaggtgctggccgtgctggccgccctgaccaccgccaagcccgaggacttccccctgctgcacagattcagcatgttcgtgagaccccaccacaagcagagattcagccagacctgcaccgacctgaccggcagaccctaccccggcatggagccccccggcccccaggaggagagactggccgtgccccccgtgctgacccacagagccccccagcccggccccagcagaagcgagaagaccggcaagacccagagcaagatcagcagcttcctgagacagagacccgccggcaccgtgggcgccggcggcgaggacgccggccccagccagagcagcggccccccccacggccccgccgccagcgagtggggcgagccccacggcagagacatcgccggccagcaggccaccggcgcccccggcggccccctgagcgccggctgcgtgtgccagggctgcggcgccgaggacgtggtgcccttccagtgccccgcctgcgacttccagagatgccaggcctgctggcagagacacctgcaggccagcagaatgtgccccgcctgccacaccgccagcagaaagcagagcgtgatgcaggtgttctggcccgagccccacaaggaccacgagggcgccggcggcgccagacccgtggccgccgtgcccggcgtgggcgccgcctgccccgccgccggcgccggctgcaccagaagcggcagaaacacccacctgcccctggccggcagaagagacagaggcgccgccggcgtgagacccgtgccccccagacacctgtgcgccgccgccgtgccccccagacagccccacgacgtgtggcccgtgagcaccgcccccctgcacgccgtgctggagctgcccagagccctgcccctgctgcagagacccctgagaggcgcctag

SEQ ID NO: 103274 - DNA, 1638 bp, Artificial Sequence
  derived and/or modified sequence
atgcccgcccccgcccccagagccaccgcccccagcgtgagaggcgaggacgccgtgagcgaggccaagagccccggccccttcttcagcaccagaaaggccaagagcctggacctgcacgtgcccagcctgaagcagagaagcagcggcagccccgccgccggcgaccccgagagcagcctgtgcgtggagtacgagcaggagcccgtgcccgccagacagagacccagaggcctgctggccgccctggagcacagcgagcagagagccggcagccccggcgaggagcaggcccacagctgcagcaccctgagcctgctgagcgagaagagacccgccgaggagcccagaggcggcagaaagaagatcagactggtgagccaccccgaggagcccgtggccggcgcccagaccgacagagccaagctgttcatggtggccgtgaagcaggagctgagccaggccaacttcgccaccttcacccaggccctgcaggactacaagggcagcgacgacttcgccgccctggccgcctgcctgggccccctgttcgccgaggaccccaagaagcacaacctgctgcagggcttctaccagttcgtgagaccccaccacaagcagcagttcgaggaggtgtgcatccagctgaccggcagaggctgcggctacagacccgagcacagcatccccagaagacagagagcccagcccgtgctggaccccaccggcagaaccgcccccgaccccaagctgaccgtgagcaccgccgccgcccagcagctggacccccaggagcacctgaaccagggcagaccccacctgagccccagacccccccccaccggcgaccccggcagccagccccagtggggcagcggcgtgcccagagccggcaagcagggccagcacgccgtgagcgcctacctggccgacgccagaagagccctgggcagcgccggctgcagccagctgctggccgccctgaccgcctacaagcaggacgacgacctggacaaggtgctggccgtgctggccgccctgaccaccgccaagcccgaggacttccccctgctgcacagattcagcatgttcgtgagaccccaccacaagcagagattcagccagacctgcaccgacctgaccggcagaccctaccccggcatggagccccccggcccccaggaggagagactggccgtgccccccgtgctgacccacagagccccccagcccggccccagcagaagcgagaagaccggcaagacccagagcaagatcagcagcttcctgagacagagacccgccggcaccgtgggcgccggcggcgaggacgccggccccagccagagcagcggccccccccacggccccgccgccagcgagtggggcgagccccacggcagagacatcgccggccagcaggccaccggcgcccccggcggccccctgagcgccggctgcgtgtgccagggctgcggcgccgaggacgtggtgcccttccagtgccccgcctgcgacttccagagatgccaggcctgctggcagagacacctgcaggccagcagaatgtgccccgcctgccacaccgccagcagaaagcagagcgtgatgcaggtgttctggcccgagccccagtag

SEQ ID NO: 103275 - DNA, 4203 bp, Artificial Sequence
  derived and/or modified sequence
atgccgaaaattgtattgaacggagtgacagttgacttccccttccagccctacaagtgccagcaagagtacatgaccaaggttctggagtgcctccagcaaaaggtgaatggtattttggaaagccctacaggaacaggtaagactctgtgccttctgtgcactactctggcatggcgggagcacttgcgcgatggaatctcagcccggaaaattgcagaacgagcgcagggcgagctgttcccagaccgggccctgagcagctgggggaacgcagccgcggccgcgggggatcctatagcctgctatacagatatcccaaaaattatttatgccagccgcacccatagccagttgacacaagtgatcaacgaattacggaatacgagttatcgtcccaaagtctgcgtactggggtccagggaacagctctgcattcatcctgaagttaagaagcaggagagcaatcatttgcagatccacctttgccgcaagaaggtcgcctctcggtcctgccacttttacaataacgtggaggaaaagtcactggagcaggaattggccagcccaatcctcgacatcgaggacctcgtcaagtcaggttccaagcatcgggtgtgtccttattacttgtcccgaaacttgaaacagcaggccgacatcatttttatgccttataattacttgttggatgctaagtcccgacgtgcccacaacatcgatcttaagggcactgtggtcatctttgatgaagcccacaatgtggagaagatgtgcgaggaatctgcctcatttgatttgactccccatgatctcgcctctggtctggatgtgatcgaccaggtgctcgaagaacagaccaaagctgcgcaacagggggagcctcaccccgaatttagtgcagactccccgagtcccggtctgaacatggaactggaggatatagctaaattgaagatgattttgctccggctggaaggggccattgacgccgtggagttgccaggcgatgattcgggggtgacaaaacccggctcgtatatctttgaacttttcgccgaagcccagattacttttcagacaaagggctgcatacttgacagtctggatcagatcatccagcacctggccggaagggccggcgttttcaccaacacagccggcctccagaagttggcagacatcattcagatcgttttctctgtggacccatctgaagggtcccctggctctccagctggtctgggcgccctgcagtcctataaagtgcacatccaccctgatgctgggcatagacgcactgctcaacggtccgatgcatggagcactaccgccgctcgtaaacgcggtaaggtcctctcatattggtgtttcagccccggccacagcatgcacgaactggtgaggcagggagttcgcagcctcatcctcaccagtggcactctcgctccagtgagcagctttgcgctggaaatgcagatcccttttcccgtgtgccttgagaatccgcacataatcgacaaacatcagatttgggtaggagtcgtaccgaggggccctgatggcgcccagctttcgtccgctttcgatagacgattctcagaagaatgtctgtccagtctggggaaggctctcggcaatattgccagggtcgtcccatatggcctcctgatctttttcccgtcttacccggtaatggagaaatccctcgagttctggcgggcccgtgatttagcccggaagatggaagctcttaaaccattgttcgtcgaacctaggtctaagggcagcttctctgaaaccattagcgcctattacgctcgggtcgctgcgccgggcagcacaggggcgacctttctagctgtctgcaggggcaaggcatcggaaggcctcgactttagtgatacaaatggcaggggtgttatagtgaccggcttgccctacccaccacggatggacccccgcgtagtgctgaagatgcagttcttggacgagatgaaggggcagggcggtgccggtggccagtttctgagtggacaagaatggtaccggcagcaggcgtcccgtgccgttaaccaggccatcggacgggtgattcggcacagacaagactatggcgctgtctttctctgcgatcataggttcgccttcgccgacgctcgtgcccagctgccgtcctgggtccgaccccacgtgagagtatacgataactttggtcatgtaatacgggatgtcgctcagtttttccgagtcgccgagcgtactatgccggccccagcccctagggccactgcaccttccgtacgcggcgaggacgctgtgagcgaggccaaaagccccgggccctttttctctacgcgtaaagccaagtcccttgacttgcacgtgccgtctctgaagcagagatcgtctggaagcccagcagccggcgacccggaatctagcctttgcgtggagtacgagcaggagccagtgcccgcaaggcaacggccaagggggctattggctgctctggaacattccgagcagcgggctggtagcccaggcgaagagcaggcgcactcttgttctacacttagcctgttgagcgaaaagagaccagccgaggaacctcgaggcggacgaaaaaagattcgactggtgtctcatccagaggaaccggttgccggtgcacagacagaccgcgcaaagctcttcatggtcgcggtcaagcaagagctgagccaagccaattttgccacgtttactcaagctctgcaggactataaaggtagcgatgacttcgcggccctcgccgcctgcctgggacctctgtttgcagaagatcctaagaaacataacctcttgcagggcttctaccaattcgtgaggccacaccataagcagcagttcgaagaagtttgtatccagctgaccggccggggttgtggttacaggcccgagcactcaatcccgagacgtcagcgcgcacagcccgtactggatccaacagggagaacggctcccgacccaaaattaaccgttagtaccgctgctgctcagcaactggatccccaggagcatcttaaccaaggccgcccacatctgtcacctaggcctccacccacgggtgatcctggctcccagccacagtgggggagtggggtgccacgtgctgggaaacagggacagcacgctgtaagcgcttatctggccgatgccagaagggcactcggctctgcgggatgctctcagctgctggcggccctgaccgcctacaaacaggacgacgatttagataaagtacttgcagtgctggctgcactgactacggcaaagcctgaggactttccactccttcatcggtttagcatgttcgttcgccctcatcataagcagagattctcacagacctgtaccgatcttacagggaggccctacccagggatggaaccacctgggcctcaggaggagagattagcggttccgcccgtcttgacccacagggcccctcagccgggcccttccagaagtgaaaaaaccgggaaaacccagtcaaaaataagcagcttcttgaggcagcgtcccgctggcacggtgggtgccggtggtgaagacgccggcccgtcccagtcgtctgggccgcctcacgggcctgcagcgagtgaatggggtgagcctcacggacgcgacatcgccggacaacaggcaacaggcgcccccggtggccccctaagcgctggttgtgtctgtcaaggttgcggggccgaggatgtcgtccccttccagtgcccagcatgtgacttccaaagatgccaagcatgttggcaaagacacctgcaggcttcccgcatgtgtccggcttgccataccgcaagccggaagcagtctgtgatgcaggttttctggcccgagccccataaagatcacgagggcgccggcggagctcgccccgtggccgcagtgcctggcgtgggggcagcctgtcccgccgcaggcgccggatgcactcgtagcggcaggaacacacatttgcctcttgctggccgtcgcgataggggcgcagctggcgtgcgcccggtcccaccgaggcacttgtgtgctgccgctgtccctccccggcaacctcacgatgtgtggccagtcagcacagcgccactccatgcagtccttgagcttcctcgcgccctcccactcctacaacgccccctgcgtggtgcctag

SEQ ID NO: 103276 - DNA, 1638 bp, Artificial Sequence
  derived and/or modified sequence
atgcctgcaccagccccccgagcaacagcaccttccgtacgcggcgaggacgcagtaagtgaggccaagtctccgggaccgttcttctctacccgaaaggcgaaatcacttgatctccatgtaccaagcctgaaacagcgcagttctggaagccctgctgcgggggatcccgagagttccctgtgcgtggaatatgagcaagagcccgtcccagcccgacagcggccaagaggcttactggccgcactagagcactcagaacagcgtgcaggatcccccggggaggaacaggcccactcctgctctacactgtctctattaagcgaaaagcggccagcagaggagccacgagggggacgcaaaaaaatccgcctcgtgagccatcccgaggaacccgtagctggcgctcagacggacagagctaagctgtttatggtcgcggtaaaacaggagctcagccaggcaaacttcgcgacgtttacccaggcattgcaagactataagggaagcgacgattttgccgccctggccgcttgcttgggccccctgtttgcagaggacccgaaaaagcataatctcttgcagggattctatcagtttgtcaggcctcatcataagcaacagttcgaagaggtgtgtatacagctgaccggtcgcggctgcgggtaccgaccagagcattctattcccaggcgacagcgggcacagccagtcctagatcctaccggacgtactgcacccgaccccaagttgactgtttcaacagcagctgcgcagcagctggacccccaggagcatttgaaccagggaagacctcacttatcccctcgcccgccacccacaggcgatcccggctcccaaccgcagtggggcagcggggtcccgagggccggcaaacagggacagcacgctgtgagtgcttacctggctgatgcccggcgggcactcggcagcgccggatgctctcagctgctggccgctttaacggcttacaaacaggacgatgacctggataaagttttagccgtgctggcggccctcacaaccgcaaaacccgaggacttccccctgttgcacaggtttagcatgttcgtgaggcctcaccataaacaaaggttttctcagacttgcaccgatcttaccggaaggccatatccaggcatggaacctcccggacctcaagaagaacgcctagccgtacctcctgtgttgacgcatcgggccccccagcccggcccttcccggagcgagaagactgggaagacacagagtaagatttctagcttcttgcggcagaggccagcaggcactgtgggggccggtggcgaggatgccgggcccagccaaagcagcggaccccctcacggcccagcagcctcagagtggggcgagccacacggcagagatatagcaggccaacaggcgaccggcgcaccagggggacccttgagcgccggatgcgtatgtcagggctgcggcgcggaagatgtcgtcccttttcagtgccccgcttgtgattttcaaagatgccaggcgtgttggcaaagacatctgcaggcatccagaatgtgcccagcatgtcacaccgcctctcgcaaacaatcagtgatgcaagtgttctggcctgagccacagtag

SEQ ID NO: 103277 - DNA, 4203 bp, Artificial Sequence
  derived and/or modified sequence
atgcccaagatcgtgctgaatggagtgacagtggacttccccttccagccctacaagtgccagcaggagtacatgaccaaggtgctggagtgcctgcagcagaaggtgaatggcatcctggagagccccaccggcaccgggaagaccctgtgcctgctgtgcaccaccctggcctggagggagcacctgagagatggcatcagcgccaggaagattgctgagcgggcccagggcgagctgttcccagaccgggccctgagctcctggggcaatgctgctgctgctgctggggaccccatcgcctgctacacagacatccccaagatcatctatgccagcaggacccacagccagctgacccaggtgatcaatgagctgaggaacaccagctaccggcccaaggtgtgtgtgctgggcagccgggagcagctgtgcatccaccctgaggtgaagaagcaggagagcaaccacctgcagatccacctgtgcaggaagaaggtggccagccgcagctgccacttctacaacaacgtggaggagaagagcctggagcaggagctggccagccccatcctggacatcgaggacctggtgaagagcggcagcaagcaccgggtgtgcccctactacctgagcaggaacctgaagcagcaggccgacatcatcttcatgccctacaactacctgctggatgccaagagcagaagagcccacaacatcgacctgaagggcaccgtggtgatctttgatgaggcccacaacgtggagaagatgtgtgaggagagcgccagctttgacctgacccctcatgacctggccagcggcctggatgtgattgaccaggtgctggaggagcagaccaaggccgcccagcagggcgagccccaccctgagttctctgctgacagccccagccctggcctgaacatggagctggaggacatcgccaagctgaagatgatcctgctgcggctggagggcgccattgatgctgtggagctgcctggagatgattctggagtgaccaagccaggcagctacatctttgagctgtttgctgaggcccagatcaccttccagaccaagggctgcatcctggacagcctggaccagatcatccagcacctggccggccgggccggggtcttcaccaacacagctggcctgcagaagctggccgacatcatccagatcgtgttttctgtggaccccagcgagggcagccctggcagccctgctggcctgggcgccctgcagagctacaaggtgcacatccacccagatgctggccacagaagaacagcccagaggagtgatgcctggagcaccacagctgccaggaagaggggcaaggtgctgagctactggtgcttcagccctggccacagcatgcatgagctggtgcggcagggcgtgcgcagcctcatcctgaccagcggcaccctggcccctgtgtcctcctttgccctggagatgcagatccccttccctgtgtgcctggagaacccccacatcatcgacaagcaccagatctgggtgggcgtggtgccccggggcccagatggagcccagctgagcagcgcctttgaccggcgcttcagcgaggagtgcctgagcagcctgggcaaggccctgggcaacatcgcccgggtggtgccctacggcctgctgatcttcttccccagctaccctgtgatggagaagagcctggagttctggagggcccgggacctggccaggaagatggaggccctgaagcccctgtttgtggagcccaggagcaagggcagcttcagcgagaccatcagcgcctactatgcccgggtggccgcccctggcagcactggagccaccttcctggccgtgtgccggggcaaggccagcgagggcctggacttcagtgacaccaacggccggggcgtcatcgtgacaggcctgccctacccacccaggatggacccccgggtggtgctgaagatgcagttcctggatgagatgaagggccagggcggggccggcggccagttcctgagcggccaggagtggtaccggcagcaggccagcagagctgtgaaccaggccatcggccgggtcatccgccaccggcaggactatggagctgtgttcctgtgtgaccacagatttgcctttgctgatgcccgggcccagctgcccagctgggtgcggccccacgtgcgggtgtatgacaactttggccacgtgatcagagatgtggcccagttcttccgggtggccgagaggaccatgcctgccccagccccccgggccacagcccccagcgtgagaggagaagatgctgtgtctgaggccaagagccctggccccttcttcagcaccaggaaggccaagagcctggacctgcacgtgcccagcctgaagcagaggagcagcggcagccctgctgctggggaccctgagagcagcctgtgtgtggagtatgagcaggagcctgtgcctgcccggcagaggccccggggcctgctggccgccctggagcacagcgagcagagagctggcagccctggagaggagcaggcccacagctgcagcaccctgagcctgctgtctgagaagaggcctgctgaggagccccggggcggcaggaagaagatccggctggtgagccaccctgaggagcctgtggccggggcccagacagaccgggccaagctgttcatggtggccgtgaagcaggagctgagccaggccaactttgccaccttcacccaggccctgcaggactacaagggcagtgatgactttgctgccctggccgcctgcctgggccccctgtttgctgaggaccccaagaagcacaacctgctgcagggcttctaccagtttgtgcggccccaccacaagcagcagtttgaggaggtgtgcatccagctgaccggccggggctgcggctacagacctgagcacagcatcccccggcggcagagggcccagcctgtgctggaccccactggaagaacagccccagaccccaagctgactgtgtccacagctgctgcccagcagctggacccccaggagcacctgaaccagggccggccccacctgagcccccggcccccacccaccggggaccccggcagccagccccagtggggcagcggcgtgccccgggccggcaagcagggccagcacgctgtgtctgcctacctggctgatgcccggcgggccctgggcagcgctggctgcagccagctgctggccgccctgacagcctacaagcaggatgatgacctggacaaggtgctggccgtgctggccgccctgaccacagccaagccagaggacttccccctgctgcaccgcttctccatgtttgtgcggccccaccacaagcagcgcttcagccagacctgcacagacctgaccggccggccctacccaggcatggagcccccaggcccccaggaggagcggctggccgtgccccctgtgctgacccaccgggccccccagcccggccccagccgctctgagaagacaggcaagacccagagcaagatcagcagcttcctgcggcagaggcctgctggcaccgtgggcgccggcggggaggatgctggccccagccagagcagcggccccccccacggccctgctgccagcgagtggggcgagccccacggccgggacattgctggccagcaggccactggagcccctgggggccccctgtctgctggctgtgtgtgccagggctgtggggctgaagatgtggtgcccttccagtgcccagcctgtgacttccagcgctgccaggcctgctggcagaggcacctgcaggccagcaggatgtgcccagcctgccacacagccagcaggaagcagagcgtgatgcaggtgttctggccagagccccacaaggaccatgaaggagctgggggcgcccggcctgtggccgctgtgcctggggtgggcgccgcctgcccagctgctggagctggctgcaccaggagcggcaggaacacccacctgcccctggccggcagaagagacagaggagctgctggggtgcggcctgtgcccccaagacacctgtgtgccgctgctgtgcccccccggcagccccatgatgtgtggcctgtgtccacagcccccctgcatgctgtgctggagctgccccgggccctgcccctgctgcagaggcccctgcggggggcctag

SEQ ID NO: 103278 - DNA, 1638 bp, Artificial Sequence
  derived and/or modified sequence
atgcctgccccagccccccgggccacagcccccagcgtgcggggggaggatgctgtgtctgaggccaagagccctggccccttcttcagcaccaggaaggccaagagcctggacctgcacgtgcccagcctgaagcagaggagcagcggcagccctgctgctggggaccctgagagcagcctgtgtgtggagtatgagcaggagcctgtgcctgcccggcagaggccccggggcctgctggccgccctggagcacagcgagcagagagctggcagccctggagaggagcaggcccacagctgcagcaccctgagcctgctgtctgagaagaggcctgctgaggagccccggggcggcaggaagaagatccggctggtgagccaccctgaggagcctgtggccggggcccagacagaccgggccaagctgttcatggtggccgtgaagcaggagctgagccaggccaactttgccaccttcacccaggccctgcaggactacaagggcagtgatgactttgctgccctggccgcctgcctgggccccctgtttgctgaggaccccaagaagcacaacctgctgcagggcttctaccagtttgtgcggccccaccacaagcagcagtttgaggaggtgtgcatccagctgaccggccggggctgcggctacagacctgagcacagcatcccccggcggcagagggcccagcctgtgctggaccccaccggccgcacagccccagaccccaagctgactgtgtccacagctgctgcccagcagctggacccccaggagcacctgaaccagggccggccccacctgagcccccggcccccacccactggagaccccggcagccagccccagtggggcagcggcgtgcccagggctgggaagcagggccagcacgctgtgtctgcctacctggctgatgcccggcgggccctgggcagcgctggctgcagccagctgctggccgccctgacagcctacaagcaggatgatgacctggacaaggtgctggccgtgctggccgccctgaccacagccaagccagaggacttccccctgctgcaccgcttctccatgtttgtgcggccccaccacaagcagcgcttcagccagacctgcacagacctgaccggccggccctacccaggcatggagcccccaggcccccaggaggagcggctggccgtgccccctgtgctgacccaccgggccccccagcccggccccagccgctctgagaagacaggcaagacccagagcaagatcagcagcttcctgcggcagaggcctgctggcaccgtgggcgctggaggagaagatgctggccccagccagagcagcggcccccctcatggccctgctgccagcgagtggggcgagccccacggccgggacattgctggccagcaggccaccggggcccctgggggccccctgtctgctggctgtgtgtgccagggctgtggggctgaagatgtggtgcccttccagtgcccagcctgtgacttccagcgctgccaggcctgctggcagaggcacctgcaggccagcaggatgtgcccagcctgccacacagccagcaggaagcagagcgtgatgcaggtgttctggccagagccccagtag

SEQ ID NO: 103279 - DNA, 4203 bp, Artificial Sequence
  derived and/or modified sequence
atgcccaagatcgtgctgaacggcgtgaccgtggacttccccttccaaccatacaagtgtcaacaggagtatatgactaaggtactagaatgcttacagcagaaggttaacggcatcctggagagtccaacaggtaccggcaaaacactttgtctcctttgcaccactcttgcctggcgggaacatctgcgagatgggattagtgcccgcaagatcgctgagcgggctcagggcgagttgttccccgatcgcgcacttagtagttggggaaacgccgcagcggcggccggggatcccattgcctgctacaccgacatacctaaaattatttacgcaagcaggacgcacagtcaactgacccaggtcatcaacgaactaagaaacacctcctaccggccaaaagtatgcgtactaggaagtcgtgagcagctatgtatccatcctgaggtgaagaagcaggagtccaatcacctgcagatccatctctgtcgaaaaaaagttgctagccgaagctgtcacttttataacaacgtagaggagaagtctcttgaacaggagctcgccagccctattctggacatcgaagaccttgtcaagtccggctcgaaacaccgcgtctgcccatattatctgagccgcaacttaaagcagcaagcggatattatcttcatgccttacaactaccttcttgatgcaaaaagtaggagggcccacaacattgacttgaagggcacggtggtcatcttcgatgaggcccataacgttgagaaaatgtgcgaggaatccgcgtcatttgatctgactccccacgacttagccagcgggctagatgtcatcgatcaagtcttggaggaacagacaaaggccgcgcaacagggggagcctcaccccgaattctctgcggacagtccctcgccagggctcaatatggagctggaggatattgcaaagctaaagatgattctgttaaggcttgagggagcaatcgacgccgtggagctccccggggacgattcgggcgttaccaagcctgggagttacatctttgaattgttcgccgaggcgcaaatcacttttcagacgaaaggatgcatcctggatagcctggaccagataattcaacatctggcaggcagagccggcgtattcaccaataccgctgggcttcagaagctggccgacataattcagatcgtattcagtgtcgacccttccgagggatcgcccgggagtcccgcaggccttggggccctgcagagctataaagtgcatattcaccccgatgcgggccaccggcgcacagcccagagaagcgacgcctggagcaccaccgcggccaggaaacggggaaaagtcctaagctactggtgtttttctcctggacacagcatgcacgagcttgttagacagggggtcagatcactcattcttactagtggaacgctcgctcctgtctcttcatttgcattggagatgcagatcccttttccggtttgcctggaaaacccccatataatcgacaagcaccagatttgggttggcgtagtgccccggggccccgatggcgcacagctgagttccgccttcgatcgacgattctctgaggagtgcctgagctccttgggtaaagctctgggtaatatcgcaagggttgtgccctacgggttattaattttttttcctagctatcctgttatggagaagtcattggagttctggcgcgcacgcgatctggccaggaagatggaagccttgaagcccctcttcgtcgagccccgcagcaagggctcctttagcgagacaatcagcgcatattacgccagagtggctgcccccggctctactggtgccaccttcctggccgtgtgtcgaggcaaggcatccgaaggattggacttcagcgataccaatggtaggggcgtgatcgtaactgggctgccataccccccgaggatggatcctcgagtcgtgctgaagatgcagttcctggacgaaatgaaaggacagggcggcgcaggcggacagtttctgagcggccaagaatggtataggcaacaggcatctcgggcagtaaaccaggcaatagggcgcgtcatcagacatcggcaagactatggggcagtgtttttgtgcgatcataggtttgcattcgccgatgctcgtgcccagctccccagttgggtaagaccccacgttcgggtgtatgataatttcggacatgtcatcagagacgtggcccagttttttagagtagcagaaaggaccatgcccgctcccgccccacgcgctaccgccccaagtgttcgtggagaggacgctgtgtctgaggccaaatccccaggacccttcttttccactaggaaggccaagagtttggatctgcatgtgccctccttgaagcagcgtagcagtggatcccccgccgccggcgacccagagtccagcttatgcgttgagtatgagcaagagccagtcccagctcgacagaggcctcgcgggcttttggcagcgctggaacactccgagcagcgggctgggtctcccggggaagagcaggctcattcttgcagcaccttaagtctgctgagcgaaaaaaggccagctgaagaacccaggggaggtcggaaaaagattcgtctcgtatcccatcctgaggaaccagtcgccggtgcccagacagaccgggctaaactgttcatggtcgccgttaaacaggaactgtcccaagccaacttcgccaccttcacccaggctctccaggattataagggctcagacgactttgccgccctggctgcttgtttgggtcctctcttcgctgaggatccgaaaaaacataatctcctgcagggtttctaccagttcgtcaggccgcatcataagcaacagtttgaagaggtgtgcatccagctgactggaagggggtgcgggtacaggccagagcattcaatcccacgaaggcagcgggctcagccagtgctagatcccaccgggcgtacggcgccggaccccaaattgactgtctctaccgccgcggcgcagcagcttgatccccaggagcatttaaaccagggtcgcccccacttatcacctcgcccgccccctaccggagacccgggcagccagccccagtgggggtcaggagtccctagagctggtaagcaggggcagcacgccgttagtgcctacttggcagatgctcgacgggcgttaggatccgccggctgttcacaattattggccgctcttaccgcctacaaacaggacgatgatctggataaggtcctggctgtactggccgcgctgaccacagctaagcctgaggacttcccactgttgcacagattttctatgtttgttcggccccaccataagcaacgcttttcccagacgtgcacggatctcacaggtcgcccttatcccggcatggaacctcccgggccacaggaagagcgcctcgctgttccacctgtgctcacccatcgagccccccaacccggtcccagtaggtcagaaaaaactgggaagacacaatcgaaaatttcgagcttcttacgccagaggcccgctgggaccgtgggcgccgggggggaggatgctgggccctcacaatcctctggtccaccgcacggccccgcagcatcagagtggggggaaccccacggcagagacatcgccggacagcaagcgacgggagctccaggaggaccactgtctgccggatgtgtatgccaggggtgcggagccgaggacgttgtgcccttccagtgtcctgcttgtgattttcagcgatgtcaggcctgctggcagcggcatctccaggcctctagaatgtgtcctgcatgtcacaccgcgagcaggaaacagagtgtgatgcaagtgttctggccggagccccacaaggatcatgagggagctgggggagcccgccccgttgccgctgtccccggcgtaggggcggcttgcccagccgccggcgctgggtgcactcgatccgggagaaacactcatctaccgctagccggacgaagggataggggagccgctggggtgaggccagtcccccccaggcacttgtgcgccgcagccgtgccccctcggcagccccacgatgtttggcccgtgagcactgctccactccacgctgtgttggaattaccaagggccctgccactgttacaaagaccattacgaggggcgtag

SEQ ID NO: 103280 - DNA, 1638 bp, Artificial Sequence
  derived and/or modified sequence
atgcccgcccccgccccccgggccaccgcccccagcgtgcggggcgaagacgccgtgagcgaggctaaatccccgggaccattcttttctacccgtaaggcaaaaagcctggacttacacgttccaagcttgaagcagcgcagctccggcagtcccgctgctggtgacccagaatctagcctatgcgttgaatacgagcaggagcctgttcctgcccgccaacgtcctcgtgggctcctggctgcacttgaacacagcgaacagagagctggcagccccggcgaggagcaggcccattcctgttcaacccttagtttgctgagtgagaagcggcccgctgaggagccccgcggaggtcggaaaaagattagactcgtgtctcatcccgaagagcctgtggcgggtgcccagacagatagagctaaacttttcatggtggcagtcaaacaggaactgtcccaggccaattttgctaccttcacacaggccctgcaggattataagggctccgatgatttcgctgcactcgctgcctgccttgggccccttttcgccgaagaccccaagaagcacaaccttctacaagggttttaccaattcgtacggcctcaccacaagcagcaattcgaagaggtgtgtatccagcttaccggcaggggttgcggatataggccagagcactctatccctaggaggcagagagcacaaccagtcctggacccgactggcagaacagcacccgacccaaaattaacagtgtccacagcagcggcacagcaactagatccacaagagcaccttaaccaagggcgccctcacctgtcccctcggcctcctcccaccggtgatccaggatcacagccgcagtgggggtccggcgtgccacgcgcagggaaacagggtcaacacgcggtaagcgcttacctggctgacgcccgaagggccctggggtctgctgggtgttctcagctgctcgctgctctcaccgcctacaagcaggacgatgatctggataaggtgttggctgtcttagctgctctgacaacggctaaacctgaggacttcccactgctgcacagattctctatgttcgtccgccctcaccacaaacagaggttctctcagacttgcactgacttaaccgggagaccatatccaggtatggaaccccctggcccccaggaagaacggcttgcagtgcctccggtgttaacacaccgcgcaccccagcccggaccttccagatctgagaagaccggtaagactcaaagtaagataagtagcttcctgcgccagagaccagcaggaacagtgggtgcaggcggcgaggatgctggacccagtcagtcgtctggaccaccccacgggccagccgcctcagaatggggtgaacctcatggaagggacatcgcaggccagcaggccactggtgcacccggagggccactgtcggcgggctgcgtgtgccagggctgcggcgccgaagacgttgttcccttccagtgtcccgcctgcgatttccagcgttgccaggcctgttggcagcgccatctgcaggcctctagaatgtgtccagcttgtcataccgcttcacggaagcagagcgtgatgcaggttttttggccggagccccagtag

SEQ ID NO: 103281 - DNA, 4203 bp, Artificial Sequence
  derived and/or modified sequence
atgcccaagatagtcctgaatggggtgacagttgattttccatttcaaccttataaatgccaacaggaatacatgaccaaagtcctagagtgtctccagcagaaagtcaatggcattttagaaagccccaccggtactggcaaaacgctttgcctgttgtgtacaacactggcctggcgcgagcatttaagagatggtattagcgctcgcaagatcgctgagcgagcccagggcgaactatttcctgatagagccctgtcttcctggggcaacgccgctgcagctgccggagatccaatagcctgctacactgacatcccaaagatcatatatgcttctcgcacacattctcaactgacgcaggttattaatgagctccggaatacttcctatcgcccaaaagtttgtgtcctggggagtagggagcagctgtgcatccacccagaagtgaagaagcaagagtccaaccacctccagatccatctgtgtcgcaagaaggtggcttcccggagttgtcacttttacaacaatgtggaggagaagagcttggaacaagagcttgcctcccccatccttgatattgaggatctcgtgaagtcaggaagtaaacaccgggtgtgcccatactatctgtcccgtaatctgaaacagcaagcagatattatattcatgccttacaattatctgctggatgcaaagtcgagaagagcccataacattgacctcaaagggaccgtcgtgatctttgacgaagctcataacgtggagaaaatgtgtgaggagagcgccagcttcgacctcacgcctcatgaccttgcctctggcctggatgtgatagaccaggtgctcgaagagcagaccaaggctgcgcagcagggagagccacaccctgagttctccgccgattcaccgtccccgggtctgaatatggagctagaggacatcgccaaactaaagatgatcctcctcagactggagggcgcaatcgacgcagtggaactgcccggagatgattcaggggttactaagcctggttcttacatttttgagttgttcgccgaggcacagataactttccagactaaaggatgtatcctcgacagcctggaccagattattcagcacctcgccggaagggcaggcgtgtttaccaacactgctggcctgcagaaactcgctgatatcatccagattgtgttcagtgtggacccttctgaaggcagtcccggatcaccagccggactgggagccctacagagttacaaggtacatatccatccagatgcaggccataggcgcactgctcagagatctgacgcctggtccaccacagccgcaaggaagaggggtaaagtcctgagctactggtgtttttcaccaggacactcaatgcacgaactggtgagacaaggtgtgaggagtcttatcctaacatcggggacacttgccccagtgagtagcttcgcattggagatgcaaattccttttcccgtctgtctggagaacccccacattatcgacaaacatcagatctgggtcggggtggtgccaaggggccctgatggggctcagctttcctccgcctttgaccgcaggttttcagaagagtgtctaagcagcctgggaaaggcactcggtaacatagcacgggtggtcccttatggtttgttgatctttttcccttcataccctgtgatggagaaaagcctggagttctggcgcgctcgcgatctggcacggaagatggaagcattgaagccgctgtttgttgagcccaggtctaaggggtcattcagtgagacaatatcggcttactacgcgagagttgcagcgccaggatccacgggggctacatttttggcagtgtgcagagggaaggcatccgagggattagatttctctgatactaatggcaggggtgttatcgttactggattgccttacccaccacgtatggatcctagagtcgtcctgaagatgcagttcttggatgaaatgaagggacagggtggcgcaggcggtcagtttctgtccgggcaggaatggtatcgccagcaggcctcgcgagctgttaaccaagccatcggccgagtgatccgccataggcaggactacggagccgtttttctgtgtgatcatcggttcgctttcgccgatgctagagcacagcttcccagctgggttcggccacatgtgagagtgtatgacaattttggacacgtgatcagggacgtggcgcaattcttcagagtggccgaaaggactatgcctgccccagcgccaagggccacagctccttcagtcagaggtgaggatgcggtgtcggaggcgaagtcaccagggccatttttctcaactaggaaggcaaagtctttagacctccacgttccttcactgaagcagcggtcttctggcagccccgcagctggcgacccagagtcctcactctgtgtcgagtatgagcaggaacctgtacccgcacgccagaggcccagggggctcttggctgcattagagcactctgaacagagggctgggagcccgggagaggagcaggcccactcctgctctacgctgtccctgctgtcggaaaaacgccctgccgaagagccacgaggcggtaggaagaagatccgccttgtgtcccaccctgaagaacccgttgccggagcacaaactgatcgagcaaaactgttcatggtcgctgtcaaacaggaactgagccaggcaaactttgctacattcacgcaagctttgcaagattacaagggtagtgacgattttgctgctttggccgcttgtcttggaccactcttcgcagaagaccccaaaaaacacaacctgcttcagggattttaccaattcgtgcggcctcaccataaacagcagttcgaggaggtgtgtatacagctcacaggacgcggatgtggctaccgacccgagcattcaattccacggagacagagggcccagcctgtgctggatccaaccggccgaaccgccccagatccaaagctcacggtctccacagccgctgcccagcagctggatcctcaggaacatctgaaccaaggacgaccacacttaagtcccaggccccctccaacaggcgatcctggcagccagccccaatggggaagtggtgtccctcgagcaggaaagcaggggcagcatgcagtttcagcataccttgccgatgctcggagggcacttggctctgctggctgttcccagttgctcgccgctttgaccgcttacaagcaggatgatgatctggacaaggtgttggccgtgctggctgctctcacaaccgctaaaccagaagatttcccgctgctacatcggttttcaatgtttgtgcgaccccatcataaacagagatttagccagacatgcactgacctgacagggaggccttaccctggcatggagcccccagggcctcaagaggagaggctagcagtgccgcctgtcctaacacatcgggctcctcagccagggccaagtcgatccgagaagaccggcaagacccagtctaaaatctccagttttctccgccagagaccagccggtacagtcggtgcgggtggggaagacgctggccctagccagtcgagcggccctccgcatgggcctgctgcctccgaatggggggaaccacacgggcgtgatatagccggtcagcaggcgactggcgctccaggcggtccactttcggccggatgcgtttgccagggatgcggcgctgaggatgtagtgcctttccagtgtccggcttgcgattttcagaggtgccaggcttgctggcagagacacctgcaggcctcacgcatgtgccctgcatgtcacacggctagtcggaaacaaagcgtcatgcaggtgttctggcccgaaccacataaggaccacgaaggagcagggggagcgagaccagttgccgctgtccccggagtaggcgctgcctgcccagcagctggggcaggatgtacccgctcagggaggaatacacatcttcctctggccggtaggagggacagaggagccgcaggagtacgtcccgtgccaccacgacatctgtgcgctgccgctgtgccgccacgacagcctcacgatgtgtggcctgtaagcacagcccctctgcatgcagtgcttgaactgccaagagcgctaccactgcttcaaagaccccttaggggagcatag

SEQ ID NO: 103282 - DNA, 1638 bp, Artificial Sequence
  derived and/or modified sequence
atgccagcacctgccccacgcgctacagctcccagcgtccgcggagaagacgccgtgagtgaagcgaaatcaccaggccctttcttctccacccgcaaagcaaaaagcttggacctccatgtcccttctttgaaacagcggagctcaggcagcccagcagccggagatccagagtcttcactctgtgtcgaatacgaacaggaaccagtgcctgccagacagagacccaggggattactggctgccctcgagcactctgaacagcgcgctggaagtcctggcgaggaacaagcccattcctgttcaactctgtcactcctaagtgaaaagcggccagcagaggagcccagagggggaagaaaaaaaattcgcttggtatcccatccagaagagccagtagcgggagcacaaacggacagggctaaactgttcatggtggccgtaaaacaggaattgtcccaagccaattttgccactttcacccaggccctccaggactacaagggaagcgacgatttcgccgctttggcggcatgcctcggcccactctttgcagaggacccaaaaaagcacaatttgctccagggcttttaccagtttgtcaggccccaccacaaacaacagtttgaggaggtatgcatccaactcacaggcagagggtgtggctaccggcctgaacacagcataccccgacgacaaagggcacaacctgttcttgacccaaccggacggacggcacccgacccgaaattaactgtgtccactgctgctgcacagcagttggacccccaagagcatctgaatcaggggaggccccatttgagtcccagacccccacctactggcgatcctggttcccagccccagtggggatccggggttccgcgtgccggtaagcagggccagcatgccgtgagtgcttatctcgctgacgcaaggagagcccttggatcagctggttgttcccaactattagccgctctcaccgcatataagcaagacgatgatcttgacaaggtgctcgccgttttggccgctctgactaccgctaagcccgaggatttccctttgttgcaccggtttagcatgtttgtccgcccacaccataagcaacgcttttcccaaacttgtaccgacctgacgggaagaccttatcctgggatggaacctcccggacctcaggaggaacggctggccgtcccaccggtcctcacgcatcgcgctccccagcccggaccaagccggagcgagaagacaggtaagacccagagcaaaatcagttcgttcctgaggcaacgaccagcaggtaccgtgggtgccggaggggaagacgcaggcccaagccagagcagcgggcctccccatggccctgctgcatccgagtggggcgaaccacatggccgagatattgccggacaacaggctacaggcgctcctggaggacctctaagtgccggttgtgtgtgtcagggatgtggtgcagaggacgtggtgcctttccagtgccccgcatgtgattttcaacggtgccaagcctgctggcagaggcacctccaagctagtaggatgtgtcctgcctgccacactgcaagccgaaagcagtccgttatgcaggtcttctggcccgagccccagtag

SEQ ID NO: 103283 - DNA, 5030 bp, Artificial Sequence
  derived and/or modified sequence
agtcagccctgctgccagccagtgccgggtgctggggactcagggaggcccgccgggaccactgcgggacagtgagccgagcagaagctggaacgcaggagaggaaggagagggggcggtcagggctctcaggagccgggtcctgggcaaggcgcagccgttttcaaattttcaggaaagcggtcggctcacactcgagcagtaaaaagatgcctctggggaggaggcccgtgcagctctccgggcaatggtggtggctcggcctagagaggcggtagtggaacgcagaccctggtgggggaatgacatcaagggaggagacgggcgggaccccagatttctgcctgtgggcgatggaagtgaggttcactggccagcggagccggacacagaacgcgcaaaacgccgtgtaggcctggaggagccgaagagcaggcggaccccctccgcgggggaacagtttccgccgggagcacaaagcaacggaccggaagtggggggcggaagtgcagtgggctcagcgccgactgcgcgcctctgcccgcgaaaactctgagctggctgacagctggggacgggtggcggccctcgactggagtcggttgagttcctgagggaccccggttctggaaggttcgccgcggagacaagtgagcagtctgtgccatagggattctcgaagagaacagcgttgtgtcccagtgcacatgctcgcatcgcttaccaggagtgcccgagaccctaagatgttcggagtggttttttcgcacagacccgaatagcctgcccctcagccacgctctgtgcccttctgagaacaggctgatatgcccaagatagtcctgaatggtgtgaccgtagacttccctttccagccctacaaatgccaacaggagtacatgaccaaggtcctggaatgtctgcagcagaaggtgaatggcatcctggagagccctacgggtacagggaagacgctgtgcctgctgtgcaccacgctggcctggcgagaacacctccgagacggcatctctgcccgcaagattgccgagagggcgcaaggagagcttttcccggatcgggccttgtcatcctggggcaacgctgctgctgctgctggagaccccatagcttgctacacggacatcccaaagattatttacgcctccaggacccactcgcaactcacacaggtcatcaacgagcttcggaacacctcctaccggcctaaggtgtgtgtgctgggctcccgggagcagctgtgcatccatcctgaggtgaagaaacaagagagtaaccatctacagatccacttgtgccgtaagaaggtggcaagtcgctcctgtcatttctacaacaacgtagaagaaaaaagcctggagcaggagctggccagccccatcctggacattgaggacttggtcaagagcggaagcaagcacagggtgtgcccttactacctgtcccggaacctgaagcagcaagccgacatcatattcatgccgtacaattacttgttggatgccaagagccgcagagcacacaacattgacctgaaggggacagtcgtgatctttgacgaagctcacaacgtggagaagatgtgtgaagaatcggcatcctttgacctgactccccatgacctggcttcaggactggacgtcatagaccaggtgctggaggagcagaccaaggcagcgcagcagggtgagccccacccggagttcagcgcggactcccccagcccagggctgaacatggagctggaagacattgcaaagctgaagatgatcctgctgcgcctggagggggccatcgatgctgttgagctgcctggagacgacagcggtgtcaccaagccagggagctacatctttgagctgtttgctgaagcccagatcacgtttcagaccaagggctgcatcctggactcgctggaccagatcatccagcacctggcaggacgtgctggagtgttcaccaacacggccggactgcagaagctggcggacattatccagattgtgttcagtgtggacccctccgagggcagccctggttccccagcagggctgggggccttacagtcctataaggtgcacatccatcctgatgctggtcaccggaggacggctcagcggtctgatgcctggagcaccactgcagccagaaagcgagggaaggtgctgagctactggtgcttcagtcccggccacagcatgcacgagctggtccgccagggcgtccgctccctcatccttaccagcggcacgctggccccggtgtcctcctttgctctggagatgcagatccctttcccagtctgcctggagaacccacacatcatcgacaagcaccagatctgggtgggggtcgtccccagaggccccgatggagcccagttgagctccgcgtttgacagacggttttccgaggagtgcttatcctccctggggaaggctctgggcaacatcgcccgcgtggtgccctatgggctcctgatcttcttcccttcctatcctgtcatggagaagagcctggagttctggcgggcccgcgacttggccaggaagatggaggcgctgaagccgctgtttgtggagcccaggagcaaaggcagcttctccgagaccatcagtgcttactatgcaagggttgccgcccctgggtccaccggcgccaccttcctggcggtctgccggggcaaggccagcgaggggctggacttctcagacacgaatggccgtggtgtgattgtcacgggcctcccgtaccccccacgcatggacccccgggttgtcctcaagatgcagttcctggatgagatgaagggccagggtggggctgggggccagttcctctctgggcaggagtggtaccggcagcaggcgtccagggctgtgaaccaggccatcgggcgagtgatccggcaccgccaggactacggagctgtcttcctctgtgaccacaggttcgcctttgccgacgcaagagcccaactgccctcctgggtgcgtccccacgtcagggtgtatgacaactttggccatgtcatccgagacgtggcccagttcttccgtgttgccgagcgaactatgccagcgccggccccccgggctacagcacccagtgtgcgtggagaagatgctgtcagcgaggccaagtcgcctggccccttcttctccaccaggaaagctaagagtctggacctgcatgtccccagcctgaagcagaggtcctcagggtcaccagctgccggggaccccgagagtagcctgtgtgtggagtatgagcaggagccagttcctgcccggcagaggcccagggggctgctggccgccctggagcacagcgaacagcgggcggggagccctggcgaggagcaggcccacagctgctccaccctgtccctcctgtctgagaagaggccggcagaagaaccgcgaggagggaggaagaagatccggctggtcagccacccggaggagcccgtggctggtgcacagacggacagggccaagctcttcatggtggccgtgaagcaggagttgagccaagccaactttgccaccttcacccaggccctgcaggactacaagggttccgatgacttcgccgccctggccgcctgtctcggccccctctttgctgaggaccccaagaagcacaacctgctccaaggcttctaccagtttgtgcggccccaccataagcagcagtttgaggaggtctgtatccagctgacaggacgaggctgtggctatcggcctgagcacagcattccccgaaggcagcgggcacagccggtcctggaccccactggaagaacggcgccggatcccaagctgaccgtgtccacggctgcagcccagcagctggacccccaagagcacctgaaccagggcaggccccacctgtcgcccaggccacccccaacaggagaccctggcagccaaccacagtgggggtctggagtgcccagagcagggaagcagggccagcacgccgtgagcgcctacctggctgatgcccgcagggccctggggtccgcgggctgtagccaactcttggcagcgctgacagcctataagcaagacgacgacctcgacaaggtgctggctgtgttggccgccctgaccactgcaaagccagaggacttccccctgctgcacaggttcagcatgtttgtgcgtccacaccacaagcagcgcttctcacagacgtgcacagacctgaccggccggccctacccgggcatggagccaccgggaccccaggaggagaggcttgccgtgcctcctgtgcttacccacagggctccccaaccaggcccctcacggtccgagaagaccgggaagacccagagcaagatctcgtccttccttagacagaggccagcagggactgtgggggcgggcggtgaggatgcaggtcccagccagtcctcaggacctccccacgggcctgcagcatctgagtggggtgagcctcatgggagagacatcgctgggcagcaggccacgggagctccgggcgggcccctctcagcaggctgtgtgtgccagggctgtggggcagaggacgtggtgcccttccagtgccctgcctgtgacttccagcgctgccaagcctgctggcaacggcaccttcaggcctctaggatgtgcccagcctgccacaccgcctccaggaagcagagcgtcatgcaggtcttctggccagagccccacaaggaccatgagggcgctggaggggccaggcctgtcgctgctgtgcctggtgttggcgctgcctgccctgctgccggtgccggctgtacgcggagtggcagaaacacccacctacccctggcgggacgcagagacaggggagcggctggtgtgcgcccagtgccccccaggcacctttgtgcagcggccgtgccgccgagacagccccacgacgtgtggcccgtgtccaccgcgccactacacgcagttctggaactacctagagcgctgccgctactgcaacgtcctctgcggggagcgtga

SEQ ID NO: 103284 - DNA, 2273 bp, Artificial Sequence
  derived and/or modified sequence
agcctctccggctactcggggtcagcgtggggcccctgcagcagatgagggtcttcacttcggtgaactgaacccttgaagcggctgtgggcagggcagcagggctatggccaccccccaggttcgcctttgccgacgcaagagcccaactgccctcctgggtgcgtccccacgtcagggtgtatgacaactttggccatgtcatccgagacgtggcccagttcttccgtgttgccgagcgaactatgccagcgccggccccccgggctacagcacccagtgtgcgtggagaagatgctgtcagcgaggccaagtcgcctggccccttcttctccaccaggaaagctaagagtctggacctgcatgtccccagcctgaagcagaggtcctcagggtcaccagctgccggggaccccgagagtagcctgtgtgtggagtatgagcaggagccagttcctgcccggcagaggcccagggggctgctggccgccctggagcacagcgaacagcgggcggggagccctggcgaggagcaggcccacagctgctccaccctgtccctcctgtctgagaagaggccggcagaagaaccgcgaggagggaggaagaagatccggctggtcagccacccggaggagcccgtggctggtgcacagacggacagggccaagctcttcatggtggccgtgaagcaggagttgagccaagccaactttgccaccttcacccaggccctgcaggactacaagggttccgatgacttcgccgccctggccgcctgtctcggccccctctttgctgaggaccccaagaagcacaacctgctccaaggcttctaccagtttgtgcggccccaccataagcagcagtttgaggaggtctgtatccagctgacaggacgaggctgtggctatcggcctgagcacagcattccccgaaggcagcgggcacagccggtcctggaccccactggaagaacggcgccggatcccaagctgaccgtgtccacggctgcagcccagcagctggacccccaagagcacctgaaccagggcaggccccacctgtcgcccaggccacccccaacaggagaccctggcagccaaccacagtgggggtctggagtgcccagagcagggaagcagggccagcacgccgtgagcgcctacctggctgatgcccgcagggccctggggtccgcgggctgtagccaactcttggcagcgctgacagcctataagcaagacgacgacctcgacaaggtgctggctgtgttggccgccctgaccactgcaaagccagaggacttccccctgctgcacaggttcagcatgtttgtgcgtccacaccacaagcagcgcttctcacagacgtgcacagacctgaccggccggccctacccgggcatggagccaccgggaccccaggaggagaggcttgccgtgcctcctgtgcttacccacagggctccccaaccaggcccctcacggtccgagaagaccgggaagacccagagcaagatctcgtccttccttagacagaggccagcagggactgtgggggcgggcggtgaggatgcaggtcccagccagtcctcaggacctccccacgggcctgcagcatctgagtggggtgagcctcatgggagagacatcgctgggcagcaggccacgggagctccgggcgggcccctctcagcaggctgtgtgtgccagggctgtggggcagaggacgtggtgcccttccagtgccctgcctgtgacttccagcgctgccaagcctgctggcaacggcaccttcaggcctctaggatgtgcccagcctgccacaccgcctccaggaagcagagcgtcatgcaggtcttctggccagagccccagtgagtgcccacggaggcccccagcacacccaacgtggcttgatcacctgcctgtccagctctggtgggccaagaacccacccaacagaataggccagcccatgccagccggcttggcccgctgcaggcctcaggcaggcggggcccatggttggtccctgcggtgggaccggatctgggcctgcctctgagaagccctgagctaccttggggtctggggtgggtttctgggaaagtgcttccccagaacttccctggctcctggcctgtgagtggtgccacaggggcaccccagctgagcccctcaccgggaaggaggagacccccgtgggcacgtgtccacttttaatcaggggacagggctctctaataaagctgctggcagtgcccagga

SEQ ID NO: 103285 - DNA, 4945 bp, Artificial Sequence
  derived and/or modified sequence
atgcccaagatagtcctgaatggtgtgaccgtagacttccctttccagccctacaaatgccaacaggagtacatgaccaaggtcctggaatgtctgcagcagaaggtgaatggcatcctggagagccctacgggtacagggaagacgctgtgcctgctgtgcaccacgctggcctggcgagaacacctccgagacggcatctctgcccgcaagattgccgagagggcgcaaggagagcttttcccggatcgggccttgtcatcctggggcaacgctgctgctgctgctggagaccccatagcttgctacacggacatcccaaagattatttacgcctccaggacccactcgcaactcacacaggtcatcaacgagcttcggaacacctcctaccggcctaaggtgtgtgtgctgggctcccgggagcagctgtgcatccatcctgaggtgaagaaacaagagagtaaccatctacagatccacttgtgccgtaagaaggtggcaagtcgctcctgtcatttctacaacaacgtagaagaaaaaagcctggagcaggagctggccagccccatcctggacattgaggacttggtcaagagcggaagcaagcacagggtgtgcccttactacctgtcccggaacctgaagcagcaagccgacatcatattcatgccgtacaattacttgttggatgccaagagccgcagagcacacaacattgacctgaaggggacagtcgtgatctttgacgaagctcacaacgtggagaagatgtgtgaagaatcggcatcctttgacctgactccccatgacctggcttcaggactggacgtcatagaccaggtgctggaggagcagaccaaggcagcgcagcagggtgagccccacccggagttcagcgcggactcccccagcccagggctgaacatggagctggaagacattgcaaagctgaagatgatcctgctgcgcctggagggggccatcgatgctgttgagctgcctggagacgacagcggtgtcaccaagccagggagctacatctttgagctgtttgctgaagcccagatcacgtttcagaccaagggctgcatcctggactcgctggaccagatcatccagcacctggcaggacgtgctggagtgttcaccaacacggccggactgcagaagctggcggacattatccagattgtgttcagtgtggacccctccgagggcagccctggttccccagcagggctgggggccttacagtcctataaggtgcacatccatcctgatgctggtcaccggaggacggctcagcggtctgatgcctggagcaccactgcagccagaaagcgagggaaggtgctgagctactggtgcttcagtcccggccacagcatgcacgagctggtccgccagggcgtccgctccctcatccttaccagcggcacgctggccccggtgtcctcctttgctctggagatgcagatccctttcccagtctgcctggagaacccacacatcatcgacaagcaccagatctgggtgggggtcgtccccagaggccccgatggagcccagttgagctccgcgtttgacagacggttttccgaggagtgcttatcctccctggggaaggctctgggcaacatcgcccgcgtggtgccctatgggctcctgatcttcttcccttcctatcctgtcatggagaagagcctggagttctggcgggcccgcgacttggccaggaagatggaggcgctgaagccgctgtttgtggagcccaggagcaaaggcagcttctccgagaccatcagtgcttactatgcaagggttgccgcccctgggtccaccggcgccaccttcctggcggtctgccggggcaaggccagcgaggggctggacttctcagacacgaatggccgtggtgtgattgtcacgggcctcccgtaccccccacgcatggacccccgggttgtcctcaagatgcagttcctggatgagatgaagggccagggtggggctgggggccagttcctctctgggcaggagtggtaccggcagcaggcgtccagggctgtgaaccaggccatcgggcgagtgatccggcaccgccaggactacggagctgtcttcctctgtgaccacaggttcgcctttgccgacgcaagagcccaactgccctcctgggtgcgtccccacgtcagggtgtatgacaactttggccatgtcatccgagacgtggcccagttcttccgtgttgccgagcgaactatgccagcgccggccccccgggctacagcacccagtgtgcgtggagaagatgctgtcagcgaggccaagtcgcctggccccttcttctccaccaggaaagctaagagtctggacctgcatgtccccagcctgaagcagaggtcctcagggtcaccagctgccggggaccccgagagtagcctgtgtgtggagtatgagcaggagccagttcctgcccggcagaggcccagggggctgctggccgccctggagcacagcgaacagcgggcggggagccctggcgaggagcaggcccacagctgctccaccctgtccctcctgtctgagaagaggccggcagaagaaccgcgaggagggaggaagaagatccggctggtcagccacccggaggagcccgtggctggtgcacagacggacagggccaagctcttcatggtggccgtgaagcaggagttgagccaagccaactttgccaccttcacccaggccctgcaggactacaagggttccgatgacttcgccgccctggccgcctgtctcggccccctctttgctgaggaccccaagaagcacaacctgctccaaggcttctaccagtttgtgcggccccaccataagcagcagtttgaggaggtctgtatccagctgacaggacgaggctgtggctatcggcctgagcacagcattccccgaaggcagcgggcacagccggtcctggaccccactggaagaacggcgccggatcccaagctgaccgtgtccacggctgcagcccagcagctggacccccaagagcacctgaaccagggcaggccccacctgtcgcccaggccacccccaacaggagaccctggcagccaaccacagtgggggtctggagtgcccagagcagggaagcagggccagcacgccgtgagcgcctacctggctgatgcccgcagggccctggggtccgcgggctgtagccaactcttggcagcgctgacagcctataagcaagacgacgacctcgacaaggtgctggctgtgttggccgccctgaccactgcaaagccagaggacttccccctgctgcacaggttcagcatgtttgtgcgtccacaccacaagcagcgcttctcacagacgtgcacagacctgaccggccggccctacccgggcatggagccaccgggaccccaggaggagaggcttgccgtgcctcctgtgcttacccacagggctccccaaccaggcccctcacggtccgagaagaccgggaagacccagagcaagatctcgtccttccttagacagaggccagcagggactgtgggggcgggcggtgaggatgcaggtcccagccagtcctcaggacctccccacgggcctgcagcatctgagtggggtgagcctcatgggagagacatcgctgggcagcaggccacgggagctccgggcgggcccctctcagcaggctgtgtgtgccagggctgtggggcagaggacgtggtgcccttccagtgccctgcctgtgacttccagcgctgccaagcctgctggcaacggcaccttcaggcctctaggatgtgcccagcctgccacaccgcctccaggaagcagagcgtcatgcaggtcttctggccagagccccacaaggaccatgagggcgctggaggggccaggcctgtcgctgctgtgcctggtgttggcgctgcctgccctgctgccggtgccggctgtacgcggagtggcagaaacacccacctacccctggcgggacgcagagacaggggagcggctggtgtgcgcccagtgccccccaggcacctttgtgcagcggccgtgccgccgagacagccccacgacgtgtggcccgtgtccaccgcgccactacacgcagttctggaactacctagagcgctgccgctactgcaacgtcctctgcggggagcgtgaggaggaggcacgggcttgccacgccacccacaaccgtgcctgccgctgccgcaccggcttcttcgcgcacgctggtttctgcttggagcacgcatcgtgtccacctggtgccggcgtgattgccccgggcacccccagccagaacacgcagtgccagccgtgccccccaggcaccttctcagccagcagctccagctcagagcagtgccagccccaccgcaactgcacggccctgggcctggccctcaatgtgccaggctcttcctcccatgacaccctgtgcaccagctgcactggcttccccctcagcaccagggtaccaggagctgaggagtgtgagcgtgccgtcatcgactttgtggctttccaggacatctccatcaagaggctgcagcggctgctgcaggccctcgaggccccggagggctggggtccgacaccaagggcgggccgcgcggccttgcagctgaagctgcgtcggcggctcacggagctcctgggggcgcaggacggggcgctgctggtgcggctgctgcaggcgctgcgcgtggccaggatgcccgggctggagcggagcgtccgtgagcgcttcctccctgtgcactgatcctggccccctcttatttattctacatccttggcaccccacttgcactgaaagaggcttttttttaaatagaagaaatgaggtttcttaaagcttatttttataaagctttttcataaaactggttgtagttgc

SEQ ID NO: 103286 - protein, 409 aa, Artificial Sequence
  derived and/or modified sequence
MPHIDNDVKLDFKDVLLRPKRSTLKSRSEVDLTRSFSFRNSKQTYSGVPIIAANMDTVGTFEMAKVLCKFSLFTAVHKHYSLVQWQEFAGQNPDCLEHLAASSGTGSSDFEQLEQILEAIPQVKYICLDVANGYSEHFVEFVKDVRKRFPQHTIMAGNVVTGEMVEELILSGADIIKVGIGPGSVCTTRKKTGVGYPQLSAVMECADAAHGLKGHIISDGGCSCPGDVAKAFGAGADFVMLGGMLAGHSESGGELIERDGKKYKLFYGMSSEMAMKKYAGGVAEYRYVWRPRSLVIVWRQNSWLLRGGWYSSQRSMVNRGSMLGSVEKSLGLRNPEGEDNKVFPTLRASEGKTVEVPFKGDVEHTIRDILGGIRSTCTYVGAAKLKELSRRTTFIRVTQQVNPIFSEAC

SEQ ID NO: 103287 - DNA, 2022 bp, Artificial Sequence
  derived and/or modified sequence
atcagcctcttgccccattgctctttgcaggggtagaagaaggaagtgtagcggggtaaggaatgcaccgtcagggtctctcacaaccctttcccagctctcctccccaacaaacagtacctgggatggagccctagggtaatcgcagccacgggatgggtcgaggtgacaggcttcagggaccacacttcggcctttgcccgaccttccacaacttaagcgaagagaggccaccagccgtaacagggcgttaaagcccaggggaagattggtccttatgacttcctgccttccagccctcagattcatcgctaccccgaggctaagcgccatgcctcatattgacaacgatgtgaaactggacttcaaggatgtccttttgaggcccaaacgcagtacccttaagtctcgaagtgaggtggatctcacaagatccttttcatttcggaactcaaagcagacatactctggggttcccatcattgctgccaatatggatactgtgggcacctttgagatggccaaggttctctgtaagttctctctcttcactgctgtccataagcactatagcctcgttcagtggcaagagtttgctggccagaatcctgactgtcttgagcatctggctgccagctcaggcacaggctcttctgactttgagcagctggaacagatcctggaagctattccccaggtgaagtatatatgcctggatgtggcaaatggctactctgaacactttgttgaatttgtaaaagatgtacggaagcgcttcccccagcacaccatcatggcagggaatgtggtaacaggagagatggtagaagagctcatcctttctggggctgacatcatcaaagtgggaattgggccaggctctgtgtgtactactcggaagaaaactggagtggggtatccacagctcagcgcagtgatggagtgtgcagatgctgctcatggcctcaaaggccacatcatttcagatggaggttgcagctgtcctggggatgtggccaaggcttttggggcaggagctgacttcgtgatgctgggtggcatgctggctgggcacagtgagtcaggtggtgagctcatcgagagggatggcaagaagtacaagctcttctatggaatgagttctgaaatggccatgaagaagtatgctgggggcgtggctgagtacaggtatgtgtggaggcccaggagcttagtaatagtatggaggcagaactcatggctgctgagagggggatggtacagttctcagagaagcatggtgaaccggggctcaatgctagggtctgtggaaaagtccctgggcttaaggaatccagaaggagaagataataaagtttttcctactttaagagcctcagagggaaagacagtggaagttccttttaaaggagatgtggaacataccatccgagacatcctaggagggatccgctctacgtgtacctatgtgggagcagctaagctcaaagagttgagcaggagaactaccttcatccgagtcacccagcaggtgaatccaatcttcagtgaggcgtgctagacctgagcagttctaccctcccaaggcaccagtactctaccatggggcatcccaagtggggtcctcacccatcccagctactgcagctctgtattactttgtcatttcctgttgtctcactcctgagggctcctgcagtaactctgtacttctctatctgcacacacaaaatgcccaaggcactcactggggaggaagcaaggaagcaaacagtctgagaaaatgatgcaagaaaatcaaatgggaatctggggacccaacacaacatcctgaagattattaaaaggaaaagatgctgattggtacataaatcttttacatggccttggtctagaggaggcaggcttttagaatcatgttttgttaatccgcttcactaaattggaccttcacatatctaaaaagctctgaagtgtttgtatatttgaaatacctcaataaagagagagctcattgactgt

SEQ ID NO: 103288 - protein, 583 aa, Artificial Sequence
  derived and/or modified sequence
MCLILKTAQENQYGRLLHSDRDPIPDVPAVYFVMPTEENIDRMCQDLRNQLYESYYLNFISAISRSKLEDIANAALAASAVTQVAKVFDQYLNFITLEDDMFVLCNQNKELVSYRAINRPDITDTEMETVMDTIVDSLFCFFVTLGAVPIIRCSRGTAAEMVAVKLDKKLRENLRDARNSLFTGDTLGAGQFSFQRPLLVLVDRNIDLATPLHHTWTYQALVHDVLDFHLNRVNLEESSGVENSPAGARPKRKNKKSYDLTPVDKFWQKHKGSPFPEVAESVQQELESYRAQEDEVKRLKSIMGLEGEDEGAISMLSDNTAKLTSAVSSLPELLEKKRLIDLHTNVATAVLEHIKARKLDVYFEYEEKIMSKTTLDKSLLDIISDPDAGTPEDKMRLFLIYYISTQQAPSEADLEQYKKALTDAGCNLNPLQYIKQWKAFTKMASAPASYGSTTTKPMGLLSRVMNTGSQFVMEGVKNLVLKQQNLPVTRILDNLMEMKSNPETDDYRYFDPKMLRGNDSSVPRNKNPFQEAIVFVVGGGNYIEYQNLVDYIKGKQGKHILYGCSELFNATQFIKQLSQLGQK

SEQ ID NO: 103289 - DNA, 1752 bp, Artificial Sequence
  derived and/or modified sequence
atgtgcctgatcctgaagaccgcccaggagaaccagtacggcagactgctgcacagcgacagagaccccatccccgacgtgcccgccgtgtacttcgtgatgcccaccgaggagaacatcgacagaatgtgccaggacctgagaaaccagctgtacgagagctactacctgaacttcatcagcgccatcagcagaagcaagctggaggacatcgccaacgccgccctggccgccagcgccgtgacccaggtggccaaggtgttcgaccagtacctgaacttcatcaccctggaggacgacatgttcgtgctgtgcaaccagaacaaggagctggtgagctacagagccatcaacagacccgacatcaccgacaccgagatggagaccgtgatggacaccatcgtggacagcctgttctgcttcttcgtgaccctgggcgccgtgcccatcatcagatgcagcagaggcaccgccgccgagatggtggccgtgaagctggacaagaagctgagagagaacctgagagacgccagaaacagcctgttcaccggcgacaccctgggcgccggccagttcagcttccagagacccctgctggtgctggtggacagaaacatcgacctggccacccccctgcaccacacctggacctaccaggccctggtgcacgacgtgctggacttccacctgaacagagtgaacctggaggagagcagcggcgtggagaacagccccgccggcgccagacccaagagaaagaacaagaagagctacgacctgacccccgtggacaagttctggcagaagcacaagggcagccccttccccgaggtggccgagagcgtgcagcaggagctggagagctacagagcccaggaggacgaggtgaagagactgaagagcatcatgggcctggagggcgaggacgagggcgccatcagcatgctgagcgacaacaccgccaagctgaccagcgccgtgagcagcctgcccgagctgctggagaagaagagactgatcgacctgcacaccaacgtggccaccgccgtgctggagcacatcaaggccagaaagctggacgtgtacttcgagtacgaggagaagatcatgagcaagaccaccctggacaagagcctgctggacatcatcagcgaccccgacgccggcacccccgaggacaagatgagactgttcctgatctactacatcagcacccagcaggcccccagcgaggccgacctggagcagtacaagaaggccctgaccgacgccggctgcaacctgaaccccctgcagtacatcaagcagtggaaggccttcaccaagatggccagcgcccccgccagctacggcagcaccaccaccaagcccatgggcctgctgagcagagtgatgaacaccggcagccagttcgtgatggagggcgtgaagaacctggtgctgaagcagcagaacctgcccgtgaccagaatcctggacaacctgatggagatgaagagcaaccccgagaccgacgactacagatacttcgaccccaagatgctgagaggcaacgacagcagcgtgcccagaaacaagaaccccttccaggaggccatcgtgttcgtggtgggcggcggcaactacatcgagtaccagaacctggtggactacatcaagggcaagcagggcaagcacatcctgtacggctgcagcgagctgttcaacgccacccagttcatcaagcagctgagccagctgggccagaagtag

SEQ ID NO: 103290 - DNA, 1752 bp, Artificial Sequence
  derived and/or modified sequence
atgtgtctaatactgaagaccgcccaggaaaaccaatatggtagattactgcacagcgacagagatcccattccagatgttcctgcagtctactttgtcatgccaaccgaggagaacatagatcgtatgtgccaggacctgcggaatcaattgtatgagtcatattacctgaatttcatcagcgcaatttccagatcaaagctggaggatatcgccaacgcggcccttgcagcgagcgcagttacccaggttgccaaagtatttgatcagtacctcaatttcattacactggaagacgacatgttcgtgctttgtaatcagaacaaagagctcgtgagttaccgagctatcaacagaccagacatcactgataccgagatggagacagtgatggacactatcgttgacagcctgttttgtttctttgtgacccttggggctgtgccaatcatccgttgttcacggggcaccgctgccgagatggttgctgttaagctggacaaaaagctgcgggaaaacctgcgcgatgcgcgcaacagcctgttcacgggcgacaccctgggcgctggacagttcagctttcaacggcctcttcttgtcctcgtagacaggaacatcgaccttgccacaccgctacatcatacctggacatatcaggccctcgtccatgatgtcctcgattttcatctcaatcgggtgaatctggaggagtcctcaggcgtcgagaacagcccagctggagccaggcctaaacgcaaaaataagaagtcctatgatttgacccccgtggacaagttttggcagaaacacaaagggtccccattccccgaagtagcagaaagcgttcaacaggaactggaatcctacagggcccaggaagatgaagtgaagcggctgaaaagcatcatgggtttagaaggcgaagatgagggtgcaattagtatgctctccgataatacggctaagctcacgagtgccgtgagtagcttacctgaactccttgaaaagaaacggctgatcgatctccacactaacgtggctacagccgtgctggagcatatcaaagcaagaaaactcgacgtctattttgaatacgaggaaaagattatgtctaaaaccactctggacaaaagcctgctggacattatctccgatcctgatgcgggaaccccagaggacaagatgaggctcttcctgatttactatatctccactcaacaagctccttctgaggcagatcttgaacagtacaaaaaagccctgaccgatgcaggttgcaacctcaatcccctgcagtatattaaacaatggaaggcctttacaaaaatggcaagcgcacccgcatcttatggcagtacaacaactaagccaatgggcttactgagcagggtaatgaacactggatcccagttcgtgatggagggggtgaaaaacctagtcttaaagcaacagaatttaccagtaacccgcatcctcgacaacctgatggagatgaagtctaatccagagactgacgattataggtattttgacccgaaaatgctccgcggcaacgacagcagcgtaccaaggaacaagaaccctttccaggaagccatcgtgtttgtcgtcggagggggcaactacatagagtaccaaaatttagtggattatattaaaggtaaacaggggaagcacatattatatgggtgctctgagttgtttaatgccactcagttcatcaagcagctcagccaactggggcagaagtag

SEQ ID NO: 103291 - DNA, 1752 bp, Artificial Sequence
  derived and/or modified sequence
atgtgcctgatcctgaagacagcccaggagaaccagtatggccgcctgctgcacagcgaccgggaccccatcccagatgtgcctgctgtgtactttgtgatgcccacagaggagaacatcgacaggatgtgccaggacctgaggaaccagctgtatgagagctactacctgaacttcatcagcgccatcagccgcagcaagctggaggacatcgccaatgctgccctggccgccagcgctgtgacccaggtggccaaggtgtttgaccagtacctgaacttcatcaccctggaggatgacatgtttgtgctgtgcaaccagaacaaggagctggtgtcctaccgggccatcaacagaccagacatcacagacacagagatggagaccgtgatggacaccatcgtggacagcctcttctgcttctttgtgaccctgggcgctgtgcccatcatccgctgcagccggggcacagctgctgagatggtggccgtgaagctggacaagaagctgcgggagaacctgagagatgccaggaacagcctcttcaccggggacaccctgggcgccggccagttctccttccagaggcccctgctggtgctggtggacaggaacatcgacctggccacccccctgcaccacacctggacctaccaggccctggtgcatgatgtgctggacttccacctgaacagagtgaacctggaggagagcagtggagtggagaacagccctgctggggcccggcccaagaggaagaacaagaagagctatgacctgacccctgtggacaagttctggcagaagcacaagggcagccccttccctgaggtggccgagagcgtgcagcaggagctggagagctaccgggcccaggaggatgaggtgaagaggctgaagagcatcatgggcctggagggggaggatgaaggagccatctccatgctgagtgacaacacagccaagctgaccagcgctgtgagcagcctgcctgagctgctggagaagaagaggctgattgacctgcacaccaacgtggccacagctgtgctggagcacatcaaggccaggaagctggatgtgtactttgaatatgaggagaagatcatgagcaagaccaccctggacaagagcctgctggacatcatcagtgaccctgatgctggcaccccagaggacaagatgaggctcttcctgatctactacatcagcacccagcaggcccccagcgaggccgacctggagcagtacaagaaggccctgacagatgctggctgcaacctgaaccccctgcagtacatcaagcagtggaaggccttcaccaagatggccagcgccccagccagctatggcagcaccaccaccaagcccatgggcctgctgagccgggtgatgaacacaggcagccagtttgtgatggagggcgtgaagaacctggtgctgaagcagcagaacctgcctgtgacccgcatcctggacaacctgatggagatgaagagcaaccctgagacagatgactaccgctactttgaccccaagatgctgcggggaaatgacagctctgtgcccaggaacaagaaccccttccaggaggccatcgtgtttgtggtgggcggcggcaactacatcgagtaccagaacctggtggactacatcaagggcaagcagggcaagcacatcctgtatggctgcagcgagctgttcaatgccacccagttcatcaagcagctgagccagctgggccagaagtag

SEQ ID NO: 103292 - DNA, 1752 bp, Artificial Sequence
  derived and/or modified sequence
atgtgcctgatcctgaagaccgcccaggagaaccagtacggccggttgttacacagtgatcgagaccctatcccggacgtccccgccgtgtactttgttatgcctaccgaggagaatattgaccgcatgtgtcaggatctgaggaaccaattatacgagtcttactacttgaattttatctctgcgatctcccgctccaaactggaggacattgccaacgccgccttagctgcctctgccgttactcaggttgctaaagtgtttgaccagtacctgaactttatcacactggaggatgatatgttcgtgctgtgcaaccagaataaggaactagtttcctaccgtgcgataaaccggcctgatattaccgacacagagatggagactgttatggataccatagtcgacagtcttttctgtttctttgttactttgggcgctgtgccaatcattagatgttctcgtggcacagcagccgaaatggtggcagtgaagctggacaagaaactaagggagaatctccgggacgcaaggaactcgctcttcaccggggatacactaggagctggtcagtttagcttccaacgccctttattggttctagtggacagaaacatagacctggcaacgccccttcatcacacctggacctatcaagccctggttcacgatgtgctggatttccatctgaacagagttaatctggaggaaagttcgggagtggagaattcccctgctggtgctcggcctaaaaggaagaacaagaagtcttatgacctaaccccagtggataaattctggcagaagcataagggatcaccattccccgaagtagctgagtccgtccagcaagagctcgagagctacagagcccaggaggatgaggtgaaaagactgaaatctatcatgggacttgaaggagaggacgaaggcgctatttccatgctatctgataacaccgccaagctgacctctgcagttagtagtctacccgagttgcttgaaaaaaaaaggcttattgacttacataccaatgtggccacggccgtactggaacacataaaggctcgaaagctggacgtgtacttcgagtatgaggagaaaatcatgtcaaaaactaccctcgacaagtctctgctggatattatctccgaccctgatgcaggaacccctgaggacaaaatgcgtcttttcctgatttattacatctcgacccaacaggcgccatctgaagccgatttagagcagtacaaaaaagccctgaccgacgctggttgtaatctcaaccctctgcaatacatcaaacagtggaaagcctttaccaagatggcttccgcaccagcatcatacggatcgactacaactaagccaatgggattgctgagccgcgtaatgaataccggatcccaattcgtgatggagggtgtgaagaacctggtgttaaaacagcagaacctgccagtgacacggatcctggataacctaatggagatgaagagcaaccccgagacggatgattatagatattttgaccctaaaatgttacgtggtaatgactcaagcgttccaagaaacaagaatccatttcaggaagcaatagtttttgtggtgggaggtgggaactacatagaataccaaaacctggtggactacattaaagggaaacagggcaagcacattctgtatgggtgctctgagctattcaacgctacccaatttatcaagcagctgtctcagctggggcagaagtag

SEQ ID NO: 103293 - DNA, 1752 bp, Artificial Sequence
  derived and/or modified sequence
atgtgtctcatccttaagacggcgcaagagaatcagtacggcagactcctgcactcggacagagatcccataccagacgtgcctgccgtctacttcgtgatgcccaccgaagagaacattgataggatgtgtcaagatttaaggaatcagttatatgagtcttactacctgaatttcatctccgcgatttccagatcgaagcttgaagacatcgcaaatgcagctctggccgctagcgcagtcacacaggtagcgaaggttttcgaccagtacctgaattttattactcttgaagacgacatgttcgtactttgtaatcaaaataaagagctggtcagctacagggctatcaaccgcccagacatcactgacaccgagatggagaccgttatggatactatcgtggactccctgttttgcttttttgttacgcttggggcagtcccaataatccgctgctcccgcggaaccgcagccgagatggtggccgttaaattagacaagaaacttagagagaatctcagagacgcccgaaactccctgtttactggcgacacactaggcgctggacaattcagcttccaacggccactgctggtgctggtcgatcggaacatcgacctggcgactcccctgcaccacacttggacataccaagctttggtgcatgatgtgctggatttccatttgaaccgcgtgaaccttgaggaaagttccggcgttgaaaactctcctgctggggctagacccaagcggaagaataagaaatcttatgacctgacccctgtggataagttctggcagaagcataaggggtctccgttcccagaggtggccgaaagcgtacagcaggagctggagtcgtatcgggctcaggaggatgaggtcaagcgactaaagtctatcatgggactcgaaggtgaagatgagggcgcaatcagcatgctgtctgataataccgccaaactaacctccgccgtctcttcactaccagaattgctggaaaagaaacggctcatcgatctgcacacgaacgtggccacggctgtcctggagcacattaaagcgagaaagttggatgtatacttcgagtacgaggagaagattatgtcgaagacgaccctggataaaagtctgctcgacattatcagtgatcccgacgccggaaccccggaggacaagatgcggctttttctgatttattacatctcaacccagcaggcaccgagcgaagccgacctcgagcaatacaagaaagccttgacagacgcagggtgtaatctcaaccctcttcagtatataaagcagtggaaggcgtttacgaagatggcctcagcccctgcctcatacggctcgactaccacaaagcccatgggtctgctttctcgggtgatgaacacggggtcccagtttgtcatggaaggagtgaagaacctggtactgaaacagcaaaaccttccagtgactcgcattctggacaacttgatggaaatgaagtccaatccagagacagacgattacaggtattttgacccaaaaatgctccggggaaacgacagcagcgtgcccaggaacaaaaatccattccaggaggctattgtcttcgtggttgggggaggcaattacatcgaatatcaaaacttagtggactacattaagggaaaacagggaaagcacatcctgtatggctgttcggagctgttcaacgcgacgcagttcatcaagcagctctctcagctaggccaaaagtag

SEQ ID NO: 103294 - DNA, 1943 bp, Artificial Sequence
  derived and/or modified sequence
agtggctcgtgggagccaagatggcggcggcggcggcagcgacagcagcagcagcagccagtattcgggaaaggcagacagtggctttgaagcgtatgttgaatttcaatgtgcctcatattaaaaacagcacaggagaaccagtatggaaggcttttacactctgatcgagatcctattccagatgttcctgcagtatactttgtaatgccaactgaagaaaatattgacagaatgtgccaggatcttcgaaatcaactatatgaatcatattatttaaattttatttctgctatttcaagaagtaaactggaagatattgcaaatgcagcgttagcagctagtgcagtaacacaagtagccaaggtttttgaccaatatctcaattttattactttggaagatgatatgtttgtattatgtaatcaaaataaggagcttgtttcatatcgtgccattaacaggccagatatcacagacacggaaatggaaactgttatggacactatagttgacagcctcttctgcttttttgttactctgggtgctgttcctataatcagatgttcaagaggaacagcagcagaaatggtagcagtgaaactagacaagaaacttcgagaaaatctaagagatgcaagaaacagtctttttacaggtgatacacttggagctggccaattcagcttccagaggcccttattagtccttgttgacagaaacatagatttggcaactcctttacatcatacttggacatatcaagcattggtgcacgatgtactggatttccatttaaacagggttaatttggaagaatcttcaggagtggaaaactctccagctggtgctagaccaaagagaaaaaacaagaagtcttatgatttaactccggttgataaattttggcaaaaacataaaggaagtccattcccagaagttgcagaatcagttcagcaagaactagaatcttacagagcacaggaagatgaggtcaaacgacttaaaagcattatgggactagaaggggaagatgaaggagccataagtatgctttctgacaataccgctaagctaacatcagctgttagttctttgccagaactccttgagaaaaaaagacttattgatctccatacaaatgttgccactgctgttttagaacatataaaggcaagaaaattggatgtatattttgaatatgaagaaaaaataatgagcaaaactactctggataaatctcttctagatataatatcagaccctgatgcaggaactccagaagataaaatgaggttgtttcttatctattatataagcacacagcaagcaccttctgaggctgatttggagcaatataaaaaagctttaactgatgcaggatgcaaccttaatcctttacaatatatcaaacagtggaaggcttttaccaagatggcctcagctccggccagctatggcagcactaccactaaaccaatgggtcttttatcacgagtcatgaatacaggatcacagtttgtgatggaaggagtgaagaacctggttttgaaacagcaaaatctacctgttactcgtattttggacaatcttatggagatgaagtcaaaccccgaaactgatgactatagatattttgatcccaaaatgctgcggggcaatgacagctcagttcccagaaataaaaatccattccaagaggccattgtttttgtggtgggaggaggcaactacattgaatatcagaatcttgttgactacataaaggggaaacaaggcaaacacattttatatggctgcagtgagctttttaatgctacacagttcataaaacagttgtcacaacttggacaaaagtaacacagaagaaccttactatgataatctacttggaatgtggataaatgtaaaaagaagaaaagttagaagagcaatatgtttcc

SEQ ID NO: 103295 - protein, 251 aa, Artificial Sequence
  derived and/or modified sequence
MMRRTLENRNAQTKQLQTAVSNVEKHFGELCQIFAAYVRKTARLRDKADLLVNEINAYAATETPHLKLGLMNFADEFAKLQDYRQAEVERLEAKVVEPLKTYGTIVKMKRDDLKATLTARNREAKQLTQLERTRQRNPSDRHVIAQAETELQRAAMDASRTSRHLEETINNFERQKMKDIKVFRNSLYAPDYSSRLDIVRANSKSPLQRSLSAKCVSGTGQVSTCRLRKDQQAEDDEDDELDVTEEENFLK

SEQ ID NO: 103296 - DNA, 756 bp, Artificial Sequence
  derived and/or modified sequence
atgatgagaagaaccctggagaacagaaacgcccagaccaagcagctgcagaccgccgtgagcaacgtggagaagcacttcggcgagctgtgccagatcttcgccgcctacgtgagaaagaccgccagactgagagacaaggccgacctgctggtgaacgagatcaacgcctacgccgccaccgagaccccccacctgaagctgggcctgatgaacttcgccgacgagttcgccaagctgcaggactacagacaggccgaggtggagagactggaggccaaggtggtggagcccctgaagacctacggcaccatcgtgaagatgaagagagacgacctgaaggccaccctgaccgccagaaacagagaggccaagcagctgacccagctggagagaaccagacagagaaaccccagcgacagacacgtgatcgcccaggccgagaccgagctgcagagagccgccatggacgccagcagaaccagcagacacctggaggagaccatcaacaacttcgagagacagaagatgaaggacatcaaggtgttcagaaacagcctgtacgcccccgactacagcagcagactggacatcgtgagagccaacagcaagagccccctgcagagaagcctgagcgccaagtgcgtgagcggcaccggccaggtgagcacctgcagactgagaaaggaccagcaggccgaggacgacgaggacgacgagctggacgtgaccgaggaggagaacttcctgaagtag

SEQ ID NO: 103297 - DNA, 756 bp, Artificial Sequence
  derived and/or modified sequence
atgatgcggcgaactctggaaaatcggaatgcccagaccaaacaattacagacagccgttagcaacgtggagaagcatttcggcgaactgtgtcagatctttgctgcatatgtgcgcaagacagcaaggctgcgcgacaaggccgatctcctcgttaacgaaattaacgcctatgccgctactgagacaccgcatttaaaactcggcctaatgaacttcgcggatgagttcgcaaagttgcaggactatcggcaggcagaagtggaaagactggaagcaaaggtcgtggaacccctcaaaacatacgggacgatcgttaagatgaagcgtgatgatctcaaagcaacactgactgcacggaatagagaagcaaaacagttgacacagctcgaacggacccgacagaggaacccatctgaccgccacgtgatagcccaagccgagaccgaactccagcgtgctgcaatggatgcctcccgcacttcacggcatttggaggagaccatcaacaacttcgagagacagaagatgaaggacataaaggtgttccgcaattccctttacgcccctgattactcctccagactggacatcgtgcgcgcaaatagcaagagtccgctacaacgaagcctgtcagccaaatgcgtgtccggaactggccaagtgagtacatgtcgactaagaaaagatcagcaggccgaggatgacgaagacgatgaactggatgttaccgaagaagaaaactttctaaaatag

SEQ ID NO: 103298 - DNA, 959 bp, Artificial Sequence
  derived and/or modified sequence
gcgccttggaatccccgtccttgggcccccgcaaggtccccggccgtgcgcgaggcagcatgatgaggcgcaccctggaaaaccggaacgctcaaacgaaacaactgcaaacagctgtctcaaatgtggagaagcattttggagaactgtgccaaatcttcgctgcctatgtgcggaaaactgccaggctgagagacaaagcagacctcctggtgaatgaaattaacgcgtatgctgctacagagaccccgcatttaaagctgggcctgatgaactttgcagatgagtttgccaaacttcaggattatcgacaagcagaggttgaaagacttgaagccaaagtagttgaacccttgaaaacttatgggaccattgtgaaaatgaaacgggatgacctcaaagcaacactcacagcaaggaatcgagaagctaagcaattaactcagttagaaagaacacgtcagcgaaacccatctgatcgacatgttattgctcaagcagaaacggaattacagagagctgcaatggatgctagccgaacaagtcgtcatctggaggaaactattaacaactttgaaaggcagaaaatgaaggatataaaggttttccgaaattctctgtatgcaccagattattcatctcgtttagatattgtaagagcaaattcaaagtcacctcttcagagatcactgtcagctaagtgtgtatctggaacaggacaggtatccacttgtcgactaagaaaggatcaacaagcagaagatgatgaggatgacgagttagatgttacagaagaagaaaattttcttaagtaaactacacatttccattttcatcataaatgacttgaaatccacaatgactaaattgtagaactttatactcactttgctatgttaagcctcaaagtgaagtccaactggaaacagaaaaataattaaaggaaacttatgctgacc

SEQ ID NO: 103299 - DNA, 756 bp, Artificial Sequence
  derived and/or modified sequence
atgatgaggaggaccctggagaacagaaatgcccagaccaagcagctgcagacagctgtgtccaatgtggagaagcactttggagagctgtgccagatctttgctgcctacgtgaggaagacagcccggctgcgggacaaggctgacctgctggtgaatgagatcaatgcctatgctgccacagagaccccccacctgaagctgggcctgatgaactttgctgatgaatttgccaagctgcaggactaccggcaggccgaggtggagcggctggaggccaaggtggtggagcccctgaagacctacggcaccatcgtgaagatgaagagagatgacctgaaggccaccctgacagccaggaaccgggaggccaagcagctgacccagctggagaggacccggcagaggaaccccagcgacagacatgtgattgcccaggccgagacagagctgcagagagctgccatggatgccagcaggaccagccgccacctggaggagaccatcaacaactttgagcggcagaagatgaaggacatcaaggtgttcaggaacagcctgtatgccccagactacagcagccggctggacatcgtgcgggccaacagcaagagccccctgcagaggagcctgagcgccaagtgtgtgtctggaacaggccaggtgtccacctgccgcctgaggaaggaccagcaggccgaggatgatgaagatgatgagctggatgtgacagaggaggagaacttcctgaagtag

SEQ ID NO: 103300 - DNA, 756 bp, Artificial Sequence
  derived and/or modified sequence
atgatgcggcggaccctggagaaccggaacgcccagaccaagcagctgcaaaccgcagtgtccaacgtagagaaacacttcggagaactttgtcaaatatttgccgcttatgtcagaaaaacagcaaggctgagggacaaagccgacttactagtgaacgaaatcaatgcgtacgcggcaaccgagactccccacttgaagctgggcctcatgaatttcgccgatgaatttgctaagctgcaggactacagacaggccgaggtggaacgcttggaagccaaggttgtggaacctctcaagacttacggaacaatcgtgaagatgaaacgggatgacttgaaagccacgttgacagcccgaaacagggaggccaagcagttaacacagctggagagaacacggcaaaggaacccaagcgatcgccacgtcattgcgcaagcggaaacagagttacagcgcgctgctatggatgcgtcccgtacatctcgccatctggaggaaacaatcaataactttgaaaggcagaagatgaaggatattaaggttttcaggaactcactgtatgctcccgattactcatctaggctggatatcgtgagggctaactccaagagtccccttcagagatccctcagcgccaagtgcgtcagcggcactggacaggtcagtacctgccgcctgaggaaggaccagcaggctgaagatgacgaggatgacgagttggatgttaccgaggaggaaaattttctaaaatag

SEQ ID NO: 103301 - DNA, 756 bp, Artificial Sequence
  derived and/or modified sequence
atgatgcggaggacactggaaaatagaaacgctcagaccaagcagctgcagaccgctgtgagcaatgtggagaaacacttcggagagttgtgtcagattttcgccgcatatgtcaggaagacagccagactgcgcgataaagccgacctcctagtgaacgagattaatgcctacgctgccacagagacccctcatttgaagcttggcctgatgaactttgctgacgaatttgccaaacttcaggactacaggcaggccgaagtggagcgccttgaggctaaggtggtagaacccctcaagacatacgggactattgtaaaaatgaagagagacgatctcaaagccacactcactgccaggaacagggaggcaaagcaacttacccagctcgaaaggacccgccagcgcaacccgagcgacaggcacgtgatcgctcaagcagagacagaactgcagcgcgcagccatggacgcaagtcgcacatcaaggcacctggaggagactatcaacaactttgagcggcagaagatgaaagacatcaaagtgtttcggaattcactgtacgccccagattacagctccagactcgacatagtcagggctaactctaagtcaccactgcagcggagcttaagcgcaaagtgcgtatctggcacgggacaggtttctacatgtcgcctccgcaaagaccagcaggccgaagacgacgaggatgatgaactggatgtgacagaggaagagaacttccttaagtag

SEQ ID NO: 103302 - protein, 311 aa, Artificial Sequence
  derived and/or modified sequence
MARLGSTGGVSGRVVTQHRDSAPFLGAPRLGLRELGPIRGTAPEWHGRWNAAERSDKMYQVPLPLDRDGTLVRLRFTMVALVTVCCPLVAFLFCILWSLLFHFKETTATHCGVPNYLPSVSSAIGGEVPQRYVWRFCIGLHSAPRFLVAFAYWNHYLSCTSPCSCYRPLCRLNFGLNVVENLALLVLTYVSSSEDFTIHENAFIVFIASSLGHMLLTCILWRLTKKHTVSQEDRKSYSWKQRLFIINFISFFSALAVYFRHNMYCEAGVYTIFAILEYTVVLTNMAFHMTAWWDFGNKELLITSQPEEKRF

SEQ ID NO: 103303 - DNA, 936 bp, Artificial Sequence
  derived and/or modified sequence
atggccagactgggcagcaccggcggcgtgagcggcagagtggtgacccagcacagagacagcgcccccttcctgggcgcccccagactgggcctgagagagctgggccccatcagaggcaccgcccccgagtggcacggcagatggaacgccgccgagagaagcgacaagatgtaccaggtgcccctgcccctggacagagacggcaccctggtgagactgagattcaccatggtggccctggtgaccgtgtgctgccccctggtggccttcctgttctgcatcctgtggagcctgctgttccacttcaaggagaccaccgccacccactgcggcgtgcccaactacctgcccagcgtgagcagcgccatcggcggcgaggtgccccagagatacgtgtggagattctgcatcggcctgcacagcgcccccagattcctggtggccttcgcctactggaaccactacctgagctgcaccagcccctgcagctgctacagacccctgtgcagactgaacttcggcctgaacgtggtggagaacctggccctgctggtgctgacctacgtgagcagcagcgaggacttcaccatccacgagaacgccttcatcgtgttcatcgccagcagcctgggccacatgctgctgacctgcatcctgtggagactgaccaagaagcacaccgtgagccaggaggacagaaagagctacagctggaagcagagactgttcatcatcaacttcatcagcttcttcagcgccctggccgtgtacttcagacacaacatgtactgcgaggccggcgtgtacaccatcttcgccatcctggagtacaccgtggtgctgaccaacatggccttccacatgaccgcctggtgggacttcggcaacaaggagctgctgatcaccagccagcccgaggagaagagattctag

SEQ ID NO: 103304 - DNA, 936 bp, Artificial Sequence
  derived and/or modified sequence
atggctagactggggagtaccggaggggtgagcggcagggtggttacccagcatcgggacagtgctccttttctcggagcgccgaggctgggactcagggagcttgggcccatccggggcaccgctcccgagtggcatggccggtggaacgcagctgaacgatcagacaaaatgtaccaggtgcctctgccacttgacagagacggcaccttggtccgattgaggtttaccatggtggccctggtcacagtgtgctgccctctggttgcttttctgttttgcattttgtggagcctgctctttcacttcaaggagaccacagccacacattgtggcgtgcctaattatctgccctctgtttcttcagccataggcggggaggttccgcaaagatatgtgtggaggttttgcatcggcctgcactcagctccacgcttcctggtggcctttgcatactggaatcattatctgtcttgcacctccccgtgttcatgttatagacccctgtgcagactgaatttcggtctgaacgttgtggagaacctggctttactcgtgctgacatatgtatcgtctagcgaggatttcacgatccacgagaatgcttttatcgtgttcattgcgtccagtcttggccacatgttgctgacatgcatcctctggcgcctgactaagaagcataccgtatcacaggaggaccgaaagtcctatagctggaaacagagactgttcattatcaatttcatctcgtttttctcggcgctggcagtgtatttcagacacaacatgtactgcgaggctggcgtgtatacaatatttgccattctggaatacaccgtcgtgttgaccaacatggcatttcatatgaccgcttggtgggactttggcaacaaggagctgctcatcacctctcagcccgaggagaagagattctag

SEQ ID NO: 103305 - DNA, 936 bp, Artificial Sequence
  derived and/or modified sequence
atggcccggctgggcagcactggaggagtgtctggccgggtggtgacccagcaccgggacagcgcccccttcctgggcgccccccggctgggcctgcgggagctgggccccatccggggcacagcccctgagtggcacggccgctggaatgctgctgagaggagtgacaagatgtaccaggtgcccctgcccctggacagagatggcaccctggtgcggctgcgcttcaccatggtggccctggtgacagtgtgctgccccctggtggccttcctgttctgcatcctgtggagcctgctcttccacttcaaggagaccacagccacccactgcggcgtgcccaactacctgcccagcgtgagcagcgccatcggcggggaggtgccccagcgctacgtgtggaggttctgcatcggcctgcacagcgccccccgcttcctggtggcctttgcctactggaaccactacctgagctgcaccagcccctgcagctgctaccggcccctgtgccgcctgaactttggcctgaatgtggtggagaacctggccctgctggtgctgacctacgtgagcagcagcgaggacttcaccatccatgaaaatgccttcatcgtgttcatcgccagcagcctgggccacatgctgctgacctgcatcctgtggaggctgaccaagaagcacacagtgtcccaggaggacaggaagagctacagctggaagcagaggctcttcatcatcaacttcatctccttcttcagcgccctggccgtgtacttccgccacaacatgtactgtgaggccggcgtgtacaccatctttgccatcctggagtacacagtggtgctgaccaacatggccttccacatgacagcctggtgggactttggaaacaaggagctgctgatcaccagccagcctgaggagaagcgcttctag

SEQ ID NO: 103306 - DNA, 936 bp, Artificial Sequence
  derived and/or modified sequence
atggcccggctgggcagcaccggcggcgtgagcggccgggtggtgacccagcacagggatagtgcaccattcttgggggccccccggctgggcttgcgggagctggggcctattcgaggcaccgccccagagtggcatgggcgttggaacgccgctgaacgtagcgacaagatgtatcaggttccactgcccctcgaccgcgacggcactctcgtcaggctacgctttaccatggtggccttggttactgtctgctgcccactggtggcgttcctcttctgtatcctctggagcttgctgtttcactttaaggaaacaactgctacccactgcggagtgcccaactatctgccatccgtgtcaagcgcaattgggggcgaggttccacagagatatgtttggcggttctgtatcgggctccatagcgctccccggttcctcgtcgcgttcgcttattggaatcactacctgtcctgtactagtccttgcagctgctaccgccccctatgtcgattaaacttcgggctgaatgtggtggagaacttagcactcctggttctgacctacgtttcctcatctgaggatttcaccattcatgagaacgcgttcatagtgtttatcgcttcttccctgggccatatgctcctgacctgcatcctgtggaggctcacaaaaaagcatacagtttctcaggaagaccgcaagtcctattcctggaaacaaaggctcttcattattaattttatatcttttttttccgccttggccgtctactttcggcacaatatgtactgtgaggctggagtgtatactatcttcgcgatacttgaatatactgtcgttctcacaaatatggcgttccacatgactgcgtggtgggactttggcaacaaggagctgcttataaccagtcagccggaagaaaagcgattttag

SEQ ID NO: 103307 - DNA, 931 bp, Artificial Sequence
  derived and/or modified sequence
cgcagagccagcccccgaccccgggccacctgggcccccgggttccgccggcactctcgccaccaccgcgtgggtctgacaagatgtaccaggtcccactaccactggatcgggatgggaccctggtacggctccgcttcaccatggtggccctggtcacggtctgctgtccacttgtcgccttcctcttctgcatcctctggtccctgctcttccacttcaaggagacaacggccacacactgtggggtgcccaattacctgccctcggtgagctcagccatcggcggggaggtgccccagcgctacgtgtggcgtttctgcatcggcctgcactcggcgcctcgcttcttggtggccttcgcctactggaaccactacctcagctgcacctccccgtgttcctgctatcgcccgctctgccgcctcaacttcggcctcaatgtcgtggagaacctcgcgttgctagtgctcacttatgtctcctcctccgaggacttcaccatccacgaaaatgctttcattgtgttcattgcctcatccctcgggcacatgctcctcacctgcattctctggcggttgaccaagaagcacacagtaagtcaggaggatcgcaagtcctacagctggaaacagcggctcttcatcatcaacttcatctccttcttctcggcgctggctgtctactttcggcacaacatgtattgtgaggctggagtgtacaccatctttgccatcctggagtacactgttgtcttaaccaacatggcgttccacatgacggcctggtgggacttcgggaacaaggagctgctcataacctctcagcctgaggaaaagcgattctgaacccttcagtcctgcttgggaggacgcagcccactgcccagaaacaagaaacacgataccattctggccttccccaccccaca

SEQ ID NO: 103308 - DNA, 1837 bp, Artificial Sequence
  derived and/or modified sequence
agggcctctcgaagtgggcttgtgaatggctagattgggaagcaccggcggggtgtcgggaagggtggtgacgcaacatagagactccgcccccttccttggagcgccgcgactcgggctgagggagctcgggccaatcagagggacggccccagaatggcatggtagatggaacgcagctgagaggtctgacaagatgtaccaggtcccactaccactggatcgggatgggaccctggtacggctccgcttcaccatggtggccctggtcacggtctgctgtccacttgtcgccttcctcttctgcatcctctggtccctgctcttccacttcaaggagacaacggccacacactgtggggtgcccaattacctgccctcggtgagctcagccatcggcggggaggtgccccagcgctacgtgtggcgtttctgcatcggcctgcactcggcgcctcgcttcttggtggccttcgcctactggaaccactacctcagctgcacctccccgtgttcctgctatcgcccgctctgccgcctcaacttcggcctcaatgtcgtggagaacctcgcgttgctagtgctcacttatgtctcctcctccgaggacttcaccatccacgaaaatgctttcattgtgttcattgcctcatccctcgggcacatgctcctcacctgcattctctggcggttgaccaagaagcacacagtaagtcaggaggatcgcaagtcctacagctggaaacagcggctcttcatcatcaacttcatctccttcttctcggcgctggctgtctactttcggcacaacatgtattgtgaggctggagtgtacaccatctttgccatcctggagtacactgttgtcttaaccaacatggcgttccacatgacggcctggtgggacttcgggaacaaggagctgctcataacctctcagcctgaggaaaagcgattctgaacccttcagtcctgcttgggaggacgcagcccactgcccagaaacaagaaacacgataccattctggccttccccaccccacatcctctcttggccttactgaagatgggggaagggtaagaaggaagggtgtaggccaaggctcaccccagtgctgctggcttctcctctccacccctcatatgggcgtggggtcctcaaacatcacctttacctgagaggccccaagaagctgagctggcagagagctccaccatttggtgctaaaaaaaaaaacgtcctgaggttcatgaccaccatccagtttctggcctttacacagtcacctttcactgaggtcaggagcccctgagcagtggctgctccctgacaaccacagccatttctctgcacgggggtcattcataggactaatgtatttcatgatctactgtgcacatccaggcctgtggccacagtcccctgctaaagttgctcaggtgttctagtcctgacttcacctttttgatttggtgtgtgccctagggtatgtacccttccccatctgagcctcggtgtgtccatgtgtctggcgggggatgggtggactgtatgatttccaaggactctaccagtcagtggttctgatgtcatcgggtggaggtggtgttctatacctaaaggatgacctgctccagaaacagcaccagcacagcatgtattttcttctcttctgaaagttctggcttgtagacccctcccctcctttgcaaaggtatgggatagaggggtcagatgcagatctctactgtaaaatgggctccctggtatctcctgtcttccctactgctccaaaccctaaattttggttgtacattttatttgaaaggaaaataa

SEQ ID NO: 103309 - DNA, 936 bp, Artificial Sequence
  derived and/or modified sequence
atggctagactgggctccacgggcggtgtgtcgggccgagtggtgacacagcacagagattccgccccatttttaggagccccacgactgggccttcgcgaactgggccctattcggggaacggcaccagaatggcacgggagatggaacgccgctgagcggtctgataagatgtaccaggtgcccctcccccttgatcgtgatggaacgctggtaagactgcggttcactatggtggccctggttacagtttgttgtcctttagtggcttttctgttttgtatcttatggtctctgctgttccatttcaaggagacaacagccacccattgcggggtaccaaactacttgccctccgtttcctccgcgatcgggggagaggtgccccagcgctatgtctggaggttttgtattggcctgcatagtgccccaaggttcctcgtggcctttgcctactggaaccactatctgtcgtgcacttccccatgttcctgctaccggcctctttgtcgactgaatttcgggctgaatgtggtggagaacctcgctctgctggtactgacgtacgtgtcaagttccgaagacttcacaatccatgagaatgctttcatagtgtttattgcctcctcactgggacacatgcttctgacatgcatcttgtggcgtcttacgaagaagcacacggtatcacaagaagacagaaagagctattcatggaagcagagactcttcatcattaatttcattagctttttctcggccctcgcagtgtacttcaggcacaacatgtactgtgaggccggtgtgtataccatcttcgcaatcctcgaatatacggttgttctaaccaacatggcatttcatatgacagcctggtgggattttgggaacaaggagctcctgattacaagccagcctgaggagaagaggttttag

SEQ ID NO: 103310 - protein, 1125 aa, Artificial Sequence
  derived and/or modified sequence
MTVEQNVLQQSAAQKHQQTFLNQLREITGINDTQILQQALKDSNGNLELAVAFLTAKNAKTPQQEETTYYQTALPGNDRYISVGSQADTNVIDLTGDDKDDLQRAIALSLAESNRAFRETGITDEEQAISRVLEASIAENKACLKRTPTEVWRDSRNPYDRKRQDKAPVGLKNVGNTCWFSAVIQSLFNLLEFRRLVLNYKPPSNAQDLPRNQKEHRNLPFMRELRYLFALLVGTKRKYVDPSRAVEILKDAFKSNDSQQQDVSEFTHKLLDWLEDAFQMKAEEETDEEKPKNPMVELFYGRFLAVGVLEGKKFENTEMFGQYPLQVNGFKDLHECLEAAMIEGEIESLHSENSGKSGQEHWFTELPPVLTFELSRFEFNQALGRPEKIHNKLEFPQVLYLDRYMHRNREITRIKREEIKRLKDYLTVLQQRLERYLSYGSGPKRFPLVDVLQYALEFASSKPVCTSPVDDIDASSPPSGSIPSQTLPSTTEQQGALSSELPSTSPSSVAAISSRSVIHKPFTQSRIPPDLPMHPAPRHITEEELSVLESCLHRWRTEIENDTRDLQESISRIHRTIELMYSDKSMIQVPYRLHAVLVHEGQANAGHYWAYIFDHRESRWMKYNDIAVTKSSWEELVRDSFGGYRNASAYCLMYINDKAQFLIQEEFNKETGQPLVGIETLPPDLRDFVEEDNQRFEKELEEWDAQLAQKALQEKLLASQKLRESETSVTTAQAAGDPEYLEQPSRSDFSKHLKEETIQIITKASHEHEDKSPETVLQSKPENTTSQPLSNQRVVEVAIPHVGKFMIESKEGGYDDEIMMTPNMQGIIMAIGKSRSVYDRCGPEAGFFKAIKLEYARLVKLAQEDTPPETDYRLHHVVVYFIQNQAPKKIIEKTLLEQFGDRNLSFDERCHNIMKVAQAKLEMIKPEEVNLEEYEEWHQDYRKFRETTMYLIIGLENFQRESYIDSLLFLICAYQNNKELLSKGLYRGHDEELISHYRRECLLKLNEQAAELFESGEDREVNNGLIIMNEFIVPFLPLLLVDEMEEKDILAVEDMRNRWCSYLGQEMEPHLQEKLTDFLPKLLDCSMEIKSFHEPPKLPSYSTHELCERFARIMLSLSRTPADGR

SEQ ID NO: 103311 - DNA, 3378 bp, Artificial Sequence
  derived and/or modified sequence
atgaccgtggagcagaacgtgctgcagcagagcgccgcccagaagcaccagcagaccttcctgaaccagctgagagagatcaccggcatcaacgacacccagatcctgcagcaggccctgaaggacagcaacggcaacctggagctggccgtggccttcctgaccgccaagaacgccaagaccccccagcaggaggagaccacctactaccagaccgccctgcccggcaacgacagatacatcagcgtgggcagccaggccgacaccaacgtgatcgacctgaccggcgacgacaaggacgacctgcagagagccatcgccctgagcctggccgagagcaacagagccttcagagagaccggcatcaccgacgaggagcaggccatcagcagagtgctggaggccagcatcgccgagaacaaggcctgcctgaagagaacccccaccgaggtgtggagagacagcagaaacccctacgacagaaagagacaggacaaggcccccgtgggcctgaagaacgtgggcaacacctgctggttcagcgccgtgatccagagcctgttcaacctgctggagttcagaagactggtgctgaactacaagccccccagcaacgcccaggacctgcccagaaaccagaaggagcacagaaacctgcccttcatgagagagctgagatacctgttcgccctgctggtgggcaccaagagaaagtacgtggaccccagcagagccgtggagatcctgaaggacgccttcaagagcaacgacagccagcagcaggacgtgagcgagttcacccacaagctgctggactggctggaggacgccttccagatgaaggccgaggaggagaccgacgaggagaagcccaagaaccccatggtggagctgttctacggcagattcctggccgtgggcgtgctggagggcaagaagttcgagaacaccgagatgttcggccagtaccccctgcaggtgaacggcttcaaggacctgcacgagtgcctggaggccgccatgatcgagggcgagatcgagagcctgcacagcgagaacagcggcaagagcggccaggagcactggttcaccgagctgccccccgtgctgaccttcgagctgagcagattcgagttcaaccaggccctgggcagacccgagaagatccacaacaagctggagttcccccaggtgctgtacctggacagatacatgcacagaaacagagagatcaccagaatcaagagagaggagatcaagagactgaaggactacctgaccgtgctgcagcagagactggagagatacctgagctacggcagcggccccaagagattccccctggtggacgtgctgcagtacgccctggagttcgccagcagcaagcccgtgtgcaccagccccgtggacgacatcgacgccagcagcccccccagcggcagcatccccagccagaccctgcccagcaccaccgagcagcagggcgccctgagcagcgagctgcccagcaccagccccagcagcgtggccgccatcagcagcagaagcgtgatccacaagcccttcacccagagcagaatcccccccgacctgcccatgcaccccgcccccagacacatcaccgaggaggagctgagcgtgctggagagctgcctgcacagatggagaaccgagatcgagaacgacaccagagacctgcaggagagcatcagcagaatccacagaaccatcgagctgatgtacagcgacaagagcatgatccaggtgccctacagactgcacgccgtgctggtgcacgagggccaggccaacgccggccactactgggcctacatcttcgaccacagagagagcagatggatgaagtacaacgacatcgccgtgaccaagagcagctgggaggagctggtgagagacagcttcggcggctacagaaacgccagcgcctactgcctgatgtacatcaacgacaaggcccagttcctgatccaggaggagttcaacaaggagaccggccagcccctggtgggcatcgagaccctgccccccgacctgagagacttcgtggaggaggacaaccagagattcgagaaggagctggaggagtgggacgcccagctggcccagaaggccctgcaggagaagctgctggccagccagaagctgagagagagcgagaccagcgtgaccaccgcccaggccgccggcgaccccgagtacctggagcagcccagcagaagcgacttcagcaagcacctgaaggaggagaccatccagatcatcaccaaggccagccacgagcacgaggacaagagccccgagaccgtgctgcagagcaagcccgagaacaccaccagccagcccctgagcaaccagagagtggtggaggtggccatcccccacgtgggcaagttcatgatcgagagcaaggagggcggctacgacgacgagatcatgatgacccccaacatgcagggcatcatcatggccatcggcaagagcagaagcgtgtacgacagatgcggccccgaggccggcttcttcaaggccatcaagctggagtacgccagactggtgaagctggcccaggaggacaccccccccgagaccgactacagactgcaccacgtggtggtgtacttcatccagaaccaggcccccaagaagatcatcgagaagaccctgctggagcagttcggcgacagaaacctgagcttcgacgagagatgccacaacatcatgaaggtggcccaggccaagctggagatgatcaagcccgaggaggtgaacctggaggagtacgaggagtggcaccaggactacagaaagttcagagagaccaccatgtacctgatcatcggcctggagaacttccagagagagagctacatcgacagcctgctgttcctgatctgcgcctaccagaacaacaaggagctgctgagcaagggcctgtacagaggccacgacgaggagctgatcagccactacagaagagagtgcctgctgaagctgaacgagcaggccgccgagctgttcgagagcggcgaggacagagaggtgaacaacggcctgatcatcatgaacgagttcatcgtgcccttcctgcccctgctgctggtggacgagatggaggagaaggacatcctggccgtggaggacatgagaaacagatggtgcagctacctgggccaggagatggagccccacctgcaggagaagctgaccgacttcctgcccaagctgctggactgcagcatggagatcaagagcttccacgagccccccaagctgcccagctacagcacccacgagctgtgcgagagattcgccagaatcatgctgagcctgagcagaacccccgccgacggcagatag

SEQ ID NO: 103312 - DNA, 3378 bp, Artificial Sequence
  derived and/or modified sequence
atgactgttgaacagaacgtattacaacaaagcgcggcacagaagcatcaacaaacattcctcaaccagcttagggagataacaggaattaatgacacacaaattctgcagcaggccctcaaggactcaaatggcaatctggagctggctgtggcctttctgactgcgaagaatgccaagacgccacagcaagaggagaccacttactaccagactgccctcccaggtaacgatcggtatatctcagtggggtcccaagccgatacgaacgtcattgacctgaccggtgacgataaggacgatctacagagggccattgccctgtcattagccgagtccaaccgagcatttcgcgagactggtataacagatgaagaacaggcgatatccagagtgctggaggccagcatagctgaaaacaaagcatgtctcaagaggacacccacggaggtttggagggacagtcgtaatccttacgatagaaagagacaagataaagctcctgtcggcctcaagaatgtcggaaatacctgctggtttagcgcggttattcagagcctgtttaacctgctggagtttcggagattggtacttaactacaagcctccaagcaacgcacaggacctaccacgtaaccaaaaggagcacagaaaccttccgtttatgcgggagctgcgttatctcttcgccctcttggtgggcaccaagcggaaatacgtggacccatccagagctgtggaaatcctgaaggacgcctttaaaagcaacgattcacaacagcaagacgtgtctgaatttacacacaaactcttggactggctggaggacgctttccagatgaaagccgaagaggagaccgatgaagagaaacctaagaaccctatggtcgaactgttttacgggcgtttcctggccgtgggggtgctggaagggaaaaaattcgaaaatacagaaatgttcgggcagtatccgttgcaagtgaatggcttcaaagacctacacgaatgcctggaggccgctatgattgaaggggagattgagtcactgcactcagaaaattcagggaagagtgggcaggaacattggtttacagaactgccgcctgtcctgaccttcgaactctcacggtttgagttcaatcaagctctgggtagacccgaaaagatacataataagttggagtttccacaggtgctttaccttgaccgctatatgcatcggaaccgagagatcactcggataaagcgcgaagaaatcaaacgcctcaaagattacctaactgtgctgcaacaacgcctagaacggtacttgtcgtacggcagcggccccaagcgattccctctagtcgacgtcctgcagtacgctctggagttcgcatcctcgaaacctgtctgtacaagcccggtggatgacattgatgcatcatctcctcctagcggttctatccctagtcagacactccctagtacgaccgaacagcaaggggctctgtcatcagaattgccaagtacaagtccctccagtgtcgcggccattagctccagatcggtaattcacaaaccatttacccagagccgaataccgcctgaccttcctatgcaccccgcaccccgacatattactgaagaggagctgtctgtcttagaatcgtgcctgcatcggtggcgcactgaaatagagaacgacacgagggatttacaggaatccatcagtcgaattcacagaaccatcgaactcatgtattccgacaagagcatgattcaagtgccttacagactacatgcagtgctcgttcacgaaggccaggcaaacgcaggtcattattgggcctatattttcgaccatcgagaatcaaggtggatgaagtacaatgacatagctgtaaccaagtctagctgggaagagctcgttagagatagctttggtgggtatcgtaatgcctcagcatactgcctgatgtacattaatgataaggcgcagttcctgatccaggaggaatttaataaggagacaggccaaccactggtgggcattgaaacactgccacccgacctgcgagacttcgtagaagaggacaaccaacgcttcgagaaggagctggaagagtgggatgcacaactggcccagaaagccctgcaggaaaagctcttggcttctcagaagctgcgagagtcggaaacatcagtcacaacagcccaggcggccggtgatcccgaataccttgagcaaccgagcagaagtgactttagtaagcacttgaaagaggagaccattcagatcataacgaaggccagtcatgagcacgaggacaagtccccggagactgttctccagagcaagcccgaaaacacaaccagccagcctctgagcaatcaacgtgtggtcgaggtagcaatcccacacgtgggaaagttcatgattgagagcaaagagggaggctacgatgacgagataatgatgacaccaaatatgcagggaatcattatggcgattggcaaaagtaggagtgtgtatgatagatgtggacctgaagctggcttcttcaaggccatcaagctagagtatgcccgattggtcaagttggcccaagaggatactcctcccgaaactgattatcgtttgcatcatgtagttgtctatttcatacagaaccaggctcccaagaaaatcatcgagaaaaccctgcttgagcagttcggggatcgcaacctttctttcgacgaacgctgtcacaacattatgaaagttgcgcaggcgaaactcgagatgattaaaccagaagaagtaaacctggaagagtatgaagaatggcatcaagattataggaagtttcgcgagaccactatgtacctcatcatcgggctagaaaactttcagcgcgagtcatatatcgactctctgctgttcctcatttgcgcctaccagaataataaggagttacttagcaaaggactgtacagaggccacgacgaggagctgatttcccattaccgcagggagtgcctgcttaagctgaacgaacaggcagccgaactcttcgagagcggcgaagaccgcgaggtgaacaatggcctcattattatgaacgaattcatcgtgccatttcttcccctgctgctcgtggatgagatggaggaaaaggatattctggccgtcgaggatatgcggaacaggtggtgcagttacctgggacaggaaatggaaccgcatctgcaagagaagctgactgactttctacccaagctactggattgctctatggagattaagagcttccacgaacccccaaagctgccttcctattcaacacacgagctgtgtgagcggttcgctaggattatgctgtcactgtccagaacccccgctgacggacggtag

SEQ ID NO: 103313 - DNA, 3378 bp, Artificial Sequence
  derived and/or modified sequence
atgacagtggagcagaatgtgctgcagcagagcgctgcccagaagcaccagcagaccttcctgaaccagctgcgggagatcaccggcatcaatgacacccagatcctgcagcaggccctgaaggacagcaatggaaacctggagctggccgtggccttcctgacagccaagaatgccaagaccccccagcaggaggagaccacctactaccagacagccctgcctggaaatgaccgctacatctctgtgggcagccaggccgacaccaacgtcatcgacctgactggagatgacaaggatgacctgcagagggccatcgccctgagcctggccgagagcaacagagccttccgggagaccggcatcacagatgaggagcaggccatcagccgggtgctggaggccagcattgctgagaacaaggcctgcctgaagaggacccccacagaggtgtggagggacagcaggaacccctatgacaggaagaggcaggacaaggcccctgtgggcctgaagaatgtgggcaacacctgctggttctctgctgtgatccagagcctcttcaacctgctggagttccggcggctggtgctgaactacaagccacccagcaatgcccaggacctgcccaggaaccagaaggagcacaggaacctgcccttcatgagggagctgcgctacctgtttgccctgctggtgggcaccaagaggaaatatgtggaccccagcagagctgtggagatcctgaaggatgccttcaagagcaatgacagccagcagcaggatgtgtctgagttcacccacaagctgctggactggctggaggatgccttccagatgaaggccgaggaggagacagatgaggagaagcccaagaaccccatggtggagctgttctacggccgcttcctggccgtgggcgtgctggagggcaagaagtttgaaaatacagagatgtttggccagtaccccctgcaggtgaatggcttcaaggacctgcatgaatgtctggaggccgccatgattgaaggagaaattgagagcctgcacagcgagaacagcggcaagagcggccaggagcactggttcacagagctgccccctgtgctgacctttgagctgagcagatttgagttcaaccaggccctgggccggcctgagaagatccacaacaagctggagttcccccaggtgctgtacctggaccgctacatgcacaggaaccgggagatcacccgcatcaagcgggaggagatcaagaggctgaaggactacctgactgtgctgcagcagaggctggagcgctacctgtcctatggcagcggccccaagcgcttccccctggtggatgtgctgcagtatgccctggagtttgccagcagcaagcctgtgtgcaccagccctgtggatgacattgatgccagcagccccccatctggcagcatccccagccagaccctgcccagcaccacagagcagcagggcgccctgagcagcgagctgcccagcaccagccccagctctgtggccgccatcagcagccgcagcgtcatccacaagcccttcacccagagccgcatccccccagacctgcccatgcacccagcccccaggcacatcacagaggaggagctgtctgtgctggagagctgcctgcaccgctggaggacagaaattgaaaatgacacccgggacctgcaggagagcatcagccgcatccacaggaccatcgagctgatgtacagcgacaagtccatgatccaggtgccctaccgcctgcatgctgtgctggtgcatgagggccaggccaatgccggccactactgggcctacatctttgaccaccgggagagccgctggatgaagtacaatgacattgctgtgaccaagagctcctgggaggagctggtgcgggacagctttggaggctacagaaatgccagcgcctactgcctgatgtacatcaatgacaaggcccagttcctgatccaggaggagttcaacaaggagaccggccagcccctggtgggcatcgagaccctgcccccagacctgcgggactttgtggaggaggacaaccagagatttgagaaggagctggaggagtgggatgcccagctggcccagaaggccctgcaggagaagctgctggccagccagaagctgcgggagagcgagacctctgtgaccacagcccaggccgccggggaccctgagtacctggagcagcccagcagaagtgacttcagcaagcacctgaaggaggagaccatccagatcatcaccaaggccagccatgaacatgaggacaagagccctgagaccgtgctgcagagcaagccagagaacaccaccagccagcccctgagcaaccagagggtggtggaggtggccatcccccacgtgggcaagttcatgattgagagcaaggagggcggctatgatgatgagatcatgatgacccccaacatgcagggcatcatcatggccatcggcaagagccgctctgtgtatgacagatgtggccctgaggccggcttcttcaaggccatcaagctggagtatgcccggctggtgaagctggcccaggaggacaccccacctgagacagactaccgcctgcaccacgtggtggtgtacttcatccagaaccaggcccccaagaagatcatcgagaagaccctgctggagcagtttggagacaggaacctgagctttgatgagcgctgccacaacatcatgaaggtggcccaggccaagctggagatgatcaagccagaggaggtgaacctggaggagtatgaggagtggcaccaggactacaggaagttccgggagaccaccatgtacctgatcatcggcctggagaacttccagcgggagagctacatcgacagcctgctcttcctgatctgtgcctaccagaacaacaaggagctgctgagcaagggcctgtaccggggccatgatgaggagctgatcagccactaccgccgggagtgcctgctgaagctgaatgagcaggccgctgagctgtttgaaagtggagaagatcgggaggtgaacaacggcctcatcatcatgaatgagttcatcgtgcccttcctgcccctgctgctggtggatgagatggaggagaaggacatcctggccgtggaggacatgaggaaccgctggtgcagctacctgggccaggagatggagccccacctgcaggagaagctgacagacttcctgcccaagctgctggactgcagcatggagatcaagagcttccacgagccccccaagctgcccagctacagcacccatgagctgtgtgaaagatttgcccgcatcatgctgagcctgagcaggaccccagcagatggaagatag

SEQ ID NO: 103314 - DNA, 3378 bp, Artificial Sequence
  derived and/or modified sequence
atgaccgtggagcagaacgtgctgcagcagagcgccgcccagaagcaccagcagaccttcctgaaccagctgagagaaattacggggatcaacgacacccagatactacagcaagcactgaaagactcaaacgggaacctggaattggccgtggccttcctgacagctaaaaatgccaaaaccccacagcaagaggagactacatactatcagactgccttgcccggtaacgatcggtacataagcgtagggagccaagccgacactaatgtcatcgacctgacgggcgatgacaaggacgatctgcagagggcaattgctttaagtctggctgagagcaatcgagcattccgtgaaacagggattactgacgaagagcaggctatttcgcgcgtcttggaggcatccatagcggaaaacaaggcatgtcttaaacggacaccaaccgaggtctggcgggattcacgtaatccttatgatcgtaagcggcaggacaaagccccagtgggtctgaagaatgttggaaatacctgctggtttagcgctgtgatccagtctctgtttaacctgctggagttccggaggctcgtgcttaactataagcctccatcgaatgcccaggacctccctaggaatcagaaggaacaccggaatcttcccttcatgcgcgagctccgctacctgttcgctctgctcgtaggtactaaacggaagtatgtggaccccagcagggccgtcgaaatactgaaggacgcctttaaatccaatgacagtcaacagcaggatgtgagcgaattcacacacaagctcttagattggctggaggatgccttccagatgaaggctgaggaagaaactgatgaggagaaacctaagaaccccatggtcgaactgttttacggcagatttcttgctgtaggcgtcctagaaggaaagaaatttgagaacacagaaatgttcgggcagtacccactgcaagtgaacgggttcaaggacctgcacgagtgcctcgaggctgccatgatcgagggggaaatagagtccctccacagcgaaaattccggtaaatccggacaagaacattggtttacggagcttccccccgtgctgactttcgagctgtcgcggttcgaattcaaccaagccctgggcaggccggagaagatccacaacaagctggagttcccgcaagtgctataccttgatcggtacatgcatcgcaaccgggagattacgcgtataaaaagagaggaaattaagagactgaaggattaccttaccgttctccagcagcgactagaacgttacttgtcctatggatctggaccaaagaggtttccccttgttgatgttttgcagtacgccctcgaatttgcatccagcaaacccgtttgcacttcccctgtcgacgacatcgacgcttcctccccccccagtggcagcatcccttcgcagacgctgcctagtaccaccgagcaacagggtgcgctgagctccgaattacctagtacttccccctctagcgtcgccgccatttcctcccgatccgtgattcataagccctttacgcagtcacggataccccctgacctgcccatgcatcccgcaccccgccatattactgaggaggaactttctgtgctggaaagctgcttacatcgctggcgcaccgaaatcgaaaacgacacacgtgacctgcaggagtcgatctcccggattcaccgtacaatcgagctcatgtattcggacaagagcatgatccaggtcccttatagactgcatgccgttctggtgcacgagggacaagctaacgccggacattactgggcgtacatctttgaccatcgagaatcgcggtggatgaaatataacgatattgcagtaacgaaatcctcctgggaagagcttgtgcgggatagctttggaggatataggaacgccagcgcctattgcctcatgtatataaacgacaaagcacagttcctgatccaggaggagttcaataaggagaccggtcagccactagtaggcatcgagactctcccccctgaccttcgcgattttgtcgaagaggacaaccagcggtttgaaaaggaactagaggaatgggacgcccagttagcgcaaaaggcattgcaggaaaagcttttggcttctcagaagctgcgcgaatccgagacttccgttactaccgctcaggcagccggggatcctgagtaccttgagcaacccagccgaagcgacttctccaagcatttgaaagaagaaacaattcagattatcacaaaggcctctcatgagcatgaggacaagtctccagagacagtactgcagagtaagcctgagaatactactagccagcccctgagcaaccagagggtggttgaggtggcaattccccatgtggggaaatttatgatcgagtccaaggagggaggatacgacgatgaaatcatgatgaccccaaacatgcagggaatcattatggccattggtaagtcaaggagcgtttacgatagatgcggtcctgaggccggcttcttcaaggcaatcaaactcgaatacgctcgactagtcaaactggctcaagaggatacccctccagagacagactacagattacatcatgttgttgtgtactttatccagaatcaggcaccaaagaagattatagaaaaaactctcctggaacagtttggcgaccggaatcttagctttgacgagcgatgccataacatcatgaaggtggcccaggctaagttagaaatgatcaagcccgaggaggtgaacctcgaagaatatgaggaatggcaccaggattaccggaagttccgcgagactacgatgtacctgatcatcggtctggagaacttccagagggaatcctacattgactccttattgtttctaatctgcgcctaccagaataataaggagctgctttccaagggactgtatagggggcatgatgaggaactcatcagtcactacagacgggagtgcctgctaaagttgaatgagcaggcagcagagctgttcgagtcaggagaggatagggaggttaataatggactgattatcatgaacgagtttatagtgccctttctcccattgctcctggtggacgaaatggaggaaaaggatattctggcagtagaagatatgcggaaccgttggtgtagctacctagggcaggagatggagcctcatctccaggagaaacttactgacttcctccctaagctgctggactgttcaatggagattaaaagctttcacgagcccccaaagttgccctcatactccacgcacgaactatgcgagaggttcgctagaataatgctgtcattaagcagaaccccagcagacgggagatag

SEQ ID NO: 103315 - DNA, 5178 bp, Artificial Sequence
  derived and/or modified sequence
gcggccgccgtggccctcacagtcggcgtttcgccgcctgcccgcggtgcccgcgcacgccggccgccatcgccttcgcgcctggctggcgggggcgctgtcctcccaggccgtccgcgccgctccctggagctcggcggagcgcggcagccagggccggcggaggcgcgaggagccgggcgccaccgccgccgccgccgccgccgccgcgggggccatgaccgtggagcagaacgtgctgcagcagagcgcggcgcagaagcaccagcagacgtttttgaatcaactgagagaaattacggggattaatgacacccagatactacagcaagccttgaaggatagtaatggaaacttggaattagcagtggctttccttactgcgaagaatgctaagacccctcagcaggaggagacaacttactaccaaacagcacttcctggcaatgatagatacatcagtgtgggaagccaagcagatacaaatgtgattgatctcactggagatgataaagatgatcttcagagagcaattgccttgagtttggccgaatcaaacagggcattcagggagactggaataactgatgaggaacaagccattagcagagttcttgaagccagcatagcagagaataaagcatgtttgaagaggacacctacagaagtttggagggattctcgaaacccttatgatagaaaaagacaggacaaagctcccgttgggctaaagaatgttggcaatacttgttggtttagtgctgttattcagtcattatttaatcttttggaatttagaagattagttctgaattacaagcctccatcaaatgctcaagatttaccccgaaaccaaaaggaacatcggaatttgccttttatgcgtgagctgaggtatctatttgcacttcttgttggtaccaaaaggaagtatgttgatccatcaagagcagttgaaattcttaaggatgctttcaaatcaaatgactcacagcagcaagatgtgagtgagtttacacacaaattattagattggttagaagatgccttccaaatgaaagctgaagaggagacggatgaagagaagccaaagaaccccatggtagagttgttctatggcagattcctggctgtgggagtacttgaaggtaaaaaatttgaaaacactgaaatgtttggtcagtacccacttcaggtcaatgggttcaaagatctgcatgagtgcctagaagctgcaatgattgaaggagaaattgagtctttacattcagagaattcaggaaaatcaggccaagagcattggtttactgaattaccacctgtgttaacatttgaattgtcaagatttgaatttaatcaggcattgggaagaccagaaaaaattcacaacaaattagaatttccccaagttttatatttggacagatacatgcacagaaacagagaaataacaagaattaagagggaagagatcaagagactgaaagattacctcacggtattacaacaaaggctagaaagatatttaagctatggttccggtcccaaacgattccccttggtagatgttcttcagtatgcattggaatttgcctcaagtaaacctgtttgcacttctcctgttgacgatattgacgctagttccccacctagtggttccataccatcacagacattaccaagcacaacagaacaacagggagccctatcttcagaactgccaagcacatcaccttcatcagttgctgccatttcatcgagatcagtaatacacaaaccatttactcagtcccggatacctccagatttgcccatgcatccggcaccaaggcacataacggaggaagaactttctgtgctggaaagttgtttacatcgctggaggacagaaatagaaaatgacaccagagatttgcaggaaagcatatccagaatccatcgaacaattgaattaatgtactctgacaaatctatgatacaagttccttatcgattacatgccgttttagttcacgaaggccaagctaatgctgggcactactgggcatatatttttgatcatcgtgaaagcagatggatgaagtacaatgatattgctgtgacaaaatcatcatgggaagagctagtgagggactcttttggtggttatagaaatgccagtgcatactgtttaatgtacataaatgataaggcacagttcctaatacaagaggagtttaataaagaaactgggcagccccttgttggtatagaaacattaccaccggatttgagagattttgttgaggaagacaaccaacgatttgaaaaagaactagaagaatgggatgcacaacttgcccagaaagctttgcaggaaaagcttttagcgtctcagaaattgagagagtcagagacttctgtgacaacagcacaagcagcaggagacccagaatatctagagcagccatcaagaagtgatttctcaaagcacttgaaagaagaaactattcaaataattaccaaggcatcacatgagcatgaagataaaagtcctgaaacagttttgcagtcgaaacctgaaaatactacaagccaaccactttctaatcagcgagttgtagaggtggcgatccctcatgtagggaaatttatgattgaatcaaaggagggggggtatgatgacgagatcatgatgacaccgaacatgcaaggtattatcatggcgataggtaaatccaggagtgtatatgacaggtgtggccctgaagcagggttctttaaggcaattaagttggaatatgcaaggttggttaagttggcccaagaagacaccccaccagaaaccgattatcgtttacatcatgtagtggtctactttatccagaaccaggcaccaaagaaaattattgagaaaacattactagaacaatttggagatagaaatttgagttttgatgaaaggtgtcacaacataatgaaagttgctcaagccaaactggaaatgataaaacctgaagaagtaaacttggaggaatatgaggagtggcatcaggattataggaaattcagggaaacaactatgtatctcataattgggctagaaaattttcaaagagaaagttatatagattccttgctgttcctcatctgtgcttatcagaataacaaagaactcttgtctaaaggcttatacagaggacatgatgaagaattgatatcacattatagaagagaatgtttgctaaaattaaatgagcaagccgcagaactcttcgaatctggagaggatcgagaagtaaacaatggtttgattatcatgaatgagtttattgtcccatttttgccattattactggtggatgaaatggaagaaaaggatatactagctgtagaagatatgagaaatcgatggtgttcctaccttggtcaagaaatggaaccacacctccaagaaaagctgacagattttttgccaaaactgcttgattgttctatggagattaaaagtttccatgagccaccgaagttaccttcatattccacgcatgaactctgtgagcgatttgcccgaatcatgttgtccctcagtcgaactcctgctgatggaagataaactgcacactttccctgaacacactgtataaactctttttagttcttaacccttgccttcctgtcacagggtttgcttgttgctgctatagtttttaacttttttttattttaataactgcaaaagacaaaatgactatacagactttagtcagactgcagacaataaagctgaaaatcgcatggcgctcagacattttaaccggaactgatgtataatcacaaatctaattgattttattatggcaaaactatgcttttgccaccttcctgttgcagtattactttgcttttatcttttctttctcaacagctttccattcagtctggatccttccatgactacagccatttaagtgttcagcactgtgtacgatacataatatttggtagcttgtaaatgaaataaagaataaagttttatttatggctacctatgtgtttgtaagcaggtatattgtatattagtgtattagtaatactagataaatgaattttgtctggggattaagattggatagttaatagattaatacaatcttttaattctgctctaatgctagcaaattggaaaatgtttaagtctttgacacttaaatttatctatatttttaacaaagttcttgaacttagtatggcaccggaacctgttttgaattcagtcaggtttttactcaagtaagtggttgattttttttaagtcaaactacactgaaacttttatccttttcttagattaatcttactttttaaatgtatttacaatatacagcaaggtgattatttcaagagaatcccaaagtacttgaataagggctattgtaaaatttaaaagaaatatttatatatacacatatatacacatacacacatgtatatatatattcttcataatggaggacaatgttttgcaatatataaatcattctatttttgtaaattgtatatcactttaattgaaaatgttctctactaattaatactgtgaaacaaaattgatgttgtttaactagaagttatgagtatcttaactgcctttattccttttcaaaaaggaaaaagctgtagaacattttgtagatgaaactactgtttaagattaatgaattaatattgtgaatgaaaatcaaaatccatactttaaaggtaatcatgttactaacaacctatttttgaattcataaaaatttctttataaatgatgttttgtgaacatagtaaaatagaccattatactatgtgtatgtttgatacagcgtcgccaaaactagtgttctttattagtgcctctcacaaaagatcctggatggaggagtaagatgaaatattatgctattatatgatgctgtttgtaaaggtattaatgtactagtaaggtgttaatgacaaggaattagtactattcctgttgtaaagttagattttgcatattgtatctatcaaaatatgtttgggtttagattttaagttgtctactgagcagatttctgcattggttttccagtcctgttaaaagtttagaaacttcatatgtgtcatcacagcttttgtaaagaaagtatccttaatattttatgacattct

SEQ ID NO: 103316 - DNA, 3378 bp, Artificial Sequence
  derived and/or modified sequence
atgacagtggagcagaacgtcttacagcagagcgccgctcagaaacaccagcaaactttcttgaatcagctgagagagataaccggaattaacgacactcagatactgcagcaggcgctgaaagattcaaacggaaacctggagttggccgtggccttcctgacagccaagaacgcaaaaacaccacaacaggaggagacaacctattaccagactgctctgcctggcaacgatcgctatatctccgtagggagtcaggccgacacaaatgtgatagatctgaccggggacgacaaggatgacctgcagagggccatagctcttagtcttgccgaatctaaccgcgctttcagagaaacgggtatcactgatgaagagcaggctatcagccgagtcctggaggcctctatcgcagagaacaaagcatgcctgaaacgcacgccgaccgaggtgtggcgcgactctcgaaatccatacgatagaaaacgccaggataaagctcctgtggggctcaagaatgttggcaatacgtgctggttctctgccgtgatacagagcttgttcaatttactagaattccgccgactagtacttaactataagcccccttcaaacgcccaggatttacccagaaaccaaaaggagcaccggaatttaccctttatgagggaattgagataccttttcgctctcctcgtcggcaccaagcgcaagtacgtggacccaagcagagctgtcgagatcttgaaggacgcctttaagtccaatgattctcagcagcaggatgttagcgagtttacacacaagctgctcgattggttggaagacgctttccaaatgaaggctgaagaagagaccgatgaagagaagcccaaaaatccgatggttgaacttttctatgggaggttcctggctgtcggtgtcctcgaaggcaaaaaattcgaaaacacagagatgtttggccagtatcctctgcaggtcaatggtttcaaagatctgcacgaatgcctggaagctgctatgatcgaaggtgagatcgaatctctgcatagcgagaactccggaaagtcaggccaggagcactggttcacagaactgcctccagtattgacctttgaactctctcggtttgaatttaatcaagccctgggtagacccgaaaagattcataataaactggagttcccccaggttctgtatctcgatagatacatgcacaggaacagagaaattaccaggattaaacgagaggaaattaagcgcctcaaagactatttaaccgttctgcagcaaagactcgagcggtatctcagctacggtagcggcccaaagaggttccccttggtcgacgtactgcagtacgcccttgagttcgccagtagcaagcctgtctgcacctctcccgtggacgacattgacgcctcttctcctcctagcggatcgatcccgagccagacccttccctccactacagagcagcagggcgcactcagtagtgagctcccctctaccagcccttcctcagtggccgctattagttcccgaagtgtcattcacaagcctttcacacagtcgagaatcccaccagacttgccgatgcatccggctccccgacacatcacggaggaggaactgtccgtattagaaagctgccttcacaggtggagaacggagattgaaaatgacacgagagatctccaggagagtatttcaagaatacaccgaacaatcgagctgatgtacagcgataaaagcatgattcaagtcccgtaccgcctgcacgccgtactcgtgcacgaaggacaagctaacgccggtcactactgggcctatatcttcgaccatagggaatctcgctggatgaagtacaacgacatagctgtcaccaagtcttcttgggaagaactcgtacgggactcgttcggtggctaccgcaacgccagtgcatattgcctgatgtacatcaacgacaaagcacagttcctgattcaggaggagttcaacaaagagactggtcagcccctggtggggatagaaactctgccccctgatctaagagatttcgtggaagaggataatcaaagatttgaaaaggaacttgaggaatgggacgcgcaactcgcccaaaaggctctgcaagagaagctgttggccagtcagaaactccgcgagagcgagaccagcgtcaccaccgcccaagcagccggtgatcccgaatacctagagcaaccctctagatccgacttttcgaagcacttaaaagaagagacaatacagataattactaaggcgtcacacgagcacgaggataagtcccccgagacggttctccaatctaaaccagagaacactacatctcaaccactctctaaccaaagagtagtcgaagtggctataccacatgtgggcaagtttatgattgagtccaaggagggcggttatgacgacgaaattatgatgacccccaatatgcagggcattatcatggctatcggcaaatcccgttccgtgtacgataggtgcggaccagaagctggattcttcaaggctataaagcttgaatacgccagactggtaaagcttgcacaggaagacacccccccagagacggattacagattgcatcacgtggtggtgtactttatccagaatcaggccccaaagaagatcatagagaagaccctgctggagcagtttggcgaccggaatctttcctttgatgagcggtgtcacaatatcatgaaagtcgctcaggcaaagcttgaaatgatcaaacctgaggaagtaaacctggaggagtatgaagagtggcaccaggactacaggaaattccgggagacgaccatgtacctgattatcgggttggagaactttcagagggaaagttacattgacagcttactgttcctgatctgtgcgtaccaaaataataaagagctgctcagtaaaggcttgtatcgcggacatgatgaggaactgatctctcactacaggcgggagtgtctcctcaagctgaacgagcaagctgcggagctttttgaaagcggagaagacagggaagtgaataacggtctgattatcatgaacgaattcatcgtcccattcctgccacttcttctcgtagatgagatggaggagaaggacatcttagctgtggaggatatgcggaacagatggtgctcataccttggtcaggaaatggagccccacctgcaggaaaagctgacagactttctgccaaaacttcttgattgcagtatggaaattaaatcctttcacgaacccccaaagttaccctcctatagcacccatgaactttgcgaaagattcgccagaataatgctgtcactgagccgtacgcctgcggatggcaggtag

SEQ ID NO: 103317 - protein, 1087 aa, Artificial Sequence
  derived and/or modified sequence
MTVEQNVLQQSAAQKHQQTFLNQLREITGINDTQILQQALKDSNGNLELAVAFLTAKNAKTPQQEETTYYQTALPGNDRYISVGSQADTNVIDLTGDDKDDLQRAIALSLAESNRAFRETGITDEEQAISRVLEASIAENKACLKRTPTEVWRDSRNPYDRKRQDKAPVGLKNVGNTCWFSAVIQSLFNLLEFRRLVLNYKPPSNAQDLPRNQKEHRNLPFMRELRYLFALLVGTKRKYVDPSRAVEILKDAFKSNDSQQQDVSEFTHKLLDWLEDAFQMKAEEETDEEKPKNPMVELFYGRFLAVGVLEGKKFENTEMFGQYPLQVNGFKDLHECLEAAMIEGEIESLHSENSGKSGQEHWFTELPPVLTFELSRFEFNQALGRPEKIHNKLEFPQVLYLDRYMHRNREITRIKREEIKRLKDYLTVLQQRLERYLSYGSGPKRFPLVDVLQYALEFASSKPVCTSPVDDIDASSPPSGSIPSQTLPSTTEQQGALSSELPSTSPSSVAAISSRSVIHKPFTQSRIPPDLPMHPAPRHITEEELSVLESCLHRWRTEIENDTRDLQESISRIHRTIELMYSDKSMIQVPYRLHAVLVHEGQANAGHYWAYIFDHRESRWMKYNDIAVTKSSWEELVRDSFGGYRNASAYCLMYINDKAQFLIQEEFNKETGQPLVGIETLPPDLRDFVEEDNQRFEKELEEWDAQLAQKALQEKLLASQKLRESETSVTTAQAAGDPEYLEQPSRSDFSKHLKEETIQIITKASHEHEDKSPETVLQSIMMTPNMQGIIMAIGKSRSVYDRCGPEAGFFKAIKLEYARLVKLAQEDTPPETDYRLHHVVVYFIQNQAPKKIIEKTLLEQFGDRNLSFDERCHNIMKVAQAKLEMIKPEEVNLEEYEEWHQDYRKFRETTMYLIIGLENFQRESYIDSLLFLICAYQNNKELLSKGLYRGHDEELISHYRRECLLKLNEQAAELFESGEDREVNNGLIIMNEFIVPFLPLLLVDEMEEKDILAVEDMRNRWCSYLGQEMEPHLQEKLTDFLPKLLDCSMEIKSFHEPPKLPSYSTHELCERFARIMLSLSRTPADGR

SEQ ID NO: 103318 - DNA, 3264 bp, Artificial Sequence
  derived and/or modified sequence
atgacagtggagcagaatgtgctccagcagtccgccgctcagaagcatcaacagacctttctgaaccaactgcgcgagatcacagggattaacgatacccaaatcctacagcaggctctgaaagactccaacgggaacctcgagctcgcagttgccttcctcacagctaaaaatgctaaaacacctcagcaggaggagaccacctactaccagaccgccctccctggaaacgaccggtacatcagcgtcggctcccaggccgataccaatgtgatagatcttactggggacgataaggatgacctccagcgcgctatcgccctgtctctcgcagagtctaaccgtgccttccgcgagactgggattactgacgaggaacaggcaattagccgcgttctcgaggcttccatagctgagaataaggcgtgtctaaagcgcacgcccaccgaggtatggcgggatagccgcaatccttatgatcggaagagacaagacaaggccccagtgggccttaagaacgtaggaaatacatgctggttttctgcagtgatccaatcactgttcaacctgctagagtttagacggcttgtactcaattacaagccaccttctaacgcccaggacctgccgcggaaccagaaagagcaccgaaatcttcctttcatgagagagctgcgctacttgtttgccctccttgttggcactaagcggaaatacgtggatccatccagagctgtggagattctgaaagatgcgttcaaaagcaacgacagccagcagcaggatgtttctgagtttacccacaaattgctggactggttggaggatgcctttcaaatgaaggcggaagaagagacagacgaagagaagccaaaaaatccgatggttgagctcttctatgggcgtttcctggcggttggagtcttggagggaaagaagtttgagaacaccgagatgtttggacagtatccactccaagtcaacggcttcaaagacctgcatgagtgcctggaggccgcaatgatcgagggagagattgaatctttacattcagagaattcgggaaagtcaggccaggaacattggttcactgaactgccaccagtcctgacgttcgagctatctcggttcgagttcaatcaggcactgggccgacccgaaaaaatccacaataaacttgaatttccacaggtactttatctcgataggtatatgcacaggaatcgcgagatcacaaggatcaagcgtgaagagataaaacggttgaaagactaccttacagtactccagcaacgactcgagcggtatctgtcctatgggtcagggcctaagaggtttcccctcgtggacgtgttgcaatacgctctggagttcgcctcctctaaaccagtttgcacaagtccggtggacgacattgatgcatcctcccctccatctggaagtatcccaagtcagacacttccctctacgactgagcagcagggtgctctatcctctgagctgccaagcacaagcccaagctctgtggctgccatttcaagtcgcagcgtaatccataaaccttttacacaatccagaataccccccgacctgccgatgcaccccgcgcctcgtcatattacagaggaggagctttccgtgcttgaaagttgccttcatcgatggcgcactgagattgaaaacgatacccgggatctccaagagtctatctctaggatccatcgcacaattgagctgatgtatagcgacaaatccatgattcaggtgccttacagattgcatgccgtcctggtgcacgaagggcaggccaatgctggccattactgggcttacattttcgatcatcgcgagagccgctggatgaaatataatgacattgccgtgactaaaagcagttgggaggagctggttcgggactcgttcggaggctatcggaacgcctccgcgtattgtctgatgtatattaatgataaggcacagtttttgatccaggaggagttcaacaaggaaactggccaaccattggtggggattgaaaccctgccccctgacctgcgggattttgttgaggaggacaaccagaggtttgagaaggaactggaggaatgggatgcacagctagcacagaaggctctgcaggaaaaactgcttgcttcccaaaagctaagggagtcggagacatctgttacaaccgcccaggcagccggcgatcccgagtatttggaacagccttctcgttctgacttttctaagcacctgaaagaggaaacaatacagataataaccaaagcttcccacgagcacgaagataagagtccagagacagtgctgcaatcaatcatgatgaccccaaatatgcaggggattatcatggcgatcgggaagagccggtctgtttatgaccgatgcgggcccgaagccggtttcttcaaagccattaagctggaatatgccagactggtgaaactggctcaagaggacacaccacccgagactgactacaggctgcaccacgttgttgtttacttcatccagaatcaggctccaaagaagattatcgagaaaacccttctcgaacagtttggagaccgcaacctgagcttcgatgaaagatgtcacaacattatgaaggttgcccaggccaagctcgaaatgataaagccggaagaggtgaatttagaagaatatgaggagtggcaccaagactataggaaattccgcgaaacaacgatgtacctgattattggcctggaaaatttccaacgcgagagttatattgacagcctactcttcctgatatgtgcctatcagaataacaaggaactattaagcaaggggttgtacagaggccacgatgaggaactcatcagccactatcgacgcgaatgcctgcttaagctcaatgaacaggcagccgaactgtttgagagcggcgaggatagggaggtgaacaacggcttaattatcatgaacgagtttatcgtgccctttctgcctctcctgttggtggacgaaatggaggagaaagatatcctcgccgtggaagacatgcgcaatcggtggtgttcatacctggggcaggaaatggagccgcacctccaggaaaagctaaccgactttcttcctaagctcctggactgctccatggagattaaatctttccatgaaccaccaaagcttccctcgtattcaactcacgagctatgcgagaggtttgcaaggatcatgttgtcactctctcgaacccctgcagacggacgatag

SEQ ID NO: 103319 - DNA, 3264 bp, Artificial Sequence
  derived and/or modified sequence
atgacagtggagcagaatgtgctgcagcagagcgctgcccagaagcaccagcagaccttcctgaaccagctgcgggagatcaccggcatcaatgacacccagatcctgcagcaggccctgaaggacagcaatggaaacctggagctggccgtggccttcctgacagccaagaatgccaagaccccccagcaggaggagaccacctactaccagacagccctgcctggaaatgaccgctacatctctgtgggcagccaggccgacaccaacgtcatcgacctgactggagatgacaaggatgacctgcagagggccatcgccctgagcctggccgagagcaacagagccttccgggagaccggcatcacagatgaggagcaggccatcagccgggtgctggaggccagcattgctgagaacaaggcctgcctgaagaggacccccacagaggtgtggagggacagcaggaacccctatgacaggaagaggcaggacaaggcccctgtgggcctgaagaatgtgggcaacacctgctggttctctgctgtgatccagagcctcttcaacctgctggagttccggcggctggtgctgaactacaagccacccagcaatgcccaggacctgcccaggaaccagaaggagcacaggaacctgcccttcatgagggagctgcgctacctgtttgccctgctggtgggcaccaagaggaaatatgtggaccccagcagagctgtggagatcctgaaggatgccttcaagagcaatgacagccagcagcaggatgtgtctgagttcacccacaagctgctggactggctggaggatgccttccagatgaaggccgaggaggagacagatgaggagaagcccaagaaccccatggtggagctgttctacggccgcttcctggccgtgggcgtgctggagggcaagaagtttgaaaatacagagatgtttggccagtaccccctgcaggtgaatggcttcaaggacctgcatgaatgtctggaggccgccatgattgaaggagaaattgagagcctgcacagcgagaacagcggcaagagcggccaggagcactggttcacagagctgccccctgtgctgacctttgagctgagcagatttgagttcaaccaggccctgggccggcctgagaagatccacaacaagctggagttcccccaggtgctgtacctggaccgctacatgcacaggaaccgggagatcacccgcatcaagcgggaggagatcaagaggctgaaggactacctgactgtgctgcagcagaggctggagcgctacctgtcctatggcagcggccccaagcgcttccccctggtggatgtgctgcagtatgccctggagtttgccagcagcaagcctgtgtgcaccagccctgtggatgacattgatgccagcagccccccatctggcagcatccccagccagaccctgcccagcaccacagagcagcagggcgccctgagcagcgagctgcccagcaccagccccagctctgtggccgccatcagcagccgcagcgtcatccacaagcccttcacccagagccgcatccccccagacctgcccatgcacccagcccccaggcacatcacagaggaggagctgtctgtgctggagagctgcctgcaccgctggaggacagaaattgaaaatgacacccgggacctgcaggagagcatcagccgcatccacaggaccatcgagctgatgtacagcgacaagtccatgatccaggtgccctaccgcctgcatgctgtgctggtgcatgagggccaggccaatgccggccactactgggcctacatctttgaccaccgggagagccgctggatgaagtacaatgacattgctgtgaccaagagctcctgggaggagctggtgcgggacagctttggaggctacagaaatgccagcgcctactgcctgatgtacatcaatgacaaggcccagttcctgatccaggaggagttcaacaaggagaccggccagcccctggtgggcatcgagaccctgcccccagacctgcgggactttgtggaggaggacaaccagagatttgagaaggagctggaggagtgggatgcccagctggcccagaaggccctgcaggagaagctgctggccagccagaagctgcgggagagcgagacctctgtgaccacagcccaggccgccggggaccctgagtacctggagcagcccagcagaagtgacttcagcaagcacctgaaggaggagaccatccagatcatcaccaaggccagccatgaacatgaggacaagagccctgagaccgtgctgcagagcatcatgatgacccccaacatgcagggcatcatcatggccatcggcaagagccgctctgtgtatgacagatgtggccctgaggccggcttcttcaaggccatcaagctggagtatgcccggctggtgaagctggcccaggaggacaccccacctgagacagactaccgcctgcaccacgtggtggtgtacttcatccagaaccaggcccccaagaagatcatcgagaagaccctgctggagcagtttggagacaggaacctgagctttgatgagcgctgccacaacatcatgaaggtggcccaggccaagctggagatgatcaagccagaggaggtgaacctggaggagtatgaggagtggcaccaggactacaggaagttccgggagaccaccatgtacctgatcatcggcctggagaacttccagcgggagagctacatcgacagcctgctcttcctgatctgtgcctaccagaacaacaaggagctgctgagcaagggcctgtaccggggccatgatgaggagctgatcagccactaccgccgggagtgcctgctgaagctgaatgagcaggccgctgagctgtttgaaagtggagaagatcgggaggtgaacaacggcctcatcatcatgaatgagttcatcgtgcccttcctgcccctgctgctggtggatgagatggaggagaaggacatcctggccgtggaggacatgaggaaccgctggtgcagctacctgggccaggagatggagccccacctgcaggagaagctgacagacttcctgcccaagctgctggactgcagcatggagatcaagagcttccacgagccccccaagctgcccagctacagcacccatgagctgtgtgaaagatttgcccgcatcatgctgagcctgagcaggaccccagcagatggaagatag

SEQ ID NO: 103320 - DNA, 3264 bp, Artificial Sequence
  derived and/or modified sequence
atgaccgtggagcagaacgtgctgcagcagagcgccgcccagaagcaccaacagactttcctgaatcagttgagggagataacaggaattaatgatactcagatcctgcagcaggccctgaaagactcaaatgggaatctagagttagctgtggctttcctaacagcgaagaatgcgaagaccccccagcaggaggaaaccacatactaccagactgcgttgccagggaacgatcgctacatatctgtggggagccaggctgacacaaatgtgatagatcttacaggggacgacaaagatgacttgcagcgggcgatcgcattatctttggctgagtccaacagggccttcagagaaaccggtatcacagacgaagagcaagccatcagtagagtactggaggccagtatcgccgaaaataaagcctgtttgaagaggacaccaacagaggtttggcgggattctagaaatccctacgatcggaaacggcaagataaggctccagtcgggcttaaaaacgtgggaaatacttgctggttttcggctgttatccagtccttattcaatctcctggagttcagacgcctcgtgctgaactataaacccccttcaaatgctcaagatcttcctaggaatcagaaggaacatcgcaacctgccatttatgcgcgagttacgctacttattcgcactgttggttggcaccaaacggaaatacgtggacccaagccgcgctgtggagatcttgaaggatgcattcaagagcaacgatagccagcagcaggatgtgagtgagttcactcacaaactgcttgactggctcgaagacgcctttcagatgaaagctgaagaggagacagatgaagaaaaacctaaaaatcctatggtggagctcttctacggccggtttcttgccgtgggggtgctggaaggtaaaaaatttgagaacacagagatgtttggccagtaccccctccaggtgaacgggtttaaagatctgcacgaatgtcttgaggcggcaatgatcgagggagagatcgaatctctgcattcggaaaacagcggcaaatccggccaggaacattggtttactgagctacctccagtgttaacattcgagctgtcaagattcgaattcaaccaggccctgggcaggccagagaaaatccataacaaactggaattcccccaagtgctgtatctggacagatatatgcaccgaaatagagaaattacacgaattaagcgggaggagatcaagagattgaaggactacctgacagtactgcaacaaaggctggaacgttacctcagctatggctcgggccctaaacggttccccctggttgatgtactgcagtatgctcttgagttcgccagttccaaaccagtctgtacctctcctgtggacgatattgacgcctcctcccctccttcaggctcaattcctagccaaactctcccatctaccactgaacagcaaggtgctctctcctctgagctgccaagtacaagccctagctccgtagccgccatttccagccgttcggttatacataagccctttacccagagccgcattcctccagacctgcccatgcatcccgctccccgccacatcaccgaagaggagttgagcgtgctcgaatcttgtctgcaccggtggcgtaccgagattgaaaatgacactcgggatctgcaggaatctatcagtagaatccatagaaccatcgagctgatgtatagcgacaagagcatgattcaggtcccttaccgcctgcacgcagtactcgtgcacgaagggcaagccaacgctgggcactattgggcttacatcttcgaccaccgggagtccagatggatgaaatataacgacatcgccgtcaccaagagctcctgggaggaactggttagggatagcttcggaggctaccggaacgcatctgcctattgcctgatgtacatcaacgacaaagcgcagtttctcatacaggaagaattcaacaaggagactggtcaacccttggtgggcatcgagaccttgccgcccgatttacgggacttcgtggaggaggataaccagaggttcgaaaaggaacttgaggagtgggacgcacagttggcccaaaaagccctccaagagaagttgctcgccagtcaaaagttgcgtgaatctgaaaccagtgttacgaccgcccaggctgccggcgacccggagtatctcgagcaaccgtccaggtctgacttcagcaagcatcttaaagaggaaactattcagatcataaccaaagcatcccacgagcatgaagataaaagtcctgagacagtgctgcaatccatcatgatgacgccaaatatgcagggaatcataatggccattgggaaatctcggtccgtgtacgatcgatgcggaccggaagccgggttttttaaggctataaagctagagtatgctaggctcgtcaaactggctcaggaggataccccccctgagacagactacaggctgcatcacgtagtcgtgtatttcatccagaaccaggcgccaaagaagattattgagaaaaccctgctggagcagtttggggatcgcaatctctcctttgatgagcgctgtcataacatcatgaaggtcgcccaggctaaattggaaatgatcaagcctgaagaagtcaatttggaggaatacgaagagtggcaccaggactaccgcaaatttcgtgaaaccactatgtacctgattatcggcttagagaattttcagagagagagttacatcgactccctgctttttctcatatgtgcttaccaaaacaacaaggaacttctgagcaaggggttatatcgcggccatgatgaagaactgatttcccattaccgacgagaatgcctgctgaaactgaatgagcaagctgcagagctgtttgaatctggagaggatagggaagtgaataacggactaatcataatgaatgagttcatcgtgccgttcctgccactgctcctcgtcgacgaaatggaggaaaaagatatcctggccgttgaagatatgagaaacagatggtgttcatacctcggacaggagatggagccccacctccaggaaaagctgactgatttcttgcccaaactgctggactgctcaatggagatcaagtctttccacgaacctccaaaactgccctcatactccacacacgagctgtgtgaacgtttcgcaagaataatgctcagcctgtctaggacaccagctgatggaaggtag

SEQ ID NO: 103321 - DNA, 3264 bp, Artificial Sequence
  derived and/or modified sequence
atgactgtcgagcagaacgtcctacagcagtccgcggcacagaagcaccagcagaccttcctgaaccagctgcgggagattaccggaatcaacgacacacagattctacaacaggccctcaaggacagtaatggcaatcttgagttagccgtggcctttctgacggccaagaatgcaaagacgcctcaacaagaggagaccacctattaccagacggccctaccgggaaatgaccggtacatcagcgttgggagccaggcagacacgaatgtgattgacctgactggtgatgataaggatgatctgcagagagcaattgccttgagcctagccgagtcaaaccgggcttttagggaaactgggatcacagacgaggaacaagccatcagcagggtgctcgaagcctctatagccgagaacaaggcctgtctcaagagaaccccgactgaggtgtggcgcgacagccgcaacccgtatgacagaaaacggcaggacaaagccccagtcggactaaagaatgtgggcaatacatgctggtttagcgctgtgatccagtcattgttcaatttgctggaattccggcgtttagtgttgaattataaaccgccatccaacgctcaggacctcccaaggaaccagaaagaacataggaacttgccgttcatgcgtgaattgaggtatctgtttgcgttgttggtcgggacgaagagaaagtatgtcgacccctcccgagctgtcgagattctaaaagacgctttcaagagcaacgacagtcagcaacaggacgtctcggaattcacccacaagctgcttgattggttggaggatgccttccagatgaaggcggaagaggagacggacgaggagaagccaaagaacccaatggtggaactgttctacgggagatttcttgccgtaggggtactagagggtaaaaagtttgagaacactgaaatgtttggccagtacccactccaggtcaatgggtttaaggacttgcacgagtgtttagaggcagccatgatagaaggtgaaatcgaatctctacactccgaaaactctggcaaatctgggcaggaacactggtttacagaactaccaccagtcttaactttcgagctcagtcggttcgagttcaatcaggccctcggcaggccagaaaagatccacaacaagcttgaatttccccaggtgctctacctggaccgctatatgcaccgtaacagagaaatcacccgcattaaacgcgaagaaatcaagcggctgaaagattatctcaccgtgttgcagcagagattggagcgttacctgtcatatggtagcggccctaagcgtttcccgttagtggatgtcttgcagtatgctctggaattcgcatcctcaaagcctgtatgtacgtcccccgttgatgacatagacgccagctcaccgccaagtgggtccatcccatctcaaacactgcctagtactaccgaacagcagggcgcactgtcaagcgaattaccttccacatctccttcctctgtcgcagctatttcaagtcgtagcgtaattcataagccatttacccaatcccggattcctcctgacctacccatgcatcctgctcctcgccatatcactgaagaagagctgtcagtactcgaaagttgtctgcatcgatggcgcacagagattgaaaacgatacacgcgacctgcaggagtccatctcacggatccatcgcaccatcgagctcatgtattctgataaatccatgattcaggtaccctatcggctgcacgctgtattagtccacgaaggccaggctaatgcaggccactattgggcatacatttttgatcaccgtgaaagccgttggatgaaatacaatgatattgccgtcacaaagtcatcttgggaggagctcgtgagagattcctttgggggttatagaaacgcttctgcgtattgcctgatgtacataaacgacaaggcgcaatttctgattcaggaagagttcaataaggagactggccagccgctcgtgggtattgagacactccctcctgatctgagggacttcgtagaagaggacaatcagcgtttcgagaaagaactggaagagtgggatgcacaactcgctcaaaaagctctccaagagaagctgctggccagccagaagctgcgtgaatctgagaccagtgttacaacagctcaggccgctggggacccggagtatctcgagcagccctctcgatccgacttttctaaacacctgaaagaggaaactattcagatcataaccaaggcctctcacgagcatgaggataagagccccgaaactgtgctgcagagcatcatgatgactccaaacatgcagggaatcatcatggccatcggtaagtccagaagcgtttacgatcggtgtggacccgaagctggttttttcaaggctattaagttggaatacgccaggctggtgaaacttgctcaagaagacacgcccccagagacagactatcgactgcaccacgtcgtcgtgtactttatccaaaaccaggctccgaaaaagataatcgagaagaccctgttggagcaattcggagaccgaaatctatcattcgacgagaggtgtcataatattatgaaggttgcccaagcaaagctggaaatgatcaaaccggaagaggtcaatcttgaggagtacgaggaatggcatcaagactaccgaaagtttcgggaaacaacgatgtatctgatcattggcctcgaaaactttcaaagagaatcatatatcgatagtctcctgttcctcatctgtgcatatcagaacaataaagaactgttaagcaagggtctgtaccgcggacacgatgaggaactcattagccattatagacgggagtgcctgctgaagctgaacgaacaggcagccgaactcttcgagagcggagaggatagggaagtgaataacggcctgatcattatgaatgagtttattgtaccttttctgcccttgttgttggtcgatgaaatggaagaaaaagatatattagccgtggaggatatgagaaacaggtggtgctcctacctgggacaggagatggagcctcacctacaggagaagctaacagattttctaccaaagcttctggactgcagtatggaaatcaagtcttttcatgaaccacccaagctgccctcctattcaactcacgagttgtgcgagagattcgccaggataatgctatctctctcgcgaaccccagcagacggcaggtag

SEQ ID NO: 103322 - DNA, 5216 bp, Artificial Sequence
  derived and/or modified sequence
aagcagcccgcggaccggcagcaaaggaacgtgcgaacgcgtgacgccgcccgactggctcgcgctctcccgtgccccggcgtcctccgcccgctcatggcccgggccgccgcggacgagcggcgctgaggcgggccgcgtggagacgtgaggcggccgccgtggccctcacagtcggcgtttcgccgcctgcccgcggtgcccgcgcacgccggccgccatcgccttcgcgcctggctggcgggggcgctgtcctcccaggccgtccgcgccgctccctggagctcggcggagcgcggcagccagggccggcggaggcgcgaggagccgggcgccaccgccgccgccgccgccgccgccgcgggggccatgaccgtggagcagaacgtgctgcagcagagcgcggcgcagaagcaccagcagacgtttttgaatcaactgagagaaattacggggattaatgacacccagatactacagcaagccttgaaggatagtaatggaaacttggaattagcagtggctttccttactgcgaagaatgctaagacccctcagcaggaggagacaacttactaccaaacagcacttcctggcaatgatagatacatcagtgtgggaagccaagcagatacaaatgtgattgatctcactggagatgataaagatgatcttcagagagcaattgccttgagtttggccgaatcaaacagggcattcagggagactggaataactgatgaggaacaagccattagcagagttcttgaagccagcatagcagagaataaagcatgtttgaagaggacacctacagaagtttggagggattctcgaaacccttatgatagaaaaagacaggacaaagctcccgttgggctaaagaatgttggcaatacttgttggtttagtgctgttattcagtcattatttaatcttttggaatttagaagattagttctgaattacaagcctccatcaaatgctcaagatttaccccgaaaccaaaaggaacatcggaatttgccttttatgcgtgagctgaggtatctatttgcacttcttgttggtaccaaaaggaagtatgttgatccatcaagagcagttgaaattcttaaggatgctttcaaatcaaatgactcacagcagcaagatgtgagtgagtttacacacaaattattagattggttagaagatgccttccaaatgaaagctgaagaggagacggatgaagagaagccaaagaaccccatggtagagttgttctatggcagattcctggctgtgggagtacttgaaggtaaaaaatttgaaaacactgaaatgtttggtcagtacccacttcaggtcaatgggttcaaagatctgcatgagtgcctagaagctgcaatgattgaaggagaaattgagtctttacattcagagaattcaggaaaatcaggccaagagcattggtttactgaattaccacctgtgttaacatttgaattgtcaagatttgaatttaatcaggcattgggaagaccagaaaaaattcacaacaaattagaatttccccaagttttatatttggacagatacatgcacagaaacagagaaataacaagaattaagagggaagagatcaagagactgaaagattacctcacggtattacaacaaaggctagaaagatatttaagctatggttccggtcccaaacgattccccttggtagatgttcttcagtatgcattggaatttgcctcaagtaaacctgtttgcacttctcctgttgacgatattgacgctagttccccacctagtggttccataccatcacagacattaccaagcacaacagaacaacagggagccctatcttcagaactgccaagcacatcaccttcatcagttgctgccatttcatcgagatcagtaatacacaaaccatttactcagtcccggatacctccagatttgcccatgcatccggcaccaaggcacataacggaggaagaactttctgtgctggaaagttgtttacatcgctggaggacagaaatagaaaatgacaccagagatttgcaggaaagcatatccagaatccatcgaacaattgaattaatgtactctgacaaatctatgatacaagttccttatcgattacatgccgttttagttcacgaaggccaagctaatgctgggcactactgggcatatatttttgatcatcgtgaaagcagatggatgaagtacaatgatattgctgtgacaaaatcatcatgggaagagctagtgagggactcttttggtggttatagaaatgccagtgcatactgtttaatgtacataaatgataaggcacagttcctaatacaagaggagtttaataaagaaactgggcagccccttgttggtatagaaacattaccaccggatttgagagattttgttgaggaagacaaccaacgatttgaaaaagaactagaagaatgggatgcacaacttgcccagaaagctttgcaggaaaagcttttagcgtctcagaaattgagagagtcagagacttctgtgacaacagcacaagcagcaggagacccagaatatctagagcagccatcaagaagtgatttctcaaagcacttgaaagaagaaactattcaaataattaccaaggcatcacatgagcatgaagataaaagtcctgaaacagttttgcagtcgatcatgatgacaccgaacatgcaaggtattatcatggcgataggtaaatccaggagtgtatatgacaggtgtggccctgaagcagggttctttaaggcaattaagttggaatatgcaaggttggttaagttggcccaagaagacaccccaccagaaaccgattatcgtttacatcatgtagtggtctactttatccagaaccaggcaccaaagaaaattattgagaaaacattactagaacaatttggagatagaaatttgagttttgatgaaaggtgtcacaacataatgaaagttgctcaagccaaactggaaatgataaaacctgaagaagtaaacttggaggaatatgaggagtggcatcaggattataggaaattcagggaaacaactatgtatctcataattgggctagaaaattttcaaagagaaagttatatagattccttgctgttcctcatctgtgcttatcagaataacaaagaactcttgtctaaaggcttatacagaggacatgatgaagaattgatatcacattatagaagagaatgtttgctaaaattaaatgagcaagccgcagaactcttcgaatctggagaggatcgagaagtaaacaatggtttgattatcatgaatgagtttattgtcccatttttgccattattactggtggatgaaatggaagaaaaggatatactagctgtagaagatatgagaaatcgatggtgttcctaccttggtcaagaaatggaaccacacctccaagaaaagctgacagattttttgccaaaactgcttgattgttctatggagattaaaagtttccatgagccaccgaagttaccttcatattccacgcatgaactctgtgagcgatttgcccgaatcatgttgtccctcagtcgaactcctgctgatggaagataaactgcacactttccctgaacacactgtataaactctttttagttcttaacccttgccttcctgtcacagggtttgcttgttgctgctatagtttttaacttttttttattttaataactgcaaaagacaaaatgactatacagactttagtcagactgcagacaataaagctgaaaatcgcatggcgctcagacattttaaccggaactgatgtataatcacaaatctaattgattttattatggcaaaactatgcttttgccaccttcctgttgcagtattactttgcttttatcttttctttctcaacagctttccattcagtctggatccttccatgactacagccatttaagtgttcagcactgtgtacgatacataatatttggtagcttgtaaatgaaataaagaataaagttttatttatggctacctatgtgtttgtaagcaggtatattgtatattagtgtattagtaatactagataaatgaattttgtctggggattaagattggatagttaatagattaatacaatcttttaattctgctctaatgctagcaaattggaaaatgtttaagtctttgacacttaaatttatctatatttttaacaaagttcttgaacttagtatggcaccggaacctgttttgaattcagtcaggtttttactcaagtaagtggttgattttttttaagtcaaactacactgaaacttttatccttttcttagattaatcttactttttaaatgtatttacaatatacagcaaggtgattatttcaagagaatcccaaagtacttgaataagggctattgtaaaatttaaaagaaatatttatatatacacatatatacacatacacacatgtatatatatattcttcataatggaggacaatgttttgcaatatataaatcattctatttttgtaaattgtatatcactttaattgaaaatgttctctactaattaatactgtgaaacaaaattgatgttgtttaactagaagttatgagtatcttaactgcctttattccttttcaaaaaggaaaaagctgtagaacattttgtagatgaaactactgtttaagattaatgaattaatattgtgaatgaaaatcaaaatccatactttaaaggtaatcatgttactaacaacctatttttgaattcataaaaatttctttataaatgatgttttgtgaacatagtaaaatagaccattatactatgtgtatgtttgatacagcgtcgccaaaactagtgttctttattagtgcctctcacaaaagatcctggatggaggagtaagatgaaatattatgctattatatgatgctgtttgtaaaggtattaatgtactagtaaggtgttaatgacaaggaattagtactattcctgttgtaaagttagattttgcatattgtatctatcaaaatatgtttgggtttagattttaagttgtctactgagcagatttctgcattggttttccagtcctgttaaaagtttagaaacttcatatgtgtcatcacagcttttgtaaagaaagtatccttaatattttatgacattct

SEQ ID NO: 103323 - DNA, 3264 bp, Artificial Sequence
  derived and/or modified sequence
atgaccgtggagcagaacgtgctgcagcagagcgccgcccagaagcaccagcagaccttcctgaaccagctgagagagatcaccggcatcaacgacacccagatcctgcagcaggccctgaaggacagcaacggcaacctggagctggccgtggccttcctgaccgccaagaacgccaagaccccccagcaggaggagaccacctactaccagaccgccctgcccggcaacgacagatacatcagcgtgggcagccaggccgacaccaacgtgatcgacctgaccggcgacgacaaggacgacctgcagagagccatcgccctgagcctggccgagagcaacagagccttcagagagaccggcatcaccgacgaggagcaggccatcagcagagtgctggaggccagcatcgccgagaacaaggcctgcctgaagagaacccccaccgaggtgtggagagacagcagaaacccctacgacagaaagagacaggacaaggcccccgtgggcctgaagaacgtgggcaacacctgctggttcagcgccgtgatccagagcctgttcaacctgctggagttcagaagactggtgctgaactacaagccccccagcaacgcccaggacctgcccagaaaccagaaggagcacagaaacctgcccttcatgagagagctgagatacctgttcgccctgctggtgggcaccaagagaaagtacgtggaccccagcagagccgtggagatcctgaaggacgccttcaagagcaacgacagccagcagcaggacgtgagcgagttcacccacaagctgctggactggctggaggacgccttccagatgaaggccgaggaggagaccgacgaggagaagcccaagaaccccatggtggagctgttctacggcagattcctggccgtgggcgtgctggagggcaagaagttcgagaacaccgagatgttcggccagtaccccctgcaggtgaacggcttcaaggacctgcacgagtgcctggaggccgccatgatcgagggcgagatcgagagcctgcacagcgagaacagcggcaagagcggccaggagcactggttcaccgagctgccccccgtgctgaccttcgagctgagcagattcgagttcaaccaggccctgggcagacccgagaagatccacaacaagctggagttcccccaggtgctgtacctggacagatacatgcacagaaacagagagatcaccagaatcaagagagaggagatcaagagactgaaggactacctgaccgtgctgcagcagagactggagagatacctgagctacggcagcggccccaagagattccccctggtggacgtgctgcagtacgccctggagttcgccagcagcaagcccgtgtgcaccagccccgtggacgacatcgacgccagcagcccccccagcggcagcatccccagccagaccctgcccagcaccaccgagcagcagggcgccctgagcagcgagctgcccagcaccagccccagcagcgtggccgccatcagcagcagaagcgtgatccacaagcccttcacccagagcagaatcccccccgacctgcccatgcaccccgcccccagacacatcaccgaggaggagctgagcgtgctggagagctgcctgcacagatggagaaccgagatcgagaacgacaccagagacctgcaggagagcatcagcagaatccacagaaccatcgagctgatgtacagcgacaagagcatgatccaggtgccctacagactgcacgccgtgctggtgcacgagggccaggccaacgccggccactactgggcctacatcttcgaccacagagagagcagatggatgaagtacaacgacatcgccgtgaccaagagcagctgggaggagctggtgagagacagcttcggcggctacagaaacgccagcgcctactgcctgatgtacatcaacgacaaggcccagttcctgatccaggaggagttcaacaaggagaccggccagcccctggtgggcatcgagaccctgccccccgacctgagagacttcgtggaggaggacaaccagagattcgagaaggagctggaggagtgggacgcccagctggcccagaaggccctgcaggagaagctgctggccagccagaagctgagagagagcgagaccagcgtgaccaccgcccaggccgccggcgaccccgagtacctggagcagcccagcagaagcgacttcagcaagcacctgaaggaggagaccatccagatcatcaccaaggccagccacgagcacgaggacaagagccccgagaccgtgctgcagagcatcatgatgacccccaacatgcagggcatcatcatggccatcggcaagagcagaagcgtgtacgacagatgcggccccgaggccggcttcttcaaggccatcaagctggagtacgccagactggtgaagctggcccaggaggacaccccccccgagaccgactacagactgcaccacgtggtggtgtacttcatccagaaccaggcccccaagaagatcatcgagaagaccctgctggagcagttcggcgacagaaacctgagcttcgacgagagatgccacaacatcatgaaggtggcccaggccaagctggagatgatcaagcccgaggaggtgaacctggaggagtacgaggagtggcaccaggactacagaaagttcagagagaccaccatgtacctgatcatcggcctggagaacttccagagagagagctacatcgacagcctgctgttcctgatctgcgcctaccagaacaacaaggagctgctgagcaagggcctgtacagaggccacgacgaggagctgatcagccactacagaagagagtgcctgctgaagctgaacgagcaggccgccgagctgttcgagagcggcgaggacagagaggtgaacaacggcctgatcatcatgaacgagttcatcgtgcccttcctgcccctgctgctggtggacgagatggaggagaaggacatcctggccgtggaggacatgagaaacagatggtgcagctacctgggccaggagatggagccccacctgcaggagaagctgaccgacttcctgcccaagctgctggactgcagcatggagatcaagagcttccacgagccccccaagctgcccagctacagcacccacgagctgtgcgagagattcgccagaatcatgctgagcctgagcagaacccccgccgacggcagatag

SEQ ID NO: 103324 - protein, 2049 aa, Artificial Sequence
  derived and/or modified sequence
MFSKKPHGDVKKSTQKVLDTKKDALTRLKHLRIVIENAESIDLKQFFDQHFSHIYYVFFENFVTIEASLKQKGHKSQREELDAILFIFEKILQLLPERIHQRWQFHSIGLILKKLLHTGNSLKIRREGVRLFLLWLQALQNNCSKEQLWMFSCLIPGFSAPQSEHGPRTLDNLINPPLNLQETQVTIEEITPLVPPQSGDKGQEDLTSYFLEALLKYIVIQVKSLEWKNKENQERGFSFLFSHFKKYYLPYIFPNICKENSLYHPILDIPQMRPKPHYVVIKKDAETNEAIYCTKEPFIKARVIVIRWLVSFWLEPKPHTGPHIPGMEGEVLPKNIQRAAASLVSREESKNDNADKTDRTTEPEQSHSNTSTLTEREPSSSSLCSIDEEHLTDIEIVRRVFSSKRSNVNFVTEIFRQAFLLPICEAAAMRKVVKVYQEWIQQEEKPLFMQEPEEIVITSSDLPCIENVTDHDISMEEGEKREEENGTNTADHVRNSSWAKNGSYQGALHNASEEATEQNIRAGTQAVLQVFIINSSNIFLLEPANEIKNLLDEHTDMCKRILNIYRYMVVQVSMDKKTWEQMLLVLLRVTESVLKMPSQAFLQFQGKKNMTLAGRLAGPLFQTLIVAWIKANLNVYISRELWDDLLSVLSSLTYWEELATEWSLTMETLTKVLARNLYSLDLSDLPLDKLSEQKQKKHKGKGVGHEFQKVSVDKSFSRGWSRDQPGQAPMRQRSATTTGSPGTEKARSIVRQKTVDIDDAQILPRSTRVRHFSQSEETGNEVFGALNEEQPLPRSSSTSDILEPFTVERAKEAEQNATRGSTEGSVQSCNGLFWKESCSDIGGSSANVPDLMDEFIAERLRSGNASTMTRRGSSPGSLEIPKDLPDILNKQNQMRPIDDPGVPSEWTSPASAGSSDLISSDSHSDSFSAFQYDGRKFDNFGFGTDTGVTSSADVDSGSGHHQSAEEQEVASLTTLHIDSETSSLNQQAFSAEVATITGSESASPVHSPLGSRSQTPSPSTLNIDHMEQKDLQLDEKLHHSVLQTPDDLEISEFPSECCSVMAGGTLTGWHADVATVMWRRMLGILGDVNSIMDPEIHAQVFDYLCELWQNLAKIRDNLGISTDNLTSPSPPVLIPPLRILTPWLFKATMLTDKYKQGKLHAYKLICNTMKRRQDVSPNRDFLTHFYNIMHCGLLHIDQDIVNTIIKHCSPQFFSLGLPGATMLIMDFIVAAGRVASSAFLNAPRVEAQVLLGSLVCFPNLYCELPSLHPNIPDVAVSQFTDVKELIIKTVLSSARDEPSGPARCVALCSLGIWICEELVHESHHPQIKEALNVICVSLKFTNKTVAHVACNMLHMLVHYVPRLQIYQPDSPLKIIQILIATITHLLPSTEASSYEMDKRLVVSLLLCLLDWIMALPLKTLLQPFHATGAESDKTEKSVLNCIYKVLHGCVYGAQCFSNPRYFPMSLSDLASVDYDPFMHLESLKEPEPLHSPDSERSSKLQPVTEVKTQMQHGLISIAARTVITHLVNHLGHYPMSGGPAMLTSQVCENHDNHYSESTELSPELFESPNIQFFVLNNTTLVSCIQIRSEENMPGGGLSAGLASANSNVRIIVRDLSGKYSWDSAILYGPPPVSGLSEPTSFMLSLSHQEKPEEPPTSNECLEDITVKDGLSLQFKRFRETVPTWDTIRDEEDVLDELLQYLGVTSPECLQRTGISLNIPAPQPVCISEKQENDVINAILKQHTEEKEFVEKHFNDLNMKAVEQDEPIPQKPQSAFYYCRLLLSILGMNSWDKRRSFHLLKKNEKLLRELRNLDSRQCRETHKIAVFYVAEGQEDKHSILTNTGGSQAYEDFVAGLGWEVNLTNHCGFMGGLQKNKSTGLTTPYFATSTVEVIFHVSTRMPSDSDDSLTKKLRHLGNDEVHIVWSEHTRDYRRGIIPTEFGDVLIVIYPMKNHMFSIQIMKKPEVPFFGPLFDGAIVNGKVLPIMVRATAINASRALKSLIPLYQNFYEERARYLQTIVQHHLEPTTFEDFAAQVFSPAPYHHLPSDADH

SEQ ID NO: 103325 - DNA, 6150 bp, Artificial Sequence
  derived and/or modified sequence
atgttttcgaagaagccccacggggatgtgaagaaaagcactcagaaggtgctggacaccaagaaggatgccctcacccggctaaagcacctgcgcatcgtgatcgaaaatgcggaaagtattgaccttaagcagttctttgaccaacacttctcgcatatttactatgtgttcttcgaaaacttcgtcacaatcgaggcgagcctgaaacagaagggccacaagtcacagagggaagaattagatgctatccttttcatctttgaaaaaatattgcagctgctgcctgagcgaattcatcagcggtggcaatttcactccattggactgattctgaagaaactcctgcacaccgggaatagcctgaagatcagaagagagggcgtaagactgtttttactctggctgcaggcccttcaaaataactgctccaaagagcagctttggatgtttagttgccttatccccggtttttccgcgccacaatcagagcatggcccgaggaccctggataatctgatcaatccaccactgaaccttcaggagacacaggtaacaatcgaagagatcacacctctcgttcctccacagtcaggggataagggccaagaggatctaacgagctattttcttgaggccctcctgaagtatatcgttatacaggtcaagagtctcgaatggaaaaataaagaaaatcaagagaggggtttttctttcctgttctcccactttaagaagtactacctgccttacatatttcctaacatctgtaaagagaactctttatatcaccctatcctggacataccacagatgcgacctaaaccacactacgtggtaatcaaaaaggacgcagagacaaacgaagctatctactgtaccaaggagcctttcattaaggcccgggtcattgtaatccggtggctcgtgtctttctggctggagcccaagccccacactggacctcatataccagggatggaaggtgaggttttaccaaagaatatccagcgcgccgcagcctcccttgttagcagagaagaatcaaagaacgacaatgctgataagaccgaccgtactaccgagccagaacagagtcacagcaataccagcacattgacagaacgcgaaccctcttcttcatccttgtgtagtatcgatgaggaacatctcacagacattgagatcgtacggcgggtgttttccagcaaaaggagcaatgtgaactttgtgaccgagatcttccggcaggcatttctgctccccatctgtgaggctgccgcaatgagaaaggttgtgaaggtctaccaagagtggatacagcaggaggagaagccgctcttcatgcaggagccagaggagatcgttatcacatcttcagatttgccttgcattgaaaatgtgactgaccatgacatctccatggaagaaggagaaaagagagaggaggagaacgggacaaacacggccgatcatgtgcgcaactcgagctgggcaaaaaatggctcgtaccagggcgcattgcacaatgctagtgaggaggcaactgaacaaaatatccgggccggtacccaagctgtcctccaggtgttcatcattaattcttctaacatttttctactagagcccgctaacgagatcaaaaatctgctggacgagcatactgatatgtgcaaacgaatccttaacatctaccggtacatggtggtgcaggtgtcaatggacaagaagacatgggagcagatgctcctggtactgctaagggtcacggagtcagtgctgaagatgccaagccaggcttttctgcagttccagggtaagaagaatatgaccctggctgggcggttggctggtcctttgttccagactctcattgtagcgtggatcaaagccaatcttaatgtctacataagccgcgagctgtgggatgacttgctttccgtgctgagctcactaacgtactgggaagaactggctacggagtggtccctgacaatggagactctgaccaaagtcctggcgcggaacttgtattccctggatctcagtgatctgcccctggataaattaagcgaacaaaaacaaaagaagcacaagggaaagggtgtgggacacgagtttcagaaggttagtgtggataagagcttcagcaggggttggtcaagggaccagccaggacaggctcctatgaggcagcggagcgctacaacaacgggtagcccgggtacagagaaagcacgatctatagttcgccaaaagaccgtggatattgacgatgcacagattctgccccggtccacccgagtgcggcacttctctcagtcagaagagactggcaacgaggtgttcggcgctctaaacgaagagcagcccctaccacggtctagtagcacttccgatattctggagcctttcacggtcgaacgcgccaaagaggccgaacagaatgccactagaggctctacagaggggagcgttcagagctgtaacggcctattttggaaggaaagctgtagcgacattggcggctcttccgcaaacgtgccagacctgatggatgagtttattgccgaaagactgagatctgggaatgccagcaccatgacaagacgaggaagttcacccggatccctggagataccgaaggacctgcctgatatcctaaataaacagaaccagatgcgccctattgatgaccctggggtgcctagtgaatggactagtccggcttccgctggctccagcgaccttatttcttccgatagccatagtgactctttcagcgcctttcaatatgacgggcgaaagttcgacaatttcggttttgggactgatactggcgtgacctcctcagcagatgtggatagcgggagtggccatcatcagtcagccgaggagcaggaagtcgcctcacttactaccctccacatagatagtgagacttcatcactgaaccaacaagcattttctgccgaggtggcaactatcactgggtctgagagtgcttcacccgttcactcacccctgggcagcagatcacagaccccttctccctccaccctgaacattgatcacatggaacagaaggatctgcagctggatgaaaaacttcatcacagcgtacttcagacccctgatgacctggaaatctctgaattcccatccgagtgctgctcagtgatggcaggcggtactctgacgggttggcatgcagacgttgccactgtgatgtggcggcgcatgttgggcatcctcggtgatgtcaatagcatcatggatcctgaaattcatgcccaggtctttgattatctctgcgaactgtggcagaacctggcaaagattcgggataatctaggcatcagcaccgataatcttacttcaccctcacctcctgtcttgatccccccactgagaatcctcaccccttggttatttaaagcgaccatgctcactgacaaatacaagcagggaaagctacatgcttacaagttgatatgtaataccatgaaaagacgacaagatgtgagccctaatagggattttttaacccatttctacaatattatgcactgtgggctgcttcacatcgaccaggacatagtgaacacaatcattaagcattgctctccccagttcttctccctgggtctgccaggcgccactatgttgatcatggactttatagtcgctgcaggccgtgttgccagtagtgctttcttgaacgcaccaagggtagaagcccaggtgctgttaggatctctcgtatgctttcctaacctgtactgcgagctgccctccctgcatcctaatatcccggacgtcgcggtgagtcaatttaccgacgtgaaggagctcataattaagaccgtgctgagttcagcccgcgacgagccctcaggacccgcccggtgcgtggccctctgttcactcggcatttggatttgcgaggagctagtgcacgagtctcaccacccacagattaaagaagccctgaatgttatctgtgtttctctgaagtttacaaataagacagtggcgcatgtcgcctgtaatatgcttcacatgctcgtgcactacgttccaagactacagatctatcaacccgattcacccttgaagattatccagattctgatcgctactattactcatctcctgccctcgacggaagctagcagctatgaaatggataaacggttggtggtgtctctgctcttgtgtctccttgattggataatggccctgccactaaaaaccttactccagccctttcatgccactggagccgagtctgacaaaacggaaaagtcagtattgaactgtatctataaggttcttcatggttgcgtctacggcgcccagtgcttcagcaatccccgctacttccctatgtccttaagtgacctggcatctgtcgattatgacccctttatgcacctggaatcccttaaggagccagagccccttcattcccccgacagcgaacggtcctccaaactacagcctgttacagaagtcaagacccaaatgcaacacgggctgatatccatcgccgcaaggactgtcattacccatctagttaaccatttgggtcattatcctatgagcggaggccctgccatgctgaccagccaagtgtgtgaaaaccatgataaccactattccgagagtaccgagttgtcccctgaactgttcgaatctcccaacatccagttctttgtcttgaacaacactacactggtgagttgcattcagatcagaagtgaggagaatatgccaggtggcggcctgagcgccggccttgcctctgcgaattcaaacgttcgaatcattgtgcgtgacttgtcagggaagtactcctgggatagcgcaattctctatggtccaccccccgtgagcggactgagcgagccgacgtcattcatgctaagcctttctcaccaggagaagcctgaggaaccaccaacgtcaaacgagtgcttagaagacataaccgttaaggatggactgtcgttgcagtttaagaggttcagggagactgttccaacctgggataccatacgcgatgaggaagatgttctggatgaacttcttcaatatctaggagtgacaagtccagaatgtttacagagaactggaatatcactcaatattcctgctccacagcccgtatgcatctcagagaagcaggagaatgatgtgatcaatgccatcttgaagcagcacacggaggagaaggaattcgtggaaaagcacttcaatgatttgaatatgaaggcggttgagcaggacgaaccgattccgcaaaagccccaatccgcattctactattgtaggttgttgctcagcatccttgggatgaatagctgggacaagagaagaagcttccacctacttaaaaaaaacgaaaaactgctgagagagctgagaaacctggactcaagacagtgtcgggaaacccacaagattgccgtattttacgtggctgaaggccaggaggataagcactcgattctcaccaacacgggcggtagccaggcctacgaggatttcgtcgcagggctgggttgggaggtaaatttgacgaaccactgtggcttcatgggcggccttcagaaaaacaaatcaactgggctgaccaccccctatttcgccacttcaaccgtggaggtgattttccacgtcagcacccgaatgccttccgacagcgatgactctcttacaaagaagctacgccacctgggtaatgacgaggtacatattgtttggagcgagcatacgagggattaccgccggggcatcatccccaccgagttcggtgatgtcctcatcgtgatctatccaatgaagaaccatatgtttagtatccagatcatgaagaaacccgaggtgcctttcttcggtcccctcttcgacggggccatagtgaatgggaaagtgctgcctattatggtgcgagctactgcgatcaacgcttcccgggccctgaagtctttgattcccctctaccaaaatttttacgaggaacgtgcccggtacctccagacgatcgtacaacatcacctcgagccaacaacatttgaagattttgccgcccaggtattctcccccgctccttaccaccaccttccgagcgacgctgaccactag

SEQ ID NO: 103326 - DNA, 6150 bp, Artificial Sequence
  derived and/or modified sequence
atgttcagcaagaagccccatggagatgtgaagaagagcacccagaaggtgctggacaccaagaaggatgccctgacccggctgaagcacctgagaattgtgattgaaaatgctgagagcattgacctgaagcagttctttgaccagcacttcagccacatctactacgtgttctttgagaactttgtgaccatcgaggccagcctgaagcagaagggccacaagagccagcgggaggagctggatgccatcctcttcatctttgagaagatcctgcagctgctgcctgagcgcatccaccagcgctggcagttccacagcatcggcctcatcctgaagaagctgctgcacacaggcaacagcctgaagatcagaagagagggcgtgcggctcttcctgctgtggctgcaggccctgcagaacaactgcagcaaggagcagctgtggatgttcagctgcctgatccctggcttcagcgccccccagagcgagcacggccccaggaccctggacaacctgatcaacccccccctgaacctgcaggagacccaggtgaccatcgaggagatcacccccctggtgcccccccagagcggggacaagggccaggaggacctgaccagctacttcctggaggccctgctgaagtacatcgtcatccaggtgaagagcctggagtggaagaacaaggagaaccaggagcggggcttctccttcctgttcagccacttcaagaagtactacctgccctacatcttccccaacatctgcaaggagaacagcctgtaccaccccatcctggacatcccccagatgaggcccaagccccactacgtggtgatcaagaaggatgctgagaccaatgaggccatctactgcaccaaggagcccttcatcaaggcccgggtcatcgtcatccgctggctggtgtccttctggctggagcccaagccccacacaggcccccacatccctggcatggagggggaggtgctgcccaagaacatccagagagctgctgccagcctggtgtcccgggaggagagcaagaatgacaatgctgacaagacagacaggaccacagagcctgagcagagccacagcaacaccagcaccctgacagagcgggagcccagcagcagcagcctgtgcagcattgatgaggagcacctgacagacatcgagatcgtgcggcgggtcttcagcagcaagaggagcaatgtgaactttgtgacagagatcttccggcaggccttcctgctgcccatctgtgaggccgccgccatgaggaaggtggtgaaggtgtaccaggagtggatccagcaggaggagaagcccctcttcatgcaggagcctgaggagatcgtcatcaccagcagtgacctgccctgcattgaaaatgtgacagaccatgacatctccatggaggagggggagaagcgggaggaggagaatggcaccaacacagctgaccacgtgaggaacagctcctgggccaagaatggcagctaccagggcgccctgcacaatgccagcgaggaggccacagagcagaacatccgggccggcacccaggccgtgctgcaggtgttcatcatcaacagcagcaacatcttcctgctggagcccgccaatgagatcaagaacctgctggatgagcacacagacatgtgcaagaggatcctgaacatctaccgctacatggtggtgcaggtgtccatggacaagaagacctgggagcagatgctgctggtgctgctgcgggtgacagagagcgtgctgaagatgcccagccaggccttcctgcagttccagggcaagaagaacatgaccctggccggccgcctggccggccccctcttccagaccctgattgtggcctggatcaaggccaacctgaatgtgtacatcagccgggagctgtgggatgacctgctgtctgtgctgagcagcctgacctactgggaggagctggccacagagtggagcctgaccatggagaccctgaccaaggtgctggccaggaacctgtacagcctggacctgagtgacctgcccctggacaagctgtctgagcagaagcagaagaagcacaagggcaaaggagtgggccacgagttccagaaggtgtctgtggacaagagcttcagccggggctggagccgggaccagcccggccaggcccccatgaggcagaggtctgccaccaccaccggcagccctggaacagagaaggcccggagcatcgtgcggcagaagacagtggacattgatgatgcccagatcctgcccaggagcaccagggtgcgccacttcagccagagcgaggagactggaaatgaggtgtttggagccctgaatgaggagcagcccctgcccaggagcagcagcaccagtgacatcctggagcccttcaccgtggagcgggccaaggaggccgagcagaatgccacccggggcagcacagagggctctgtgcagagctgcaatggcctcttctggaaggagagctgcagcgacattggaggcagcagcgccaacgtgcctgacctgatggatgagttcatcgccgagcggctgcggtctggaaatgccagcaccatgacccggcggggcagcagccctggcagcctggagatccccaaggacctgcctgacatcctgaacaagcagaaccagatgaggcccattgatgaccccggggtgcccagcgagtggaccagccctgccagcgctggcagcagtgacctgatcagcagtgacagccacagcgacagcttcagcgccttccagtatgatggcaggaagtttgacaactttggcttcggcacagacaccggggtgaccagcagcgcagatgtggacagcggcagcggccaccaccagagcgctgaggagcaggaggtggccagcctgaccaccctgcacattgattctgagaccagcagcctgaaccagcaggccttctctgctgaggtggccaccatcactggaagtgaaagtgccagccctgtgcacagccccctgggcagccgcagccagacccccagccccagcaccctgaacatcgaccacatggagcagaaggacctgcagctggatgagaagctgcaccacagcgtgctgcagaccccagatgacctggagatcagcgagttccccagcgagtgctgcagcgtgatggccggcggcaccctgaccggctggcatgctgatgtggccaccgtgatgtggaggaggatgctgggcatcctgggagatgtgaacagcatcatggaccctgagatccacgcccaggtgtttgactacctgtgtgagctgtggcagaacctggccaagatccgggacaacctgggcatcagcacagacaacctgaccagccccagcccccctgtgctgatcccccccctgcgcatcctgaccccctggctgttcaaggccaccatgctgacagacaagtacaagcagggcaagctgcacgcctacaagctgatctgcaacaccatgaagaggcggcaggatgtgagccccaacagagacttcctgacccacttctacaacatcatgcactgcggcctgctgcacatcgaccaggacatcgtgaacaccatcatcaagcactgcagcccccagttcttcagcctgggcctgcccggggccaccatgctgatcatggacttcatcgtggccgccggccgggtggccagcagcgccttcctgaatgccccccgggtggaggcccaggtgctgctgggcagcctggtgtgcttccccaacctgtactgtgagctgcccagcctgcaccccaacatcccagatgtggccgtgtcccagttcacagatgtgaaggagctgatcatcaagacagtgctgagcagcgccagagatgagcccagcggccctgcccgctgtgtggccctgtgcagcctgggcatctggatctgtgaggagctggtgcatgagagccaccacccccagatcaaggaggccctgaatgtcatctgtgtgtccctgaagttcaccaacaagacagtggcccacgtggcctgcaacatgctgcacatgctggtgcactacgtgccccggctgcagatctaccagcctgacagccccctgaagatcatccagatcctgattgccaccatcacccacctgctgcccagcacagaggccagcagctatgagatggacaagaggctggtggtgtccctgctgctgtgcctgctggactggatcatggccctgcccctgaagaccctgctgcagcccttccacgccactggagctgagagtgacaagacagagaagtctgtgctgaactgcatctacaaggtgctgcacggctgtgtgtatggagcccagtgcttcagcaacccccgctacttccccatgagcctgagtgacctggcctctgtggactatgaccccttcatgcacctggagagcctgaaggagcctgagcccctgcacagcccagacagcgagaggagcagcaagctgcagcctgtgacagaggtgaagacccagatgcagcacggcctcatcagcattgctgccaggacagtcatcacccacctggtgaaccacctgggccactaccccatgtctgggggccctgccatgctgaccagccaggtgtgtgagaaccacgacaaccactacagcgagagcacagagctgagccctgagctgtttgagagccccaacatccagttctttgtgctgaacaacaccaccctggtgtcctgcatccagatccgctctgaggagaacatgcctgggggcggcctgtctgctggcctggccagcgccaacagcaatgtgcgcatcatcgtgcgggacctgagcggcaagtacagctgggacagcgccatcctgtatggccccccacctgtgtctggcctgtctgagcccaccagcttcatgctgagcctgagccaccaggagaagccagaggagccccccaccagcaatgaatgtctggaggacatcaccgtgaaggatggcctgagcctgcagttcaagcgcttccgggagaccgtgcccacctgggacaccatcagagatgaagaagatgtgctggatgagctgctgcagtacctgggcgtgaccagcccagaatgtctgcagaggacaggcatcagcctgaacatcccagccccccagcctgtgtgcatcagcgagaagcaggagaatgatgtgatcaatgccatcctgaagcagcacacagaggagaaggagtttgtggagaagcacttcaatgacctgaacatgaaggctgtggagcaggatgagcccatcccccagaagccccagagcgccttctactactgccgcctgctgctgagcatcctgggcatgaacagctgggacaagagaagaagcttccacctgctgaagaagaatgagaagctgctgcgggagctgaggaacctggacagccggcagtgccgggagacccacaagattgctgtgttctacgtggccgagggccaggaggacaagcacagcatcctgaccaacacaggaggcagccaggcctatgaagattttgtggccggcctgggctgggaggtgaacctgaccaaccactgcggcttcatgggcggcctgcagaagaacaagagcacaggcctgaccaccccctactttgccaccagcacagtggaggtgatcttccacgtgtccaccaggatgcccagcgacagtgatgacagcctgaccaagaagctgcggcacctgggcaatgatgaggtgcacatcgtgtggagcgagcacacccgggactacagaagaggcatcatccccacagaatttggagatgtgctgattgtcatctaccccatgaagaaccacatgttcagcatccagatcatgaagaagccagaggtgcccttcttcggccccctgtttgatggagccatcgtgaatggcaaggtgctgcccatcatggtgcgggccacagccatcaatgccagccgggccctgaagagcctcatccccctgtaccagaacttctatgaggagcgggcccgctacctgcagaccatcgtgcagcaccacctggagcccaccacctttgaggactttgctgcccaggtgttctccccagccccctaccaccacctgcccagtgatgctgaccactag

SEQ ID NO: 103327 - DNA, 6150 bp, Artificial Sequence
  derived and/or modified sequence
atgttcagcaagaagccccacggcgacgtgaagaagagcacccagaaggttctggatactaaaaaagatgccctgacgcgcctcaaacatctgcggatcgtgatcgagaatgccgaatccatcgatctgaagcagtttttcgatcagcacttcagccacatatactacgtgttttttgagaatttcgtgactatcgaggcttcactaaagcagaagggccacaagagtcaacgcgaagagcttgatgccatactgttcattttcgagaaaatcttacaattgttgccagagcgtatccatcaaaggtggcagtttcactctattggtcttattctgaagaaactcctccataccggcaatagcctgaaaatccgtagagagggggtgagactgtttctgctctggttgcaagccctgcagaacaattgttctaaagagcagttgtggatgtttagctgtttaatccccggattcagtgcaccccagtctgagcacggccctcgtactctcgacaacctcattaatccaccattaaacttgcaggaaacgcaagtcacaattgaagagatcactccattggttccaccacagtcaggggataaaggacaggaggatctcacgagctactttttagaagcacttctaaagtatatcgtgatccaagtcaagtcactggaatggaaaaacaaagagaatcaggagcgagggttctcttttttgttttcgcattttaaaaaatattatcttccgtatatttttcctaatatctgcaaagagaattctttgtaccatcctatattggacatccctcaaatgcggcctaagccacactacgtggttattaagaaagacgccgagacaaacgaggctatctattgtactaaggagccatttattaaggcacgggtcatagtcatccgctggctggtgtctttctggctggagcctaagccgcataccggtccccatatacccgggatggaaggagaagtactgcccaaaaatatacagcgggccgcagccagtcttgtatcccgggaggagtcaaagaacgataatgccgacaaaacggataggacgacagagcccgaacagtctcacagcaacaccagcaccctgacggagcgggaaccatcctcatcgagcttatgcagtattgacgaagagcacttgacagacatagagatcgtgcgacgggtattctccagtaaaagaagtaacgttaacttcgtgacggagatcttccggcaggctttccttcttcctatttgtgaagctgccgccatgcggaaggtagttaaagtataccaggaatggattcaacaagaggagaaaccgctattcatgcaggagcctgaggagatcgtgatcacaagttctgatttgccatgtatagagaacgtcacagaccatgatattagcatggaggagggcgaaaaacgcgaggaggagaatggtacaaacaccgcagatcatgtgaggaacagctcttgggccaagaacgggagctaccaaggtgccctgcataacgcatcagaggaagcaactgagcagaacatccgtgccggtacacaggcagtgctccaggtttttatcatcaactcttctaacatcttcctgctcgaacccgcaaacgagattaagaatctcctagatgagcataccgatatgtgcaagagaatactgaacatctacaggtacatggtggtacaagtttcaatggacaagaaaacttgggagcagatgctgttagtactgttgagggtcacagagtctgtgctgaaaatgccctctcaggcctttctgcagtttcaggggaagaaaaatatgacccttgccgggcgcctcgccggtccgctcttccaaaccctaattgtggcctggatcaaggcaaatctcaacgtttacatcagtagagaactatgggacgacttgctctccgtcctgtctagcttgacgtattgggaagaattggcaactgagtggtcgctgaccatggaaaccctgaccaaggtactggcccgcaacctttacagcctcgacctttctgaccttccactggacaaacttagtgagcagaaacagaaaaagcataaaggaaaaggtgtcggtcacgaattccagaaggtcagtgtggacaagtctttctcccgcgggtggtcaagggatcagccgggccaggcgcctatgcgtcagaggagtgccacaaccacagggtctccagggaccgagaaggcgcggagtatagtgagacagaagacagtggatatcgatgacgctcagatattgcctcgatccacacgcgtacgccacttttcccagtcggaagaaactggcaatgaggtgtttggcgctctgaatgaagagcagcccttacccagatcatccagcacctccgatattttagagccttttactgtcgagcgggccaaggaggccgagcagaacgcaacacgaggaagtacagaggggtccgtacaaagctgtaacgggcttttttggaaagagagctgttcagacataggggggtcctcggcaaacgtgcctgacctgatggacgaattcatcgccgagcgtttgagaagcggcaatgcaagtacgatgaccaggcgcgggtctagcccgggctccctggaaattccaaaagacctgccagatatcctgaataagcagaatcagatgcggcctatagacgacccaggggtgccatccgaatggaccagccccgctagtgctggctcaagcgatctgattagttctgattcccacagcgactccttctctgctttccagtacgatgggcggaagtttgataattttgggttcggtactgacacaggggttacttctagtgcggacgtcgactctggatccggacatcaccaaagtgccgaagaacaggaggttgcttcgctgactaccctccacattgacagtgagacctcatctctgaaccagcaggcattctccgcagaagttgccactattaccggcagcgaatccgcctctcctgtgcattctcccttaggatctagaagtcagaccccctcaccctccaccctcaacatagaccatatggaacagaaagacctacagctggatgagaagctccatcacagcgttttacagactccagacgacctcgagatcagcgagttcccctccgagtgctgctcagtgatggctggaggcacactgactggctggcacgcagatgtagccactgtgatgtggaggcggatgctgggtatcctcggcgacgtaaactcaattatggatccggagattcacgcccaggtgttcgactacctgtgcgagctgtggcagaatcttgccaagatccgggacaacttgggcatttccacagacaaccttactagccccagcccaccagtgcttattccaccactccggattttgacaccctggttattcaaggccacgatgctgaccgacaaatataaacagggtaaacttcacgcatacaaactcatttgcaacacgatgaaacgcaggcaggacgtgtcacccaacagagatttcttgacgcatttttataacatcatgcattgcggcttgctgcacattgatcaggatatcgtcaacacaattattaaacattgttccccccagtttttcagtctcggcctgcctggcgcaactatgctgataatggacttcatagtggctgctggccgtgtggcctcaagcgcctttctgaatgcccctcgcgtggaagcccaagtactactcgggtccctggtgtgcttcccaaacctgtattgtgagctcccttccctccaccctaacattcccgatgtggcagtgtcccagtttactgacgtaaaagaactcatcatcaaaaccgtcctgagctccgcccgagacgagccttccggacccgctaggtgcgttgccctatgctctctaggaatatggatttgtgaggaactggtgcacgagagccaccaccctcagatcaaggaggccctgaatgtgatttgtgtcagccttaaatttactaacaagaccgtcgcccatgtggcatgtaacatgctgcacatgctggtacattacgttccacggcttcagatctatcagcctgatagcccactgaagatcatccaaatcctgatcgctacaattacccacttgttaccatctactgaagccagcagctatgagatggataagcgactggttgtgagcttgctcctatgtctgctcgattggatcatggcgctgcccttgaaaactctcctccagcctttccacgcaacaggcgccgaatcagataaaaccgaaaagagcgtgcttaattgcatctataaagtgcttcatggatgtgtgtatggtgctcagtgcttctccaacccccggtatttccctatgtctctgagtgacctggcttccgtagattatgatccttttatgcatctggagagcctgaaggagcccgagcccctccatagtcctgactcagaaagatctagtaagctacagcctgtgacagaagttaaaacccagatgcagcacgggctcatctcgattgctgcccgcaccgtgatcacccatctggtgaaccatctggggcactaccccatgtccggcggtcctgccatgttgaccagccaggtgtgtgagaaccatgacaatcactattctgaaagcacagaactcagccccgagctattcgagtctccaaatatacaatttttcgtgctgaacaataccacacttgtgtcatgtatacagattcggagcgaggaaaacatgcccggcggaggtctatcagccggcctagcgtccgccaattcaaacgttcggatcattgtgagagatctgtccgggaaatactcctgggacagcgccattctatatggccccccccctgtgagcggtctctctgaaccaacatcttttatgctgtccctgagtcaccaggagaaacctgaggagcctccaacgtccaatgaatgtttggaagatataaccgtgaaggatgggctgtcccttcagttcaaacggttccgcgagactgtcccaacgtgggatactattagagacgaggaggacgttctcgatgagctgctccagtatctgggtgtgacatctccggagtgtcttcagagaacgggcattagcttgaacattcctgcaccacagccagtctgcatcagtgaaaagcaggagaatgatgtaattaatgctatcttaaaacagcacacagaggagaaggaatttgttgagaaacactttaatgacctcaacatgaaggccgtcgagcaagacgagcctatcccccagaagccccagtctgccttctactattgccgactgctgctttctatcctcggcatgaacagctgggataagcgtagaagttttcacctcctcaagaagaacgagaaactgctgcgggaactgcgcaacctggatagcagacagtgtagggaaacccataaaattgccgtgttttacgtggccgaagggcaggaggacaaacacagcatcttgaccaatacaggggggtcacaggcttacgaggactttgtagcaggcttaggatgggaggtgaacctcacaaaccattgcggcttcatggggggtctgcagaaaaacaagagcacaggtcttactaccccatattttgcaacaagtaccgtggaggtgatctttcacgtctccactcggatgccatccgacagtgatgactctctgactaagaaactccggcaccttggaaacgatgaggtgcatattgtgtggtccgagcacacaagagattataggcgcggcatcatcccaaccgagttcggggatgtattgattgtgatctaccccatgaagaaccacatgttcagcatccagataatgaagaagcccgaggtccccttttttggcccccttttcgatggcgctatagtgaatggaaaggttctacctatcatggtgagagcaaccgccatcaacgcttccagggctctgaagtctctgatccccctgtatcagaacttctatgaggagagggcgcggtatctgcagactatcgtgcagcaccacttagagccaaccacgttcgaggattttgctgcgcaagttttctctcctgccccgtatcaccatctcccctcagatgccgatcattag

SEQ ID NO: 103328 - DNA, 6149 bp, Artificial Sequence
  derived and/or modified sequence
atgttttctaagaagccccatggcgacgtaaagaaatctacccaaaaggtgctggacaccaagaaggacgcccttactcgtctgaaacatctgaggatcgtcatcgagaacgctgagtctatagatctgaagcagttctttgaccaacacttttctcacatttactatgtattcttcgaaaactttgtgaccattgaagccagccttaaacagaagggacacaagagtcagcgggaagaattggatgccatcctattcatttttgagaagattctacagctgttgccagaacggatccaccagagatggcaattccattccattggcctcatactcaagaagctgttacataccggaaactccttgaagattcgtcgggagggcgtgcgcctgtttctgctgtggttacaggcactgcaaaacaattgctcgaaagagcaactgtggatgttcagctgtctgattccaggcttttccgccccacagagcgagcacggtcctaggacactggacaacctgatcaatcctccactgaatctgcaggagacccaggtgacaatagaggagatcacccccctggtgcccccacagtccggtgacaaaggccaggaagatctgacctcctattttctcgaagccctgttaaagtacatagtgatccaggtcaaatctctcgaatggaagaataaagagaaccaggagcgtgggtttagcttcctgttctcacactttaagaaatactaccttccatacatattccctaacatatgcaaggagaattcactgtatcacccgattctggacataccgcagatgcgccctaaaccccactacgtggttatcaagaaagacgctgagacaaacgaagccatttactgcacaaaagagcccttcatcaaagcccgagtcatagtgatcagatggctagtttcattttggctcgagccaaaacctcatacgggacctcacatacccggtatggaaggagaggtcctcccaaagaacatccagcgagccgcagcatcattggtatcccgtgaggagtcaaagaacgacaatgcggacaagacagatagaaccactgagccagagcagtctcattccaacacttctacactcacagagagagagcctagctcgtcctcactctgcagcatcgatgaggaacatctgacagatattgagatcgtgcggagggtgtttagttccaagcggagcaatgtgaattttgtaacggagatcttcagacaggcgttcctgctacctatttgcgaggctgcagccatgcgcaaagtggttaaagtctatcaagagtggatccaacaggaagaaaagcctctgttcatgcaggaaccggaggagatcgtcattaccagctccgacctgccctgtatcgagaatgtcacagatcacgatatttcaatggaagagggggagaaacgcgaagaagagaacggaactaacacagcagatcatgtcaggaactcatcctgggccaaaaatggcagctaccagggggcactgcacaatgcatccgaagaggccacagaacagaacatccgtgctggcactcaagccgtgcttcaggtgtttatcatcaattcatccaacatcttcctgctcgaaccggctaatgagattaagaatctgcttgatgaacacaccgatatgtgcaaacgaatcctgaatatctatagatacatggtggtgcaggtgagcatggataagaaaacctgggagcagatgcttctggtgctcctccgcgtcactgaaagtgtgctgaagatgccgtctcaggccttcttacagtttcagggcaaaaagaatatgacattggccggacggttagccggtcctttattccagaccctcatagtagcttggatcaaagctaatctcaacgtgtatatcagtagggaactctgggacgatttgctgtcggttctctcatcactcacatactgggaggagcttgctaccgaatggtctctcaccatggagacgctgaccaaagtgctggccaggaacctctactcactggatttgagcgatcttcctcttgataagttgtccgaacagaagcagaagaagcacaagggtaagggtgtcggtcacgagttccaaaaagttagcgtggacaaaagcttcagccgaggctggagtcgcgaccaacctggccaggcaccgatgaggcaacgctccgcaaccactacaggatctcccggtaccgaaaaggcacgttccatcgtgaggcagaaaactgtcgacattgatgacgcccagatcctgcccaggtcaacccgggtacggcatttttcacagtccgaggaaaccggcaatgaggtgtttggagctctgaatgaggagcagcctctgcccagaagtagttccacgtcagacatcctggagcctttcactgtggagcgggctaaggaagcggagcagaacgccacccgcggaagtaccgagggaagtgttcagtcctgcaacggactgttttggaaggaaagttgtagtgacatagggggatcaagcgctaacgtgcctgatcttatggatgagtttatcgctgagaggctcagaagcggtaatgcgtcaacaatgaccagacgtgggtcatcccctgggtcgctggagatccccaaggacttgccagatattcttaataaacaaaatcagatgaggccaatcgatgatccaggcgtacccagcgagtggacttcccccgcaagtgctgggtccagcgacctcatcagctcggattcccatagcgatagtttttccgcattccagtatgacggcaggaaatttgacaattttgggttcggaacagacaccggtgtaacgtcctctgcagatgtcgattcaggctcgggtcaccaccagtctgccgaagaacaagaagttgcctctctgacaactctgcatattgactccgagaccagcagcttgaaccaacaagcattttcagcagaggttgccactattaccggaagtgaatcggcctctccagttcatagcccactgggatctcggtcacagacccccagcccctctactctgaatattgaccacatggagcagaaagacttgcagttggacgaaaagctgcaccacagtgtactacaaacccctgacgatctcgagatctccgagttcccaagtgaatgttgctctgtgatggcaggcggaactctgaccggatggcatgctgacgtcgcaaccgttatgtggagacgaatgttagggatcctgggtgacgtgaatagcataatggatcctgagatccacgctcaagtgtttgactatctatgcgaactctggcagaatctggccaaaattcgggacaatctcggtatcagcaccgacaacctcacgtctccatcccctccagttcttattcctccattgagaattttaacaccttggttattcaaggctactatgttaaccgataagtacaagcaaggaaagttgcacgcatacaagctcatctgcaatactatgaagcggagacaggacgtctctcccaacagagattttctgactcacttttacaacatcatgcactgcggactcttgcatatagaccaggacattgtgaacaccatcatcaagcactgctctcctcaattttttagcttgggactgccgggtgcaacaatgctaataatggattttatcgttgccgcaggacgtgtcgccagctctgcttttctgaatgcccctcgcgttgaggcccaggtgctgttgggctcactggtatgtttccccaatctctattgcgagctcccctctctccaccccaacatccctgatgtggcagtgtctcagttcacagacgtaaaagaactaattattaagactgtccttagctccgccagagatgagccaagcggccctgcaagatgtgttgccctgtgttcactcggcatttggatctgtgaggagttagttcatgagagccatcaccctcagattaaggaagctctcaacgtgatttgtgtgtctctaaaattcacgaacaaaaccgtggcccatgtggcttgcaacatgctccatatgttggtgcactatgtccctaggctgcagatatatcagcctgactccccacttaagataatacagatcctgatagccaccattactcatttgctacctagcaccgaagcatcgagttatgagatggacaaacgcttggtggtatccttattgctctgcctgctcgactggatcatggccctccccctgaaaactcttttgcagccctttcacgcaaccggggcagagtctgacaaaactgagaaatctgtgttgaactgcatttacaaagttttgcacgggtgcgtgtacggcgctcaatgtttctctaatcccagatatttcccaatgtcgctcagcgacttggcgagcgtggattacgacccattcatgcacctcgagagcctgaaagaaccggagcccctgcattcacctgattccgaaagaagctcgaagctccagccagtgactgaggtgaaaacgcagatgcagcacggcctgatctctatagccgctagaacagtgatcactcacctcgtgaaccatcttggccattaccccatgtccggcggaccggctatgctgacctctcaggtgtgtgagaatcacgataaccactactctgagagtaccgagctgtcgcctgaattgttcgagtcccccaatattcagttcttcgtcctgaataatacgaccctcgtgagctgcatccagatcaggagcgaggaaaatatgcctggcggaggtttatccgccggacttgcatcagctaactccaacgtccgcatcatcgtccgcgatctgagtgggaaatattcatgggactcggcaatcctgtacggaccaccgcctgtgtcaggactatcagagccgacgtcgtttatgttatcactttcacaccaagagaagccggaagagccaccaacgagtaacgagtgcttggaggacatcactgtcaaggacggcctctcattgcagtttaaacgctttcgcgagaccgtccctacttgggacactattagggacgaagaggatgtgctggatgaactgctgcagtatctgggagtcactagtccagagtgcttgcaaagaaccggtatttccttgaatatacccgcaccccagcctgtttgcatttccgaaaagcaggaaaacgatgtcatcaatgccattcttaagcaacacacagaagagaaagaattcgtggaaaagcatttcaacgacctgaatatgaaagcagttgagcaggacgaaccgatccctcagaagccacaatctgcgttttactattgtcgcctcctgctctcaatcctcggtatgaactcctgggacaaacggcgtagtttccacctgctgaagaagaatgagaaattactgcgcgagctgcgtaatctggatagccgccagtgccgcgagactcacaaaatcgcagtcttttacgtcgccgagggccaggaggacaaacatagcattctgaccaataccgggggaagtcaagcttacgaagacttcgttgctgggctggggtgggaggtgaaccttacaaaccactgtggttttatgggcggtcttcagaaaaataagtcaacaggcctgactacaccttactttgctacttccaccgttgaggtgatttttcatgtgtctactcggatgccatccgactcagacgattcactgactaagaagcttcgtcacttagggaacgacgaagtacatatcgtttggtctgagcacactcgggattaccgccgtggcatcatccctacagaatttggagatgtcctcatagtgatctatcctatgaaaaaccacatgttctccattcagatcatgaaaaagcctgaggttccctttttcggccctttgttcgacggtgccattgtcaacggaaaggtcctgccgatcatggtaagagccactgcaattaatgcttcacgcgcactcaagagcttgatccccctgtatcagaacttctacgaagaacgggcaaggtacctccaaaccatcgttcagcaccacctggagccaaccaccttcgaagacttcgcagcacaggttttttccccagccccttaccatcacctaccgtccgacgccgaccacta

SEQ ID NO: 103329 - DNA, 6328 bp, Artificial Sequence
  derived and/or modified sequence
tctggctagtctcctccccgtccactccctccactttctgccgccgggacccggctgggagccggctgtggcagtggcagtggcagtggcagcgacaggatgttctccaagaagccgcacggggacgtgaagaagtccacccagaaggtgctagacaccaagaaggacgcactgactcgcctcaagcacctgcgcatcgtcatcgagaatgcagaatctattgatcttaaacagtttttcgaccaacatttttcacatatatactatgtgttctttgaaaattttgtgactattgaagctagtcttaaacagaaaggtcacaagtctcaaagagaggaattggatgctatactttttatttttgagaaaattttacaacttcttccagaaagaattcatcagcgatggcagtttcatagtattggattgattttaaagaagctacttcacacaggaaactccttaaagattaggcgggaaggtgttcgtcttttcttactatggttgcaagctcttcagaataactgtagcaaagaacagctctggatgttttcatgcttaatccctggattttcagcaccacagtctgaacatggacctcgaactttagataatctcattaatcctccactcaaccttcaagaaactcaagtcactatagaagaaatcactcctcttgtccccccacaatcaggagataaagggcaagaagatctcacaagctattttcttgaagcacttctaaaatacatagtcattcaggtaaaaagtttagaatggaagaacaaagaaaaccaagaaaggggattttcatttttgttttcacattttaagaaatattacttgccttatatttttccaaacatctgtaaggaaaacagtttatatcatcctatacttgacatcccgcagatgagaccaaagccacattatgtcgtgataaagaaagatgctgaaaccaatgaagcaatctattgtacaaaggagcctttcattaaggctcgtgttattgtcattcgttggctggtttctttctggctggagccaaaaccacatacaggacctcatattcctgggatggaaggtgaagtcttgccaaagaatattcagagagcagctgctagtttagtatccagagaagaaagcaaaaatgataatgctgataaaacagacagaactacagaacccgaacagtctcattccaatacaagcactctcacggagcgagaacctagctcatctagtctctgtagtattgatgaagaacatctcacagacattgaaatagttcgcagagttttttcttctaaaaggagtaatgtaaactttgtgacagagatatttcgtcaggcatttttattaccaatttgtgaagcagcagctatgagaaaagtggtaaaagtatatcaagaatggatccaacaagaggaaaaacctttgttcatgcaagagcctgaagaaattgtgatcacttcttcagacctcccttgcattgaaaatgtcacagaccatgatatttcaatggaagaaggagaaaaaagagaagaggaaaatgggaccaatactgctgatcatgttcgaaattccagttgggcaaaaaacggctcctaccaaggtgctcttcataacgcctctgaagaagccacagaacaaaacatacgagctggtacccaggcagttttgcaggtgtttattataaactcatcaaatatatttcttcttgaacctgcaaatgaaataaaaaatcttctggatgaacacacagatatgtgtaaacgcattcttaacatttatcggtacatggttgtacaagtatcaatggacaaaaagacttgggaacagatgctgcttgtgttgctcagagtcacggaatctgtactgaagatgccatcacaagcttttctacagttccaagggaaaaaaaatatgaccttggcaggtcgacttgcaggaccacttttccagacccttatagttgcctggatcaaagcaaacctaaatgtgtacatctcccgagaactttgggatgacttactgtcagtattgtcatcgctgacctattgggaagagttggccactgagtggtcactgactatggagacattaactaaagttttagctaggaatttatatagtttggatctcagtgatttaccattggataagctgagtgaacagaaacaaaaaaagcacaaagggaaaggagttggacatgaatttcagaaagtttcagttgacaagtcattttctagaggatggagtcgtgatcagcctggccaagccccaatgagacagaggagtgcaacaaccactggttctccaggaaccgaaaaggcgaggagtatagtacggcaaaaaactgtcgatattgatgatgctcaaatacttccccgctcaactagagtcagacatttttcacaaagtgaagaaactggaaatgaagtttttggtgctttgaatgaggagcagccattgcctcgaagtagcagcacttctgacatcttggaaccattcactgttgaacgagccaaagaggcagaacagaatgccaccagaggctccactgagggatctgtacagtcatgtaatgggctattttggaaggaaagctgcagtgatattggcggcagcagtgctaatgttcctgatctgatggatgagtttatagcagaacgacttcgaagtggtaatgcctcgactatgacaagaagaggaagtagtccaggcagcctggaaattcccaaagacctccctgatattctaaacaagcagaaccagatgcgccctattgatgacccaggtgtgccctcagaatggacttctcctgccagtgcagggagcagtgatcttatcagctcagatagtcattcggattctttcagcgctttccaatatgatggccgaaaatttgacaattttggctttggaaccgacactggggttacgtcctctgctgatgtggattcaggttctggccatcatcagagtgctgaagagcaggaagtggctagtctaactactcttcatatagattctgaaacaagcagtcttaatcagcaagctttctctgctgaagttgcaactattactggttcagaaagtgcttccccagtccactcacctctgggctccaggtcacagactccttccccttctacattgaatatagatcacatggaacagaaggatctgcagctcgacgagaagctccaccactctgttcttcagacaccagatgatctagaaattagtgaatttccatcagaatgttgtagtgtgatggcaggaggtactctgactggatggcatgctgatgttgctactgtaatgtggcgaagaatgctaggcattttgggagatgtaaattcaatcatggatcctgaaatacatgctcaagtttttgattacctctgtgaactttggcagaatctagctaagattagagataaccttggcatttcaactgataacctgacctccccttctccaccagttttaattcctccactgagaattcttacaccttggctttttaaggcaaccatgttgactgataaatataaacaaggtaaattacatgcatataaacttatttgtaatacaatgaaaagaagacaagatgtttctccaaatagagattttctaacacatttctacaatataatgcattgtggattacttcatattgaccaggatattgtcaatacaatcatcaaacactgctcacctcaatttttttcacttggtttgcctggtgccacaatgcttattatggattttattgtagcagctggtagagtggcttcttcagcttttctcaatgcaccaagagtagaagcacaagttcttctgggatctttggtttgctttcccaacttatattgtgaactgccttctcttcatcccaacattcctgatgttgctgtgtctcagtttacagatgttaaggaacttataatcaaaactgtattaagctcggcaagagatgagccctctggtcctgcacgatgtgtagcactttgtagtttaggtatttggatttgtgaagaactagtccatgagtctcatcatcctcaaattaaggaagctctgaatgtgatttgtgtttccttaaagtttactaataaaacagtagcccacgtagcttgtaacatgcttcacatgctggttcattatgtacctagacttcagatttaccagcctgattctcccttgaaaattattcaaatcctaatagctaccatcacccatcttttaccaagtacagaggcttcatcttatgaaatggacaagaggttggtagtatctttacttctctgccttctggactggatcatggccttacctctaaagacactgctccaaccatttcatgctacgggagcagaaagcgataaaacagaaaaatctgttctcaattgcatttataaggttttacatgggtgtgtttatggagctcagtgttttagcaatccaaggtattttcccatgagcctctctgatttggcatctgtagattatgatccttttatgcatttggaaagtctgaaagagcctgagcctctgcactctcctgactcagaacgatcttctaaactccagccagtaacagaagtgaaaactcaaatgcagcatggattaatctctatagcagcccgcactgttattacacatctggtaaatcacctgggccattatccaatgagcggtggtcctgctatgctaacaagtcaggtgtgtgaaaatcacgacaatcattacagtgaaagtactgaactttctcctgaactctttgagagtccaaatatccagttctttgtgttaaataatacaaccttagtgtcctgtatccagatcagatcagaagagaatatgcctggaggaggtttatctgctggccttgcatcagccaattcaaatgtcagaatcatagtacgtgatctctctggaaaatattcatgggattctgctatactgtatggcccacctcctgtaagtggcttgtcagaacctacatctttcatgctttcattgtctcaccaagagaagccagaagagcctccgacatctaatgaatgcttagaagatataaccgtaaaagatggactttctctccagtttaaaagatttagagaaactgtaccaacttgggatacaataagagatgaagaagatgttcttgatgagctcttgcagtatttgggtgttactagtcctgaatgcttacagagaactggaatctcacttaatattcctgctccacaacctgtgtgcatttctgaaaaacaagaaaatgatgttattaatgctatccttaagcaacatacagaagaaaaagaatttgttgagaagcactttaatgacttaaacatgaaagctgtggaacaagatgaaccaatacctcaaaaacctcagtcagcattttattattgcagattgcttcttagtatattgggaatgaattcctgggacaaacggaggagctttcatctcctgaagaaaaatgaaaagctacttagagaacttaggaacttggattcaaggcagtgccgagagacacacaagattgcagtattttatgttgctgaaggacaagaagacaaacactccattctcaccaatacaggaggaagtcaagcatatgaagattttgtagctggtcttggttgggaggtaaatcttacaaaccattgtggttttatgggaggactacaaaaaaacaaaagcactggattgaccactccatattttgctacctctacagtagaggtaatatttcacgtgtcaacaagaatgccttctgattctgatgattctttgaccaaaaaattgagacatttgggaaatgatgaagtgcacattgtttggtcagagcatactagagactacaggagaggaattattcccacagaatttggtgatgtccttattgtaatatatccaatgaaaaatcacatgttcagtattcagataatgaaaaaaccagaggttcccttctttggtcccctttttgatggtgctattgtgaatggaaaggttctacccattatggttagagcaacagctataaatgcaagccgtgctctgaaatctctgattccattgtatcaaaacttctatgaggagagagcacgatacctgcaaacaattgtccagcaccacttagaaccaacaacatttgaagattttgcagcacaggttttttctccagctccctaccaccatttaccatctgatgccgatcattaaatatcagttctgtttatctgaaggctcctacccagagattctacccagtgaaactcccacagcaacgcaggtagatggg

SEQ ID NO: 103330 - DNA, 6150 bp, Artificial Sequence
  derived and/or modified sequence
atgttcagcaagaagccccacggcgacgtgaagaagagcacccagaaggtgctggacaccaagaaggacgccctgaccagactgaagcacctgagaatcgtgatcgagaacgccgagagcatcgacctgaagcagttcttcgaccagcacttcagccacatctactacgtgttcttcgagaacttcgtgaccatcgaggccagcctgaagcagaagggccacaagagccagagagaggagctggacgccatcctgttcatcttcgagaagatcctgcagctgctgcccgagagaatccaccagagatggcagttccacagcatcggcctgatcctgaagaagctgctgcacaccggcaacagcctgaagatcagaagagagggcgtgagactgttcctgctgtggctgcaggccctgcagaacaactgcagcaaggagcagctgtggatgttcagctgcctgatccccggcttcagcgccccccagagcgagcacggccccagaaccctggacaacctgatcaacccccccctgaacctgcaggagacccaggtgaccatcgaggagatcacccccctggtgcccccccagagcggcgacaagggccaggaggacctgaccagctacttcctggaggccctgctgaagtacatcgtgatccaggtgaagagcctggagtggaagaacaaggagaaccaggagagaggcttcagcttcctgttcagccacttcaagaagtactacctgccctacatcttccccaacatctgcaaggagaacagcctgtaccaccccatcctggacatcccccagatgagacccaagccccactacgtggtgatcaagaaggacgccgagaccaacgaggccatctactgcaccaaggagcccttcatcaaggccagagtgatcgtgatcagatggctggtgagcttctggctggagcccaagccccacaccggcccccacatccccggcatggagggcgaggtgctgcccaagaacatccagagagccgccgccagcctggtgagcagagaggagagcaagaacgacaacgccgacaagaccgacagaaccaccgagcccgagcagagccacagcaacaccagcaccctgaccgagagagagcccagcagcagcagcctgtgcagcatcgacgaggagcacctgaccgacatcgagatcgtgagaagagtgttcagcagcaagagaagcaacgtgaacttcgtgaccgagatcttcagacaggccttcctgctgcccatctgcgaggccgccgccatgagaaaggtggtgaaggtgtaccaggagtggatccagcaggaggagaagcccctgttcatgcaggagcccgaggagatcgtgatcaccagcagcgacctgccctgcatcgagaacgtgaccgaccacgacatcagcatggaggagggcgagaagagagaggaggagaacggcaccaacaccgccgaccacgtgagaaacagcagctgggccaagaacggcagctaccagggcgccctgcacaacgccagcgaggaggccaccgagcagaacatcagagccggcacccaggccgtgctgcaggtgttcatcatcaacagcagcaacatcttcctgctggagcccgccaacgagatcaagaacctgctggacgagcacaccgacatgtgcaagagaatcctgaacatctacagatacatggtggtgcaggtgagcatggacaagaagacctgggagcagatgctgctggtgctgctgagagtgaccgagagcgtgctgaagatgcccagccaggccttcctgcagttccagggcaagaagaacatgaccctggccggcagactggccggccccctgttccagaccctgatcgtggcctggatcaaggccaacctgaacgtgtacatcagcagagagctgtgggacgacctgctgagcgtgctgagcagcctgacctactgggaggagctggccaccgagtggagcctgaccatggagaccctgaccaaggtgctggccagaaacctgtacagcctggacctgagcgacctgcccctggacaagctgagcgagcagaagcagaagaagcacaagggcaagggcgtgggccacgagttccagaaggtgagcgtggacaagagcttcagcagaggctggagcagagaccagcccggccaggcccccatgagacagagaagcgccaccaccaccggcagccccggcaccgagaaggccagaagcatcgtgagacagaagaccgtggacatcgacgacgcccagatcctgcccagaagcaccagagtgagacacttcagccagagcgaggagaccggcaacgaggtgttcggcgccctgaacgaggagcagcccctgcccagaagcagcagcaccagcgacatcctggagcccttcaccgtggagagagccaaggaggccgagcagaacgccaccagaggcagcaccgagggcagcgtgcagagctgcaacggcctgttctggaaggagagctgcagcgacatcggcggcagcagcgccaacgtgcccgacctgatggacgagttcatcgccgagagactgagaagcggcaacgccagcaccatgaccagaagaggcagcagccccggcagcctggagatccccaaggacctgcccgacatcctgaacaagcagaaccagatgagacccatcgacgaccccggcgtgcccagcgagtggaccagccccgccagcgccggcagcagcgacctgatcagcagcgacagccacagcgacagcttcagcgccttccagtacgacggcagaaagttcgacaacttcggcttcggcaccgacaccggcgtgaccagcagcgccgacgtggacagcggcagcggccaccaccagagcgccgaggagcaggaggtggccagcctgaccaccctgcacatcgacagcgagaccagcagcctgaaccagcaggccttcagcgccgaggtggccaccatcaccggcagcgagagcgccagccccgtgcacagccccctgggcagcagaagccagacccccagccccagcaccctgaacatcgaccacatggagcagaaggacctgcagctggacgagaagctgcaccacagcgtgctgcagacccccgacgacctggagatcagcgagttccccagcgagtgctgcagcgtgatggccggcggcaccctgaccggctggcacgccgacgtggccaccgtgatgtggagaagaatgctgggcatcctgggcgacgtgaacagcatcatggaccccgagatccacgcccaggtgttcgactacctgtgcgagctgtggcagaacctggccaagatcagagacaacctgggcatcagcaccgacaacctgaccagccccagcccccccgtgctgatcccccccctgagaatcctgaccccctggctgttcaaggccaccatgctgaccgacaagtacaagcagggcaagctgcacgcctacaagctgatctgcaacaccatgaagagaagacaggacgtgagccccaacagagacttcctgacccacttctacaacatcatgcactgcggcctgctgcacatcgaccaggacatcgtgaacaccatcatcaagcactgcagcccccagttcttcagcctgggcctgcccggcgccaccatgctgatcatggacttcatcgtggccgccggcagagtggccagcagcgccttcctgaacgcccccagagtggaggcccaggtgctgctgggcagcctggtgtgcttccccaacctgtactgcgagctgcccagcctgcaccccaacatccccgacgtggccgtgagccagttcaccgacgtgaaggagctgatcatcaagaccgtgctgagcagcgccagagacgagcccagcggccccgccagatgcgtggccctgtgcagcctgggcatctggatctgcgaggagctggtgcacgagagccaccacccccagatcaaggaggccctgaacgtgatctgcgtgagcctgaagttcaccaacaagaccgtggcccacgtggcctgcaacatgctgcacatgctggtgcactacgtgcccagactgcagatctaccagcccgacagccccctgaagatcatccagatcctgatcgccaccatcacccacctgctgcccagcaccgaggccagcagctacgagatggacaagagactggtggtgagcctgctgctgtgcctgctggactggatcatggccctgcccctgaagaccctgctgcagcccttccacgccaccggcgccgagagcgacaagaccgagaagagcgtgctgaactgcatctacaaggtgctgcacggctgcgtgtacggcgcccagtgcttcagcaaccccagatacttccccatgagcctgagcgacctggccagcgtggactacgaccccttcatgcacctggagagcctgaaggagcccgagcccctgcacagccccgacagcgagagaagcagcaagctgcagcccgtgaccgaggtgaagacccagatgcagcacggcctgatcagcatcgccgccagaaccgtgatcacccacctggtgaaccacctgggccactaccccatgagcggcggccccgccatgctgaccagccaggtgtgcgagaaccacgacaaccactacagcgagagcaccgagctgagccccgagctgttcgagagccccaacatccagttcttcgtgctgaacaacaccaccctggtgagctgcatccagatcagaagcgaggagaacatgcccggcggcggcctgagcgccggcctggccagcgccaacagcaacgtgagaatcatcgtgagagacctgagcggcaagtacagctgggacagcgccatcctgtacggccccccccccgtgagcggcctgagcgagcccaccagcttcatgctgagcctgagccaccaggagaagcccgaggagccccccaccagcaacgagtgcctggaggacatcaccgtgaaggacggcctgagcctgcagttcaagagattcagagagaccgtgcccacctgggacaccatcagagacgaggaggacgtgctggacgagctgctgcagtacctgggcgtgaccagccccgagtgcctgcagagaaccggcatcagcctgaacatccccgccccccagcccgtgtgcatcagcgagaagcaggagaacgacgtgatcaacgccatcctgaagcagcacaccgaggagaaggagttcgtggagaagcacttcaacgacctgaacatgaaggccgtggagcaggacgagcccatcccccagaagccccagagcgccttctactactgcagactgctgctgagcatcctgggcatgaacagctgggacaagagaagaagcttccacctgctgaagaagaacgagaagctgctgagagagctgagaaacctggacagcagacagtgcagagagacccacaagatcgccgtgttctacgtggccgagggccaggaggacaagcacagcatcctgaccaacaccggcggcagccaggcctacgaggacttcgtggccggcctgggctgggaggtgaacctgaccaaccactgcggcttcatgggcggcctgcagaagaacaagagcaccggcctgaccaccccctacttcgccaccagcaccgtggaggtgatcttccacgtgagcaccagaatgcccagcgacagcgacgacagcctgaccaagaagctgagacacctgggcaacgacgaggtgcacatcgtgtggagcgagcacaccagagactacagaagaggcatcatccccaccgagttcggcgacgtgctgatcgtgatctaccccatgaagaaccacatgttcagcatccagatcatgaagaagcccgaggtgcccttcttcggccccctgttcgacggcgccatcgtgaacggcaaggtgctgcccatcatggtgagagccaccgccatcaacgccagcagagccctgaagagcctgatccccctgtaccagaacttctacgaggagagagccagatacctgcagaccatcgtgcagcaccacctggagcccaccaccttcgaggacttcgccgcccaggtgttcagccccgccccctaccaccacctgcccagcgacgccgaccactag

SEQ ID NO: 103331 - protein, 2083 aa, Artificial Sequence
  derived and/or modified sequence
MFSKKPHGDVKKSTQKVLDTKKDALTRLKHLRIVIENAESIDLKQFFDQHFSHIYYVFFENFVTIEASLKQKGHKSQREELDAILFIFEKILQLLPERIHQRWQFHSIGLILKKLLHTGNSLKIRREGVRLFLLWLQALQNNCSKEQLWMFSCLIPGFSAPQSEHGPRTLDNLINPPLNLQETQVTIEEITPLVPPQSGDKGQEDLTSYFLEALLKYIVIQVKSLEWKNKENQERGFSFLFSHFKKYYLPYIFPNICKENSLYHPILDIPQMRPKPHYVVIKKDAETNEAIYCTKEPFIKARVIVIRWLVSFWLEPKPHTGPHIPGMEGEVLPKNIQRAAASLVSREESKNDNADKTDRTTEPEQSHSNTSTLTEREPSSSSLCSIDEEHLTDIEIVRRVFSSKRSNVNFVTEIFRQAFLLPICEAAAMRKVVKVYQEWIQQEEKPLFMQEPEEIVITSSDLPCIENVTDHDISMEEGEKREEENGTNTADHVRNSSWAKNGSYQGALHNASEEATEQNIRAGTQAVLQVFIINSSNIFLLEPANEIKNLLDEHTDMCKRILNIYRYMVVQVSMDKKTWEQMLLVLLRVTESVLKMPSQAFLQFQGKKNMTLAGRLAGPLFQTLIVAWIKANLNVYISRELWDDLLSVLSSLTYWEELATEWSLTMETLTKVLARNLYSLDLSDLPLDKLSEQKQKKHKGKGVGHEFQKVSVDKSFSRGWSRDQPGQAPMRQRSATTTGSPGTEKARSIVRQKTVAMRSRSIGECALPSAYIRSAKSAPVLIHTSKPFLPDIVLTPLSDELSDIDDAQILPRSTRVRHFSQSEETGNEVFGALNEEQPLPRSSSTSDILEPFTVERAKVNKEDMSQKLPPLNSDIGGSSANVPDLMDEFIAERLRSGNASTMTRRGSSPGSLEIPKDLPDILNKQNQMRPIDDPGVPSEWTSPASAGSSDLISSDSHSDSFSAFQYDGRKFDNFGFGTDTGVTSSADVDSGSGHHQSAEEQEVASLTTLHIDSETSSLNQQAFSAEVATITGSESASPVHSPLGSRSQTPSPSTLNIDHMEQKDLQLDEKLHHSVLQTPDDLEISEFPSECCSVMAGGTLTGWHADVATVMWRRMLGILGDVNSIMDPEIHAQVFDYLCELWQNLAKIRDNLGISTDNLTSPSPPVLIPPLRILTPWLFKATMLTDKYKQGKLHAYKLICNTMKRRQDVSPNRDFLTHFYNIMHCGLLHIDQDIVNTIIKHCSPQFFSLGLPGATMLIMDFIVAAGRVASSAFLNAPRVEAQVLLGSLVCFPNLYCELPSLHPNIPDVAVSQFTDVKELIIKTVLSSARDEPSGPARCVALCSLGIWICEELVHESHHPQIKEALNVICVSLKFTNKTVAHVACNMLHMLVHYVPRLQIYQPDSPLKIIQILIATITHLLPSTEASSYEMDKRLVVSLLLCLLDWIMALPLKTLLQPFHATGAESDKTEKSVLNCIYKVLHGCVYGAQCFSNPRYFPMSLSDLASVDYDPFMHLESLKEPEPLHSPDSERSSKLQPVTEVKTQMQHGLISIAARTVITHLVNHLGHYPMSGGPAMLTSQVCENHDNHYSESTELSPELFESPNIQFFVLNNTTLVSCIQIRSEENMPGGGLSAGLASANSNVRIIVRDLSGKYSWDSAILYGPPPVSGLSEPTSFMLSLSHQEKPEEPPTSNECLEDITVKDGLSLQFKRFRETVPTWDTIRDEEDVLDELLQYLGVTSPECLQRTGISLNIPAPQPVCISEKQENDVINAILKQHTEEKEFVEKHFNDLNMKAVEQDEPIPQKPQSAFYYCRLLLSILGMNSWDKRRSFHLLKKNEKLLRELRNLDSRQCRETHKIAVFYVAEGQEDKHSILTNTGGSQAYEDFVAGLGWEVNLTNHCGFMGGLQKNKSTGLTTPYFATSTVEVIFHVSTRMPSDSDDSLTKKLRHLGNDEVHIVWSEHTRDYRRGIIPTEFGDVLIVIYPMKNHMFSIQIMKKPEVPFFGPLFDGAIVNGKVLPIMVRATAINASRALKSLIPLYQNFYEERARYLQTIVQHHLEPTTFEDFAAQVFSPAPYHHLPSDADH

SEQ ID NO: 103332 - DNA, 6252 bp, Artificial Sequence
  derived and/or modified sequence
atgttctccaaaaagccgcatggtgatgttaaaaagtccacgcagaaagtactggatacaaagaaggacgcgcttacccgactgaaacacctgcgtatagtgattgaaaatgctgagtccatagatctcaaacagttcttcgaccagcatttttcccatatttactacgttttcttcgagaactttgtcaccatagaggcctccttaaagcaaaaggggcataagtctcaacgggaagagctagacgcaattctgttcatattcgagaaaatcctccaattgctgccagaacgaatccaccaaagatggcaattccattctatcggcctgatcctcaagaagctgctgcatacaggcaacagtttgaagatccgtcgcgaaggagtgcgcctatttctgctgtggctccaagccttgcagaataattgttccaaagaacagctgtggatgttttcttgcttgatcccgggcttctccgcccctcagtctgagcacggccctcggaccctggacaaccttattaaccctcctctgaaccttcaggaaacgcaagtaacaatcgaagagattaccccgttagttccgcctcagagtggcgacaagggacaggaagacctgacaagctactttctcgaagccctactgaagtatattgtcatccaggtgaaaagcctcgaatggaaaaataaagaaaatcaggaacgagggttctcatttttattttcccacttcaagaaatattacctgccctacatattccccaatatctgcaaagagaactctctgtaccatccgatcctggacattccccagatgcgacccaagccccattatgtcgtaatcaagaaagacgctgagaccaatgaggcaatttactgcaccaaagaaccctttattaaggcacgagtgattgtcataagatggctggttagcttctggctcgagcctaagccacacaccgggccccacatccctggcatggagggtgaagtactgccaaagaacatacagcgagcggcagcctcacttgtcagtcgcgaggaaagcaagaatgataacgcagacaaaaccgaccgtaccacggagcctgaacaaagccattctaatacctcaaccctaacggagagggaaccttcttcatcaagcctctgtagcattgacgaggagcaccttacagatatcgagatcgtccgacgggttttctcttccaaaagaagcaacgtgaatttcgtgaccgaaatcttcagacaggcctttctgctcccaatctgcgaggccgcggcaatgcgcaaagtagtgaaagtttaccaggagtggatccaacaggaagaaaaacccctgttcatgcaggagcccgaggaaattgtgatcaccagttccgaccttccatgtatcgagaatgttacagatcacgatatctccatggaagaaggtgagaaaagagaggaggagaacggtacaaacactgccgatcacgtgcgaaatagcagttgggccaaaaacggatcctaccagggcgcactacacaatgcgagtgaggaggctacagagcagaacatcagggccggaactcaggcagttttgcaagtgttcatcattaatagctccaatatcttcctgttagagcccgccaacgaaattaagaacctgttggatgagcacaccgatatgtgtaaaaggattctgaacatttacaggtacatggtggttcaggtctcaatggataagaaaacctgggagcagatgctcctggtgctgctgagggtgaccgaatcagtcctcaaaatgccgtcccaggcctttctgcagtttcaagggaaaaagaacatgactctggcggggcggcttgctgggccattgtttcagacactaatcgtggcgtggatcaaagctaaccttaatgtgtacatatcaagagagctgtgggatgacttgctcagtgtgctgagttcacttacatactgggaagaattggccacagagtggagccttacaatggagactttgacgaaagtgctggcccgaaacctgtatagcctcgacttaagcgatctcccattggataaactgtcagaacagaaacaaaaaaagcacaagggcaaaggcgtgggccacgaatttcagaaggtgtccgtggacaaatcattctcacggggttggtctcgcgatcaacctggacaggcccccatgcgccagagaagcgccacaactaccggaagccctggaaccgagaaggccagatctatagtccgccagaaaacggtagcaatgcgaagccggagcataggagagtgcgccctgcccagcgcgtacatccgatccgctaagagcgctccagtgctgattcacaccagtaaaccgttcctgcccgatatcgtcctgactccattgtcagacgagctgtctgacatcgacgatgctcaaattctgccacggtcaaccagagtgagacacttcagccaaagcgaagaaaccggtaatgaagtgttcggggcactgaatgaggagcagcctttaccccggagcagtagtacgtccgacatcctggagccattcactgttgaacgagcaaaagtcaacaaggaggatatgagtcagaagctgccaccactgaattctgacatcgggggaagttcagctaacgtgcctgacctcatggatgagttcatcgcggagcgcctgcgtagtggaaacgcctccacaatgactcggcggggctcttctccaggatccttagagattccaaaggacctccccgacatcttaaacaagcagaaccagatgaggccaatcgatgacccgggcgtcccctctgagtggaccagtccagcctcagccggaagtagtgatctgatttcatccgactcacactcggactccttcagtgcttttcagtacgatggccgaaaattcgacaactttggctttggtacagacaccggagtgacctcctcagctgatgtcgacagcggttccggccatcaccagagcgcagaagagcaagaggtggccagtctaactaccctgcatatcgactctgaaacgtccagtctcaaccagcaggcatttagtgcagaagttgccactataaccgggtctgaaagcgcctctccggtgcatagtcctctcggctctcggagccaaacacccagtcccagtacactgaatattgatcacatggagcagaaagatctgcaattggacgagaaactgcatcattctgtcttgcagacacctgatgatttggagatttcagagttcccttctgagtgctgttctgtgatggccgggggcacattaacaggttggcacgctgacgtggccaccgtgatgtggaggcggatgctaggcatcctgggagacgtgaactcaataatggaccctgagattcatgctcaggtgtttgattatctttgcgaattgtggcagaatttagccaaaataagggacaacctgggaataagcactgataacttgacatcaccctcacctcctgtcctgataccacctttacgcattctgactccgtggctatttaaagctacaatgttgacagataagtataaacagggtaagctgcatgcctataaacttatatgtaataccatgaagcgccggcaggacgtttcccccaatagggacttcttgacacacttctataatattatgcactgcggtctcctgcacatcgatcaggacatagtcaacacaatcatcaagcactgctcacctcagttcttctctctcgggctgccaggagctactatgctgatcatggacttcatcgtggccgccgggagggtcgcatcttcagcctttcttaacgctcctagggtagaagcacaggtgctgctcgggtccctggtgtgcttccccaacttatactgcgagctgccctccctgcacccaaacatccctgacgtcgcggtgtcacaatttaccgatgtgaaggagctcataataaaaacggtcctttccagtgctcgggatgaaccaagcggtccggctcgttgcgttgccctatgttcccttggaatttggatctgtgaagagctagttcacgagtcccatcacccccagatcaaggaagcgcttaatgtgatttgtgtctccctaaaattcaccaataagaccgtcgcccatgtcgcgtgtaacatgctgcatatgcttgtgcattacgtgcctaggctccagatttaccagcctgattccccgctgaaaatcatccagattctgattgccaccattacgcacctccttccctccacggaggcttcctcatacgagatggacaagagacttgtagtgtcactgctgttgtgtttgttagactggattatggcactgcccctcaaaaccttgctgcagccttttcacgccactggggcagagtcagacaaaaccgagaaaagcgtgttaaactgcatctacaaagtgctgcacggatgtgtgtatggagcacagtgctttagcaatccccggtatttccccatgtccctgagtgaccttgcgagtgtggactacgatccattcatgcatcttgagtccttgaaagagccagaacccctgcactcgcccgatagtgagagatcaagcaagttacagccagttaccgaggtcaaaacgcagatgcaacatggcctaatttcaatagcagcccgtaccgtaatcacgcatctcgtgaaccatctaggacactacccaatgagtggtggacctgccatgttgacgagccaggtttgcgagaaccacgataatcattactctgagtctactgagctgagcccagagctgtttgagtctcccaacatacaattttttgtgcttaacaatactaccctggtaagctgtatacagatcaggagcgaagagaacatgcccggaggtggtttgtccgccgggcttgcaagtgctaactcgaacgtgcgcattatagtcagggacctgtccggtaagtactcatgggactccgctatcctgtacggacctccaccggttagtggacttagcgagcctacttcatttatgctgtctctgtctcatcaggagaagccagaagaaccccctaccagcaatgaatgcctggaggacatcacagtaaaagacggccttagcctgcaattcaagaggtttagggaaacggttcctacctgggacacaattagagatgaggaggatgtcctcgatgagctacttcagtatctgggtgttacatcccccgaatgtctccaacgcaccggaatctcgcttaacatccctgctccccagcccgtgtgtatcagtgagaaacaagagaatgatgttattaacgcaatcctaaaacagcacaccgaagagaaggaatttgtggaaaaacacttcaatgatctgaatatgaaggctgttgagcaggacgaaccaatcccacagaagccacagtccgcattttattactgtcgtctgctactttctattctgggcatgaacagctgggacaagcgtaggagttttcacttactcaaaaaaaacgaaaagctgttacgcgagctccgcaacctcgattccaggcagtgcagggagactcataaaatagccgttttctatgttgcagaaggtcaggaggataaacacagtatcctcactaacactggggggtcacaggcttacgaagatttcgttgccgggctcggttgggaggtgaacctgacaaaccattgtggattcatgggggggctgcagaagaacaagagcactgggctcaccaccccgtactttgcgacatccacagtcgaggttatttttcacgtatctacgcgcatgcccagcgacagcgatgactccctgacaaagaagctccggcatttaggtaacgacgaagtccacatcgtgtggtcagagcataccagagattataggagaggcattattccaacagagttcggagacgtgctgattgtaatctatcctatgaagaatcatatgttcagcatccaaatcatgaaaaaacctgaggtgcctttcttcggaccactgtttgacggggcgatcgtgaacggcaaggtcctccctatcatggtccgggctacagcgatcaacgccagcagagcactgaaatccttgatcccactgtatcagaacttctatgaagaaagagcccgatacttgcagaccatagtccaacaccatttggagcccacaacgtttgaggattttgctgctcaggtcttcagtcctgctccttaccatcacttaccttccgatgccgaccactag

SEQ ID NO: 103333 - DNA, 6252 bp, Artificial Sequence
  derived and/or modified sequence
atgttttccaagaaacctcatggcgacgttaagaagtccacccagaaagtcctggacaccaaaaaagatgccctgacacgcctgaagcacctgagaatcgtgattgagaatgctgagagcatagacctgaaacagtttttcgaccagcacttctctcatatttattatgtgtttttcgaaaactttgtcaccattgaggcaagcctcaagcagaaggggcataaaagtcagcgggaggaacttgatgcgatactgtttatctttgaaaagatcctgcagcttctgcccgagagaatccatcagagatggcagtttcattccatcggattgattctcaagaaactgcttcacaccggaaactccctgaagattaggagggagggcgtccggctttttcttctgtggctccaagccctgcagaataactgttctaaagaacagctgtggatgttctcctgcttgatccctggtttctctgcgccacagagtgaacacgggcccaggaccctggacaatctcattaatccacccctgaacctgcaggaaactcaggtgacaatcgaagaaatcactccactcgtgccccctcaaagcggcgataagggacaggaggacctgacatcatacttccttgaagcccttctgaagtacatcgttattcaggttaagtctttggaatggaagaataaggagaaccaggagcgtggattctctttcctgttctcacatttcaagaagtactacttgccctacatttttccgaacatttgcaaggagaactccctgtaccacccgatactggatatacctcagatgaggcctaagccacattatgtagtgataaagaaagacgcagaaaccaacgaggctatatattgcacgaaggaacccttcattaaggccagggtcattgtgattcgctggctggtctcattttggctggagccaaaaccgcacacagggccccacatacccggaatggagggcgaagtcttaccgaagaatatccaacgcgcagccgcttccctggttagccgagaggagtccaaaaacgataacgctgacaagacagatcgcactactgagccagagcagagccactccaacacgagcacacttacagaaagggaaccatcatctagcagtctgtgttcaattgatgaggaacatctgaccgatatagaaatagtcaggagagtgttcagttctaagcgcagcaacgtgaacttcgtgacggagatctttaggcaggcattcttattgccaatctgcgaggccgctgctatgcgcaaagttgtgaaggtttatcaggagtggattcagcaagaggaaaagcccctgttcatgcaggagccggaagaaattgtgatcacatcttctgacctcccatgcatcgaaaacgtcacagatcatgacatatcaatggaagagggagagaagagagaggaggaaaacggtacaaacacggccgaccatgttcggaattcttcctgggcaaaaaacggctcctatcagggagccctacataatgccagcgaggaagctaccgagcagaacattagggccggcacccaagccgtgcttcaggtcttcatcataaatagctctaatatctttctgctggagcctgccaatgaaattaaaaatctccttgacgagcataccgacatgtgcaagagaatcctgaatatttaccggtatatggtcgtgcaggtctctatggataagaagacctgggaacaaatgctcctggtgctgttgagagtgactgagagcgtgctgaaaatgccttctcaagccttcctgcagtttcaaggcaagaagaacatgaccctggctgggcgattagccgggcctttatttcagacgctcattgtggcctggatcaaggccaacctgaatgtgtacatttctagggaactttgggacgatctgctctctgtgttatctagtctgacgtattgggaggaactggccacggagtggtctctgactatggaaactcttactaaggtgcttgcccgcaacctctactcactggacctaagtgacctgcccttggacaaactgtcggagcaaaagcaaaagaagcataagggtaaaggtgtcggtcacgaatttcaaaaggtgagcgtggataagtccttttcaaggggctggtcccgggatcaacctggccaggctccaatgcgccagcggagtgcaaccacaacggggagtccagggaccgagaaagctcgttcaattgtgcggcagaagaccgttgcaatgcgttcaagaagtattggagaatgtgccctgcctagtgcctacatccgatccgcaaagagcgccccagtcctgattcacacctccaagccctttctaccagatatagtgctcacaccactttctgacgagctgtccgatatcgacgacgctcagattctaccccgcagtaccagggtgcgtcactttagccagtccgaggaaacaggcaatgaggtattcggcgctctgaacgaggaacagccacttccacgctcaagcagcacttccgatatcctagaaccctttacggtggaacgggcaaaggtcaacaaggaggatatgagtcagaagctgccacccctgaattctgatatcggtgggtcatctgcaaacgtgcccgacctgatggacgaatttatcgcggagcgcctccgctccggcaacgcctccactatgacccgccggggcagtagccccggctctctcgaaatccccaaggatttaccagatatactgaataaacagaaccagatgcgccctatagatgaccccggagtgccgtcagagtggacgagtcccgcatccgcgggatcgtcagatctcatctccagtgactcgcatagcgattctttctccgcgttccagtatgacggtcgcaagttcgataattttggtttcggaactgacacaggagttacctctagcgccgatgttgacagtggatccggtcatcaccagagtgccgaggagcaagaggtggctagcctcacaacgctccatattgatagtgaaacttcttccctgaatcagcaggcgttctccgctgaagttgccacaattacagggtcagaatcagcttccccagtacactcgccactcggcagccggtcacagacaccaagcccctctactctgaatattgaccacatggaacaaaaagatctgcagttggacgaaaaactccaccacagcgtgctgcagaccccggacgatttagaaatatctgaatttccttctgaatgttgtagtgtcatggccgggggaaccctaacagggtggcacgccgacgttgctaccgtaatgtggagacgaatgctggggattttgggtgacgtaaatagcatcatggatccagagatccacgctcaggtgtttgattacctctgtgagctgtggcagaatctggctaaaattagggacaacctaggcattagcacagataatttgactagtccctccccccccgtcctcatacctccccttcgaattttgaccccttggttgtttaaggctaccatgctcaccgacaagtataaacaggggaaactgcatgcgtataagctcatctgcaataccatgaaacggagacaagatgtttcgcccaatcgggactttctgacacacttttataatattatgcactgtggactcctgcatattgatcaagacatcgtgaatacgattattaagcattgcagcccacagttcttctctttgggtctcccaggagcaacgatgctaatcatggactttattgttgctgcaggacgagttgcttctagcgccttcctgaatgcgccccgcgttgaagcccaggtactcctcggatctctggtgtgcttccccaacctgtattgcgagttgccctccctccaccctaacattcctgatgttgccgtctcacagtttacggacgttaaggaattgataattaagacagtcctgagctcagccagagacgagcccagcggaccagcccggtgtgtcgcactttgcagccttggcatctggatttgtgaagagctggtgcacgaatcccatcatccgcagattaaggaagccctcaacgtgatttgcgtgtctctgaaattcaccaataaaactgtggcacacgtggcctgtaatatgctgcacatgctggtgcattatgtgccccgcttacagatctatcagcctgactctcccctaaagatcatccagattctcatagcaaccattacccacctgttgccatccaccgaagcatcctcatatgagatggacaagaggctcgttgtttctcttctgctctgcctactggactggatcatggcccttccattgaaaaccctccttcagccctttcatgccaccggggccgagagtgataaaaccgagaaaagtgtcctgaattgcatttataaggttctgcacggctgtgtgtacggagcgcagtgtttctctaacccgaggtacttccctatgagtctcagtgacttagcctcagtggactatgaccctttcatgcacctggaatcactgaaggagcctgagcccttgcattcccccgacagcgagaggtcctctaaactgcagcccgtcaccgaagtcaagacacaaatgcagcatggcttgatctcaatagccgctcgtaccgtgatcacccatctggttaaccacctcggccactatccaatgtctggtggtccagccatgctgacaagccaggtatgcgagaaccacgataaccactactcagagtccacggagttatccccggaacttttcgagagccctaatattcagttttttgtacttaacaacaccacacttgtgtcctgtattcagattcgtagcgaggaaaatatgccaggtggtggactgagcgctgggctggcatctgccaattcgaacgtaaggatcatagttcgggacctgagcggcaagtacagctgggactctgctatcttatacggaccgcccccggtgtccggtctaagtgagcccacctcattcatgctcagcctcagtcaccaggaaaaacctgaggagccaccaactagcaacgaatgcctagaggatatcactgtgaaagatggtctctcacttcagttcaagcggttcagagagactgttccaacctgggataccattcgtgacgaggaggacgtgttggatgaactgctccagtatctcggggtgacatccccagaatgcttacagagaaccgggatctcgcttaatatcccggctccacaaccggtgtgtatatctgagaaacaggaaaatgacgtcatcaacgctatcctcaagcaacatactgaggaaaaggaattcgtggaaaagcactttaatgacttaaatatgaaagccgtcgagcaggacgaacctatccctcaaaaaccccagagcgccttctactactgcagactgcttctgtccatcctcggtatgaattcatgggacaagcggcgctctttccatctactgaagaagaacgagaagttgctgagggaacttagaaatctggactcccgccagtgtcgagaaacccacaaaatagcagtgttctacgtcgcggagggccaagaggacaaacactctatcctgaccaacaccggcggttcacaggcctacgaggacttcgtggccggcttagggtgggaggtaaatttgacaaaccattgtggctttatgggggggcttcagaagaataaaagtactggcctgacaacaccatactttgccacttcaactgtcgaagtcatatttcacgtttctacgcgcatgcccagtgatagcgatgacagcctcaccaagaaactgagacacctcggaaatgacgaagtacacatcgtctggtcagagcatacaagagattaccggaggggcatcattccaacagagttcggcgacgtcctgatcgttatctatcccatgaagaaccacatgtttagtattcaaatcatgaagaagcccgaagtcccattttttggcccgctgtttgacggagccatcgtgaacggcaaagtcctgcccataatggtgcgcgcaaccgccattaatgcatccagggctctcaaaagtttaattcccctttatcagaacttttacgaagagagagcacgttacttgcagactatagtacagcaccaccttgaacctacaacattcgaggacttcgcagcacaggtgtttagcccggccccctatcaccacctgccttcggacgccgatcattag

SEQ ID NO: 103334 - DNA, 6252 bp, Artificial Sequence
  derived and/or modified sequence
atgttcagcaagaagccccatggagatgtgaagaagagcacccagaaggtgctggacaccaagaaggatgccctgacccggctgaagcacctgagaattgtgattgaaaatgctgagagcattgacctgaagcagttctttgaccagcacttcagccacatctactacgtgttctttgagaactttgtgaccatcgaggccagcctgaagcagaagggccacaagagccagcgggaggagctggatgccatcctcttcatctttgagaagatcctgcagctgctgcctgagcgcatccaccagcgctggcagttccacagcatcggcctcatcctgaagaagctgctgcacacaggcaacagcctgaagatcagaagagagggcgtgcggctcttcctgctgtggctgcaggccctgcagaacaactgcagcaaggagcagctgtggatgttcagctgcctgatccctggcttcagcgccccccagagcgagcacggccccaggaccctggacaacctgatcaacccccccctgaacctgcaggagacccaggtgaccatcgaggagatcacccccctggtgcccccccagagcggggacaagggccaggaggacctgaccagctacttcctggaggccctgctgaagtacatcgtcatccaggtgaagagcctggagtggaagaacaaggagaaccaggagcggggcttctccttcctgttcagccacttcaagaagtactacctgccctacatcttccccaacatctgcaaggagaacagcctgtaccaccccatcctggacatcccccagatgaggcccaagccccactacgtggtgatcaagaaggatgctgagaccaatgaggccatctactgcaccaaggagcccttcatcaaggcccgggtcatcgtcatccgctggctggtgtccttctggctggagcccaagccccacacaggcccccacatccctggcatggagggggaggtgctgcccaagaacatccagagagctgctgccagcctggtgtcccgggaggagagcaagaatgacaatgctgacaagacagacaggaccacagagcctgagcagagccacagcaacaccagcaccctgacagagcgggagcccagcagcagcagcctgtgcagcattgatgaggagcacctgacagacatcgagatcgtgcggcgggtcttcagcagcaagaggagcaatgtgaactttgtgacagagatcttccggcaggccttcctgctgcccatctgtgaggccgccgccatgaggaaggtggtgaaggtgtaccaggagtggatccagcaggaggagaagcccctcttcatgcaggagcctgaggagatcgtcatcaccagcagtgacctgccctgcattgaaaatgtgacagaccatgacatctccatggaggagggggagaagcgggaggaggagaatggcaccaacacagctgaccacgtgaggaacagctcctgggccaagaatggcagctaccagggcgccctgcacaatgccagcgaggaggccacagagcagaacatccgggccggcacccaggccgtgctgcaggtgttcatcatcaacagcagcaacatcttcctgctggagcccgccaatgagatcaagaacctgctggatgagcacacagacatgtgcaagaggatcctgaacatctaccgctacatggtggtgcaggtgtccatggacaagaagacctgggagcagatgctgctggtgctgctgcgggtgacagagagcgtgctgaagatgcccagccaggccttcctgcagttccagggcaagaagaacatgaccctggccggccgcctggccggccccctcttccagaccctgattgtggcctggatcaaggccaacctgaatgtgtacatcagccgggagctgtgggatgacctgctgtctgtgctgagcagcctgacctactgggaggagctggccacagagtggagcctgaccatggagaccctgaccaaggtgctggccaggaacctgtacagcctggacctgagtgacctgcccctggacaagctgtctgagcagaagcagaagaagcacaagggcaaaggagtgggccacgagttccagaaggtgtctgtggacaagagcttcagccggggctggagccgggaccagcccggccaggcccccatgaggcagaggtctgccaccaccaccggcagccctggaacagagaaggcccggagcatcgtgcggcagaagacagtggccatgaggagccgcagcatcggggagtgtgccctgcccagcgcctacatccgcagcgccaagagcgcccctgtgctgatccacaccagcaagcccttcctgcctgacatcgtgctgacccccctgagtgatgagctgagtgacattgatgatgcccagatcctgcccaggagcaccagggtgcgccacttcagccagagcgaggagactggaaatgaggtgtttggagccctgaatgaggagcagcccctgcccaggagcagcagcaccagtgacatcctggagcccttcaccgtggagcgggccaaggtgaacaaggaggacatgagccagaagctgccccccctgaacagcgacattggaggcagcagcgccaacgtgcctgacctgatggatgagttcatcgccgagcggctgcggtctggaaatgccagcaccatgacccggcggggcagcagccctggcagcctggagatccccaaggacctgcctgacatcctgaacaagcagaaccagatgaggcccattgatgaccccggggtgcccagcgagtggaccagccctgccagcgctggcagcagtgacctgatcagcagtgacagccacagcgacagcttcagcgccttccagtatgatggcaggaagtttgacaactttggcttcggcacagacaccggggtgaccagcagcgcagatgtggacagcggcagcggccaccaccagagcgctgaggagcaggaggtggccagcctgaccaccctgcacattgattctgagaccagcagcctgaaccagcaggccttctctgctgaggtggccaccatcactggaagtgaaagtgccagccctgtgcacagccccctgggcagccgcagccagacccccagccccagcaccctgaacatcgaccacatggagcagaaggacctgcagctggatgagaagctgcaccacagcgtgctgcagaccccagatgacctggagatcagcgagttccccagcgagtgctgcagcgtgatggccggcggcaccctgaccggctggcatgctgatgtggccaccgtgatgtggaggaggatgctgggcatcctgggagatgtgaacagcatcatggaccctgagatccacgcccaggtgtttgactacctgtgtgagctgtggcagaacctggccaagatccgggacaacctgggcatcagcacagacaacctgaccagccccagcccccctgtgctgatcccccccctgcgcatcctgaccccctggctgttcaaggccaccatgctgacagacaagtacaagcagggcaagctgcacgcctacaagctgatctgcaacaccatgaagaggcggcaggatgtgagccccaacagagacttcctgacccacttctacaacatcatgcactgcggcctgctgcacatcgaccaggacatcgtgaacaccatcatcaagcactgcagcccccagttcttcagcctgggcctgcccggggccaccatgctgatcatggacttcatcgtggccgccggccgggtggccagcagcgccttcctgaatgccccccgggtggaggcccaggtgctgctgggcagcctggtgtgcttccccaacctgtactgtgagctgcccagcctgcaccccaacatcccagatgtggccgtgtcccagttcacagatgtgaaggagctgatcatcaagacagtgctgagcagcgccagagatgagcccagcggccctgcccgctgtgtggccctgtgcagcctgggcatctggatctgtgaggagctggtgcatgagagccaccacccccagatcaaggaggccctgaatgtcatctgtgtgtccctgaagttcaccaacaagacagtggcccacgtggcctgcaacatgctgcacatgctggtgcactacgtgccccggctgcagatctaccagcctgacagccccctgaagatcatccagatcctgattgccaccatcacccacctgctgcccagcacagaggccagcagctatgagatggacaagaggctggtggtgtccctgctgctgtgcctgctggactggatcatggccctgcccctgaagaccctgctgcagcccttccacgccactggagctgagagtgacaagacagagaagtctgtgctgaactgcatctacaaggtgctgcacggctgtgtgtatggagcccagtgcttcagcaacccccgctacttccccatgagcctgagtgacctggcctctgtggactatgaccccttcatgcacctggagagcctgaaggagcctgagcccctgcacagcccagacagcgagaggagcagcaagctgcagcctgtgacagaggtgaagacccagatgcagcacggcctcatcagcattgctgccaggacagtcatcacccacctggtgaaccacctgggccactaccccatgtctgggggccctgccatgctgaccagccaggtgtgtgagaaccacgacaaccactacagcgagagcacagagctgagccctgagctgtttgagagccccaacatccagttctttgtgctgaacaacaccaccctggtgtcctgcatccagatccgctctgaggagaacatgcctgggggcggcctgtctgctggcctggccagcgccaacagcaatgtgcgcatcatcgtgcgggacctgagcggcaagtacagctgggacagcgccatcctgtatggccccccacctgtgtctggcctgtctgagcccaccagcttcatgctgagcctgagccaccaggagaagccagaggagccccccaccagcaatgaatgtctggaggacatcaccgtgaaggatggcctgagcctgcagttcaagcgcttccgggagaccgtgcccacctgggacaccatcagagatgaagaagatgtgctggatgagctgctgcagtacctgggcgtgaccagcccagaatgtctgcagaggacaggcatcagcctgaacatcccagccccccagcctgtgtgcatcagcgagaagcaggagaatgatgtgatcaatgccatcctgaagcagcacacagaggagaaggagtttgtggagaagcacttcaatgacctgaacatgaaggctgtggagcaggatgagcccatcccccagaagccccagagcgccttctactactgccgcctgctgctgagcatcctgggcatgaacagctgggacaagagaagaagcttccacctgctgaagaagaatgagaagctgctgcgggagctgaggaacctggacagccggcagtgccgggagacccacaagattgctgtgttctacgtggccgagggccaggaggacaagcacagcatcctgaccaacacaggaggcagccaggcctatgaagattttgtggccggcctgggctgggaggtgaacctgaccaaccactgcggcttcatgggcggcctgcagaagaacaagagcacaggcctgaccaccccctactttgccaccagcacagtggaggtgatcttccacgtgtccaccaggatgcccagcgacagtgatgacagcctgaccaagaagctgcggcacctgggcaatgatgaggtgcacatcgtgtggagcgagcacacccgggactacagaagaggcatcatccccacagaatttggagatgtgctgattgtcatctaccccatgaagaaccacatgttcagcatccagatcatgaagaagccagaggtgcccttcttcggccccctgtttgatggagccatcgtgaatggcaaggtgctgcccatcatggtgcgggccacagccatcaatgccagccgggccctgaagagcctcatccccctgtaccagaacttctatgaggagcgggcccgctacctgcagaccatcgtgcagcaccacctggagcccaccacctttgaggactttgctgcccaggtgttctccccagccccctaccaccacctgcccagtgatgctgaccactag

SEQ ID NO: 103335 - DNA, 6252 bp, Artificial Sequence
  derived and/or modified sequence
atgttcagcaagaagccccacggcgacgtgaagaagagcacccagaaggtcctggacacaaagaaggacgccctgacacgtttaaagcacctccggatagtgattgagaacgcagagagcatcgatcttaagcaattttttgatcaacacttttcacatatttactatgtttttttcgagaacttcgttacaattgaggctagcctgaaacagaaaggccataaatcacaaagagaagaactcgacgccatcctgtttattttcgaaaaaattctccagctattgcccgaaaggatccaccagagatggcaattccattctatagggctgatccttaaaaagctattgcatacaggaaattccctcaagattcgccgcgagggggtgcggctgtttctgctgtggctacaagctttgcagaataattgttctaaggaacagttatggatgttttcatgtctgatacccggcttctcagcacctcagagtgagcatgggcctcgtaccctggacaatctcatcaaccctcccctgaacctccaagagacacaggtgaccatcgaggagatcacaccattggtgccaccccaaagcggtgacaagggacaggaagatctgacaagttatttcctcgaggcgttgcttaagtacattgtgattcaagttaaatcactggaatggaagaataaagagaatcaggagcgcggcttctcctttctgttcagtcattttaagaagtactatctgccttacatctttcccaatatatgcaaggaaaacagtctgtaccaccccatcctcgacatccctcaaatgcgccccaagccacactacgttgtcattaagaaggatgccgagactaacgaagccatctattgtacgaaagaacctttcatcaaagccagagtcattgttattcgctggctggttagcttctggttggaaccaaagcctcatacggggcctcacatccccggaatggaaggagaggtcctgcccaagaatatccagcgtgccgctgcctcgctggtgagccgcgaagagagcaagaatgacaatgccgataagaccgataggaccactgagcctgaacagagtcattctaacaccagcacgctcactgagcgagaaccgtcctcatcctccctgtgttccattgacgaggagcacttgactgacattgagatcgtgcgaagggttttttctagcaaacgcagcaacgtgaacttcgtcaccgagatctttaggcaagccttcctacttcctatctgcgaagctgccgccatgagaaaggtagtcaaggtgtatcaggagtggattcaacaggaagagaagcccctcttcatgcaggaacccgaggagatcgtcatcacgtccagcgatctgccctgtatcgagaatgtgaccgaccacgacataagcatggaggaaggggagaaacgggaagaagagaatggcacgaatacagcagaccatgtaaggaacagctcctgggcaaaaaacggcagctatcagggcgccctccataacgcatccgaagaggccaccgaacaaaacattagagccggaacacaggccgtgttgcaggtgttcattattaattcaagcaacatttttcttctcgagcctgccaatgaaattaagaacctcctggacgagcacacagatatgtgcaaacgaatcctcaatatctatagatacatggtcgtgcaagtgtccatggacaagaagacctgggaacagatgcttttagtcttactacgggtgactgaaagcgtgctgaagatgccaagccaagcgttcctccaatttcagggaaaaaaaaacatgacactcgccgggcgtctggctggaccactgttccagaccctcattgtcgcttggattaaggcaaatctgaatgtgtacatttctcgtgaactctgggacgacctgcttagcgtgctttctagtctgacttactgggaggagcttgccaccgaatggagtctcacaatggaaactctcaccaaggtgcttgcacgcaatttatacagtttggatcttagcgaccttcccctagacaaactgtccgaacagaaacagaagaaacacaagggcaaaggcgtgggtcacgaatttcaaaaagtgagcgtggataaatcattttccaggggttggagtagagaccagccaggacaagcccccatgagacagaggtctgcgaccaccaccggttctccgggtactgagaaagcgaggtcaatcgtccggcagaaaacggtcgccatgagatcaaggtctattggggagtgcgcactccccagtgcttacatccgaagcgccaaaagcgccccagtgctgatacatactagcaaacctttcctccccgatatcgtgctgacccctcttagcgacgagctcagcgacattgatgatgcccaaatcctcccacggtccacccgtgtgagacatttctcccaatccgaggaaactgggaacgaagtgtttggagccctgaatgaagaacaacccctcccccgatccagctctacatcagacatactcgagccttttacagttgagagggctaaggtcaataaggaggatatgagccagaagctgcccccattaaacagcgatatcggcggcagcagcgcaaacgtgcccgacttgatggatgaattcatcgcggagaggttgcgctccggaaatgcctcgacaatgacaaggcgcggctctagtcctggcagtctagaaatccctaaagatttgccagatatccttaataaacaaaaccagatgagacccattgacgatccaggagtgcccagtgagtggacaagcccggcttcagcgggctcctctgacctgatatcatccgatagccattccgacagtttttccgcctttcagtacgacggtcgtaaattcgacaactttgggttcggaaccgatacaggggtaacctccagtgcggatgtggattcaggctccggtcaccaccaaagcgcggaggaacaggaagtagcatctttaacaacgctgcacatcgactcagagacctcttctctcaaccaacaagcttttagcgccgaggtcgccacaataacaggaagcgaatcagcatctccagtgcacagcccattaggcagccggtctcaaacacctagcccttccacactaaacatcgaccatatggaacagaaggacctgcagctggatgaaaaattacaccactcagtgctccagacacccgacgacctcgaaatttccgagtttccatccgaatgctgctcagtgatggcaggaggtaccttgaccggctggcatgctgatgtggctacagtgatgtggaggcggatgctaggcattttgggggatgtgaacagcataatggaccccgaaattcatgctcaggtgtttgattacctgtgtgagctatggcagaacctggcaaagatacgtgacaacttagggatctccactgataatctgacaagtccctccccaccggtgttaattccacccctgaggatcctgaccccttggctgttcaaggcaaccatgctgactgataagtataagcagggcaaactacacgcctataagctgatctgcaataccatgaagaggcggcaagacgtaagcccaaatagagactttctgactcacttctataacatcatgcattgtggcctattgcatatcgaccaggacatcgttaatactataattaagcactgttcacctcagttcttttcgctggggctgccgggggcaaccatgctgatcatggatttcatcgtagcagcgggccgcgttgcctcttcagccttcctgaatgctccacgggtggaagctcaggtcctcttaggctctctggtttgtttccccaatctctactgcgaactgccatccctccaccctaatattccggatgtcgccgtgtcccagtttacagacgtgaaggagcttatcattaagaccgtactatcctcagccagggacgagcctagcgggccagccagatgcgtggccttgtgctctttggggatttggatctgtgaggagctagtgcacgagagccaccacccacagatcaaggaggctctgaatgtaatttgcgtgtccctgaagtttactaataaaacagtggcccatgtcgcatgcaatatgttacacatgctcgtgcactatgtgccacgcctccaaatataccagcctgattcccctctgaagattattcagattctcatcgcaactataacccatttgctccccagcactgaggctagttcttacgagatggacaaaaggctcgtggtatctttactgctgtgcctgcttgattggattatggcactgccacttaagacattactgcagccgttccacgctacgggagctgagagcgataaaaccgagaaaagcgttctgaactgcatctataaagtcctgcatgggtgtgtctacggggcacagtgcttctccaatcccagatactttcccatgtccctcagtgacctggctagtgtggattatgaccccttcatgcacttggaatccttgaaggagccagagcctcttcacagcccagacagtgagcgcagttccaagctgcagcccgtgaccgaggtcaaaacacagatgcaacacggcctgatttccatcgccgcccggacagtcattacccatcttgtgaaccacctcggtcattaccctatgtctggcggacctgctatgctgacgagtcaggtgtgtgaaaatcacgataaccactactcagagagcacagagctgagtcctgaactcttcgaaagtccaaatattcagttcttcgtactcaataacactacactagtgagctgcatacagattcgctcagaagaaaatatgcccggcggtggactgagcgcagggctagccagcgccaactccaacgtgcgaataattgttcgcgacctgtcagggaagtattcatgggacagcgcgattctttatggcccccctccagtcagtggactgtcagaaccaacgagtttcatgctcagtctcagccaccaggaaaagcccgaggagccgccaacaagcaatgagtgcctggaggatatcacggtgaaggatgggcttagtcttcaattcaagaggttccgcgaaaccgtgccaacctgggatacaatccgggacgaggaggacgtgttagacgaactccttcagtacctcggagtgacatctcctgagtgtctccagaggaccggaatatctttgaacatacccgccccacagcctgtttgtatatctgagaagcaggaaaatgacgttatcaacgccatcttgaaacagcacactgaggagaaggaattcgtagagaaacacttcaatgacctgaacatgaaggctgtagagcaggatgagcctatcccacagaaaccacagtcagccttctattactgtcgcttgctcttaagtattctgggcatgaacagttgggacaagcggcggtccttccatctgctcaagaagaacgaaaaactcctgcgcgagcttagaaacctggatagtcgccagtgcagagaaacacataagattgcagtgttttatgtggctgaaggccaggaggacaagcactcaatcctaacaaacacaggtggatcccaggcttacgaagactttgtcgctggcctgggctgggaggtcaacttgaccaatcattgcggttttatgggcggtctgcaaaagaacaagtccactgggctgactaccccttattttgccacctcgaccgtcgaggtaatcttccatgtgtccacccgcatgccgtccgacagtgacgatagtttaacaaaaaaactcaggcacttgggcaatgatgaggtccacattgtgtggagtgaacataccagagattaccgccgcggtatcattccaacagaattcggagatgtgctaatcgtcatttaccccatgaaaaaccacatgttctccatccaaatcatgaagaagcccgaggtgccgttttttggacccttatttgacggcgctatcgtcaatgggaaggttctgccaataatggtgagggccactgcgataaacgctagcagggcactgaagtccctgattcccctgtaccagaacttctacgaagagcgggcccgttacctccagaccatagtgcagcaccacctcgagcctacaacattcgaagactttgctgcccaggtgttctcacctgctccttaccaccaccttccttctgacgcggaccactag

SEQ ID NO: 103336 - DNA, 6252 bp, Artificial Sequence
  derived and/or modified sequence
atgttcagcaagaagccccacggcgacgtgaagaagagcacccagaaagtgctggacacaaaaaaagatgcgttgactcgtttgaagcacctgcgaattgtgattgagaacgccgagtctatagacctgaagcaattcttcgaccagcatttctctcatatctattacgtctttttcgagaactttgtcaccatagaggctagtctcaaacagaaaggacacaagtctcagagggaggagcttgatgctattctgtttatttttgaaaaaatactgcaactactgcccgaaaggatccaccagagatggcaatttcacagtataggactcatcttgaaaaagctcttgcataccggtaactcattgaagattcggcgagaaggggttcgactcttcctgctgtggctacaagcattacaaaacaactgtagcaaggagcagttatggatgttcagttgcttgatacctggctttagtgctccgcagtccgagcatggaccacgcaccctggataacctaatcaaccccccattaaacctacaggaaacccaggtgaccatagaggaaataacacctttagtccccccccaatcaggcgataagggacaagaagacctgacttcctacttcctcgaggctctgcttaaatatattgtgattcaggttaagagcctggagtggaagaacaaggaaaatcaagaacgcggtttctcatttctcttctcccatttcaagaagtattatctcccttatatattcccaaacatctgtaaggagaactcactttatcaccctattttggatattccgcagatgcgcccaaagccacactacgtcgtcatcaaaaaggacgcagaaaccaacgaagctatttactgcaccaaagagccattcatcaaggcgcgagtgatcgtgattcgatggctggtgtccttctggctggaacccaagcctcatactggaccacacatccccggcatggagggtgaggttcttcccaaaaatattcagcgagcggccgcatccctggtgagtcgcgaagaatccaagaatgataatgccgataagactgaccggaccaccgaacccgaacagagtcactccaacaccagtactctgaccgaacgcgaaccatcgtcatcttccctctgttccatagacgaagagcacctcacggacattgagattgtgcgccgggtgttctcctcgaagcggagcaacgtgaacttcgtgactgaaattttcagacaggcattcttgctgcctatttgcgaagccgcagccatgcgtaaagttgtgaaggtctatcaggaatggatccagcaggaggagaagcctctctttatgcaggagcctgaggagattgtgattacgtcctccgatctgccttgtatcgaaaacgtaactgatcatgatatttcaatggaggagggagagaaacgggaggaagagaatggcactaacaccgccgatcatgtgcgaaactcgagttgggccaagaacggctcatatcagggcgccttacataacgcgtccgaggaggcaacagaacagaacattagagctggcacacaggctgtcctccaggtgttcatcattaacagctcaaacatttttttgctggagccggccaatgagattaagaacctcctggacgaacacaccgatatgtgcaaaagaatcctgaacatttatcgctacatggtggtacaggtgagcatggacaaaaaaacctgggagcagatgctgttagttttgctccgcgttaccgagtccgtgctaaagatgccttcccaggcattcctgcagttccaggggaagaaaaatatgaccttagccggcaggctcgccggtcccctgtttcaaacactaattgtggcttggataaaagccaacctgaatgtctacatcagccgcgagctgtgggatgacctgttgagcgtactgagttctctgacctattgggaggaactggccactgaatggtccctcaccatggagaccctgactaaggtgctagcccgtaacttatactcactcgacctgtccgacctccccctcgacaagctaagcgagcagaagcagaaaaaacataaaggtaaaggggtggggcatgagttccagaaggtgtccgtggacaagtctttcagtcgagggtggtctcgggatcaacccggccaggcccctatgcggcagcgcagtgcgaccacgactggatctccagggaccgagaaggcgaggtccatagtgaggcaaaaaacggtggccatgcgcagtaggagtatcggggaatgtgcgctgcctagcgcatatatcaggtccgccaaatcagcccctgtccttattcacacttcaaaaccttttctgccggacatcgtgttaacccccctctctgacgagttgtcagacatagatgatgcccagattctgcccagaagtactagggtgcggcacttttcccaatccgaggaaaccggcaacgaagtcttcggagccttaaacgaggagcaacccctcccgcgtagctcaagtacgtcggatatacttgaacccttcactgtggagcgggctaaggtgaataaagaagacatgtctcagaaactgccacctctgaactctgatattgggggcagttccgctaatgtgcccgacctcatggacgaattcattgccgagcggctacgttccgggaacgcctctacaatgacgagacggggcagcagcccagggtcactcgagatccccaaagacctacccgacatcctaaataagcaaaaccaaatgaggcccattgatgatcccggtgtgccctctgagtggaccagccccgcatccgcaggttcctcagacttgatttcgagtgacagtcattctgactcttttagtgccttccagtacgacggacgtaaattcgataactttggcttcggtacggataccggggtgacttcgtccgctgacgtggacagcggctcgggacaccaccagtcggctgaggaacaggaagtggcctccctgactaccttgcacatagactcggaaaccagcagtttgaatcagcaagccttctccgctgaggtcgccactataactgggtctgagagcgcttcacccgtccatagtccgcttggcagccggtctcaaacccccagcccctcaacactgaatatcgatcatatggagcagaaggatctccaacttgacgaaaaactgcaccacagtgtactccagactcctgacgacctggaaatatcagaattcccttcagagtgctgctctgtgatggcaggggggactctcaccggatggcatgccgatgtggctaccgtgatgtggaggaggatgcttggcatactcggggatgttaatagcattatggatcccgagattcacgcccaggtgtttgattacctgtgcgagttgtggcagaacctggccaagatcagggataacctggggattagcactgataatttgacatcaccttccccaccagtgttaattcccccattgagaatcctgacgccttggctctttaaagccacaatgctgacagataagtataagcagggaaagttgcacgcctacaaactgatttgcaacacaatgaaaaggagacaggatgtgtctccaaatcgggatttcctgacacatttttataatatcatgcactgcggtctactgcacatagatcaagacattgttaacactatcatcaaacattgttccccgcagttttttagtctgggactcccgggggccacaatgcttattatggatttcattgttgccgctgggagggtggcctcttccgctttcctgaatgcacctcgcgtggaggcccaggtgctcctcggttcactagtgtgttttcccaacctctactgtgaactcccctctctccaccctaatattccggacgtcgccgtgtctcaattcaccgacgttaaagagctgattatcaagactgtgttgtcctcagcacgggacgagccgtccgggccggcccgctgcgttgccctatgttcactcggtatctggatctgcgaggagttggttcatgaatcccatcatcctcaaatcaaagaagctctcaacgtgatttgcgtttccctgaaattcacaaataagacagttgcacacgtggcttgcaacatgctccatatgctggttcattacgttccaaggttgcagatctaccagcccgactctccactcaagatcatacagatccttatagctactatcacgcatctgctgccttcaactgaggcctcttcctacgagatggataaacggcttgtggtttctctgctgctatgcttgctggattggatcatggcattgccactcaaaactctcctgcaacccttccacgcgaccggcgcagagagtgacaagacagagaagagtgtcctgaactgtatctacaaggtgctccacggctgcgtatatggcgcgcaatgctttagtaaccccaggtactttcccatgtcgctgagcgatctggcctcggtggactacgatcctttcatgcatctggagtccttaaaggagcccgagcctcttcactctccagacagcgaacggagctccaaacttcagcctgttacggaggtcaagactcagatgcagcacggcttgattagcattgccgccaggactgttatcacccatttagtgaaccatctgggccactaccctatgagcgggggccctgcaatgttaacatcccaggtatgtgagaatcacgataaccattattctgagtctaccgagctcagtcccgaactgttcgagagtccaaacattcagttcttcgtgctgaacaatacaaccctcgtcagttgcatacaaatacggagcgaggagaatatgcccgggggcggcttatctgctggcttagctagcgcaaactctaacgtacggattattgtccgtgacctcagtggaaagtattcatgggatagcgctatcttgtatggacccccacctgtcagtggcctgtcagagcccaccagctttatgctctctctgtctcaccaggagaagcccgaagagccacctacgtctaatgagtgcctggaggatattacagttaaagatgggctctcgttgcaatttaagcggttcagggaaactgtacctacgtgggacacaatcagggatgaggaggatgtgctggacgagctgctacaatatctgggcgtcacttcgcctgagtgtctgcagcgcaccggaattagccttaacatcccagccccacaacccgtgtgtatttcagaaaaacaggaaaacgatgtaattaacgcaatcctgaaacagcatacagaggagaaggagttcgtcgagaaacacttcaatgacttaaacatgaaggctgtcgaacaggacgaacctattccgcaaaagccccagagtgctttttactactgtcggctgctcctcagtatcctcggaatgaattcttgggacaagaggaggtctttccatcttctcaagaaaaacgaaaagctgctgcgcgagctacggaatctggattcccgccagtgcagagagacccacaaaatagccgtgttttacgttgctgaaggccaggaggataagcactcaattctgacgaacacgggcggttctcaagcctatgaagactttgtggcaggcttgggttgggaggtcaacttaacaaaccactgtggctttatgggcgggctccagaagaacaagtcaactggattgacaactccatatttcgcaactagcacagttgaagtaattttccatgtttcgacacgcatgccaagcgactccgatgatagcttgactaaaaagctgcggcaccttggaaacgatgaggtacacatagtttggtcagaacatacacgtgactaccggcggggtatcattcccactgagttcggagatgtgctgatcgttatatacccaatgaagaatcacatgttttctattcagatcatgaagaagccagaggttccattctttggaccactgttcgacggcgcaatagtgaacggcaaagtacttccaattatggtcagagctaccgctatcaatgcaagtcgagccttaaagtcccttatccctctttaccagaatttctatgaagaacgcgctcggtatctgcagactattgtccagcatcacttggagcctacaacatttgaggattttgcagcccaggtcttcagtcccgccccctaccaccacctgccgtcagatgctgaccattag

SEQ ID NO: 103337 - DNA, 6252 bp, Artificial Sequence
  derived and/or modified sequence
atgtttagtaagaagcctcatggagacgtgaaaaagtccactcagaaggtcttggatactaagaaggatgctctgacaaggctcaagcacctgcggattgtgattgagaacgccgagtcaatagatctcaagcagttctttgaccagcattttagccacatctactacgtgtttttcgagaatttcgttaccatcgaggcgagtttgaagcaaaaagggcacaagagccagcgtgaagagctcgacgctatactgttcatctttgaaaagatcttacagcttttgccagagcgcatccaccagcgatggcagttccatagtattggactgatcctgaagaaactactgcacaccggtaattccctgaagattcggcgagagggagtgcgcttgtttcttctgtggcttcaagccttgcaaaacaactgctctaaggaacagctctggatgttctcatgtttgattccaggtttctcagcgccacagagcgagcacggcccacgcacactagataacttgattaatcctcctctcaatctgcaggagacccaggttactatcgaagagattacaccactggtgccccctcaatccggcgacaaaggacaagaagacctgaccagctatttcctggaggctctgctgaaatatattgtcattcaggtgaagtctctggagtggaagaacaaggagaaccaggagcggggatttagcttcctcttcagccactttaagaagtactatctcccgtatatcttccccaacatctgtaaggaaaactccctttatcatccaatcctcgatatcccgcagatgagaccgaaaccacattatgtggtaatcaagaaagatgccgagaccaacgaggctatttattgcaccaaggaaccctttatcaaggcacgcgtgattgtgatcaggtggttggtgtccttttggctcgagcccaaaccccacacaggcccacacatcccagggatggaaggcgaagtgttgccaaaaaacatccagcgcgctgccgctagtctcgtgtccagagaagagagcaaaaatgataacgctgataagacagacagaactacggagccagaacagtcgcattccaacacatctacgttgaccgaacgggagccttcttctagtagtttgtgtagcattgatgaagaacacctcactgacatcgaaattgtcagaagggtatttagttcaaagcgcagcaatgtgaactttgtgacagagatcttccgtcaagctttcctgctgcctatctgcgaggccgcagccatgcggaaagtagtgaaagtataccaggaatggattcagcaggaggagaaacctctgtttatgcaggagccagaagagattgttatcacttctagcgaccttccatgcattgagaatgtgactgaccacgacatctcaatggaagaaggagagaaacgggaggaggagaacgggaccaatacggcagatcacgttagaaactcctcctgggctaaaaacggttcataccagggtgcactacataacgcctccgaggaagcaactgaacagaacattcgagccggaacacaggcggtgctgcaggtgtttataattaacagcagtaacattttcttgcttgagcccgcaaacgagattaagaacctccttgatgagcataccgatatgtgtaaacgcatcctgaacatctatagatacatggttgtgcaggtttcaatggataagaagacgtgggagcaaatgctgctggtcctgttgagagtgaccgaatcagtccttaagatgccctctcaagcctttctgcaattccagggcaagaagaatatgacgctcgcaggcaggctggcagggccacttttccagacactgatagtggcctggatcaaagcgaacctgaacgtttacatctcacgcgaactttgggacgatctactcagcgtcctgagttctctgacttattgggaagagcttgcaaccgagtggagtctcactatggaaacactcactaaggtcctggctcgcaatttgtacagtctggacttatctgatctccccctggataagctgtcagagcaaaaacaaaagaagcacaagggaaagggggtgggtcatgaattccagaaagtgagtgtcgataaatccttcagcagggggtggtccagggatcagcccggtcaggcgccaatgcgccagaggagtgccaccaccactggaagccccggaacagagaaggccaggtccatcgtgcggcagaagacggttgctatgcgcagccgtagcatcggggagtgtgctctcccctccgcctacatccgcagcgctaaatccgcgccagtgctgattcacaccagtaagccatttttgccagacatagtccttactcccctgtctgatgaactgtccgatattgacgatgcacagatcctgccaaggagtactcgcgtgcggcatttctcacaatcagaagaaacgggcaatgaggtgtttggagccctcaatgaggaacaacccttgccacggtcatcaagcacatccgatatcctggagccatttaccgtggagcgtgctaaggttaacaaggaggacatgagccagaagctgcctccccttaactccgacattggcggatcgtctgccaacgtgcccgatttgatggacgaattcatcgccgaacgactcagaagcggaaatgcatctaccatgactcgaaggggatcctctccgggatctctggagatcccaaaagacctgccagacatccttaataaacagaatcagatgcgccctatcgacgaccccggagttccttctgagtggacctcgcccgcatctgccggttcctccgacttgattagctccgattcccatagtgattctttttcagcttttcagtacgatggacgaaaatttgacaacttcggattcggaactgacactggtgtgacctcgagcgccgatgtggactcaggaagcggtcatcatcagtctgctgaggagcaggaagttgcaagcctgaccacactccatatagattctgaaacttcgtccctgaatcaacaggctttctctgccgaggtggcgaccatcaccggcagtgagagcgcatcgcccgtgcacagtcctctgggatcacggtcgcaaaccccctcaccctccactctcaatattgaccatatggagcagaaggacctgcagctggatgagaaattgcatcattcagtgctgcaaactcccgacgatctcgagatctcagaattccctagtgagtgttgttcagtcatggccggagggacactgacaggctggcatgcggatgtcgctaccgtaatgtggagaaggatgctcggcattctcggggacgtgaattctataatggaccctgaaatccacgctcaggtgttcgactatctgtgcgaactctggcaaaacctcgcaaagattagggacaatctgggcatctcaacagacaacttaacctccccttcacctcctgttctgattcccccattgcggatcctcacaccatggctgttcaaggcgaccatgctcaccgataagtataagcaaggtaaactgcacgcctacaaactaatttgcaatactatgaagcgaaggcaggatgtgtctccaaacagggacttcctgacacacttttacaatataatgcactgcggtcttctccacattgaccaggacattgtaaatactatcattaagcactgctcgccccagttctttagcctgggactgccaggcgctacaatgctgataatggacttcattgttgctgccggaagagtggcaagttccgcattccttaacgctccgagggtggaggctcaggtgctgctgggcagtctcgtgtgtttcccaaatctgtactgcgagttgccgtctctccatcccaatataccagacgtggccgtgagtcagtttactgacgtaaaggagcttattatcaaaacagtgctgtcatcagcgagggatgagccctcggggccagcaaggtgtgtggccctgtgcagtctggggatttggatatgcgaggagcttgtccacgagtcacatcacccacaaataaaggaggctctcaatgttatttgtgtgagcttgaagtttactaacaagaccgtagctcatgtggcctgcaatatgttgcatatgttagtgcactatgtgccaaggcttcagatctaccagcctgactcaccactgaaaattattcagatcttgatcgccacgattacacatctgctgcccagcaccgaggcaagcagctacgaaatggacaagaggttagttgtttcgttactcctctgcctcctggactggatcatggcattgccgctcaagactttgctccagccatttcatgctacgggagccgaatctgacaaaacagaaaaatctgttcttaactgtatctacaaggtgctacacgggtgtgtgtacggcgctcagtgtttcagcaacccgaggtactttcctatgtctctcagtgacttggcctccgtggactatgaccctttcatgcaccttgaatccctcaaggagcccgagcccctgcactcgcctgacagtgagcggagtagtaagcttcagcccgtaactgaagtgaagacccagatgcagcatgggctcattagtattgccgcaagaacagttataacacatctggtgaatcacctgggacattatcctatgtccggaggacccgcaatgctgaccagccaggtctgcgagaaccatgacaatcattatagtgagtctacagaattgtcccccgagctgtttgaatctccgaacattcagtttttcgtattaaacaacactacattagtgtcatgtattcagatccggtccgaagagaatatgccaggaggtggcctttcggctggattagcatccgcaaattcgaacgtgaggataatagtgagagacctgagcggaaagtactcctgggattccgctattctgtacgggcctccaccagtttcaggactctctgaaccaacgagctttatgctgtcactttcccaccaagagaaaccagaagagcctcccacttctaatgaatgtctcgaggatatcaccgtcaaggatggcctctctctccagtttaaaagattccgggagactgtcccaacatgggacaccatacgtgacgaagaggatgtcctggacgaactcctgcagtacttaggtgtgacctcacccgagtgcctccagagaaccgggatctctctaaatatcccagccccacagcccgtctgcatctccgagaaacaagaaaatgacgtgattaatgccattttaaaacagcataccgaggaaaaagagttcgtagagaagcacttcaacgatctgaatatgaaggccgttgagcaggatgagcctataccacagaaaccgcagtccgccttctactactgtagactcttgttatccatcctgggcatgaattcatgggacaagaggaggtccttccaccttctgaagaaaaacgagaagttgttaagagagctgagaaatctcgactcacgacagtgtagggagacgcacaaaatagcggttttctacgtggcagagggccaggaagataagcattccatcctcaccaacaccgggggaagtcaggcatacgaagatttcgtcgcaggtcttgggtgggaagtcaacctcaccaaccactgcggattcatgggtggccttcagaaaaataaatcgactggactgaccactccatacttcgcaacttcaacagtcgaagtcatcttccatgtgagcacccgtatgccctccgattcagacgactcccttacaaaaaagctgagacacctgggaaacgacgaagtccatatcgtgtggagtgaacacaccagagactatcgcagaggtattatccccacggagttcggagatgtgcttatcgtgatctaccctatgaagaatcacatgttctctatccagatcatgaaaaaacctgaggtgcccttcttcggtccactcttcgacggggctattgttaatggtaaggtgttgccgattatggtgcgggcaacggctatcaacgcctctcgggcattgaaaagtctgattccgttgtaccagaacttctatgaggaaagggctaggtatctgcagactatcgtgcagcatcatctagaaccaactaccttcgaggattttgcagctcaggtgttttccccagctccctaccaccatcttccgtccgacgcagaccactac

SEQ ID NO: 103338 - DNA, 6251 bp, Artificial Sequence
  derived and/or modified sequence
atgttttcgaagaaacctcacggtgatgtgaaaaagagcacgcagaaagtactcgacaccaaaaaagatgccctgactcggctgaaacacctaagaatagtcatcgagaatgctgagtcaattgatttaaagcagtttttcgaccagcacttctcccatatctactatgtattttttgaaaatttcgtgactatcgaagcctccctgaagcaaaaagggcacaagtcccagcgagaagaactcgatgctattttatttatctttgagaaaattctgcagcttctgccagagcggatacatcagcgttggcaatttcatagcatcggtctcatactgaaaaagttgcttcacactgggaacagtctgaaaatccgcagagagggcgttcggctctttttgctatggcttcaagctctgcagaacaactgttcaaaggaacaattgtggatgtttagctgcctgattcctggtttctccgccccacagagtgagcacggacccaggactttagataatttgatcaaccctccactcaatttgcaggaaacacaagtaacaatcgaggagattacccccctagttccaccccagagtggggacaagggccaggaagacctgacctcatatttcctggaagcactcctcaagtacatagtgattcaggtgaaaagccttgaatggaagaacaaggagaatcaggagagggggttctccttcttatttagtcatttcaagaaatactatcttccctacatttttccaaatatctgcaaggaaaactccctgtatcacccaattttagatatcccccagatgaggccaaagccccattacgtagtgatcaaaaaggatgctgagactaatgaggctatctattgcaccaaggagccttttataaaggccagagtgattgtgattagatggctggtcagcttctggcttgagcctaagcctcacaccgggcctcatatacccggtatggagggcgaggtgctccctaaaaacatccagcgagcagcagcttcacttgtttcacgggaagagagcaagaacgacaatgccgataagaccgatagaacaacagagccggagcaatctcatagtaacaccagtacattgaccgagcgggagccctcttccagcagcctatgctcaattgatgaagaacacctcactgatatcgagattgtcagacgcgtgtttagctctaagcggtctaacgttaactttgtgacagaaatctttaggcaagcatttctgctgcctatttgtgaagccgcagcaatgagaaaagtggttaaggtttatcaggagtggatccaacaggaggaaaaacctttgtttatgcaggaaccagaggagatcgttataacaagtagcgatttaccatgtattgaaaatgtgactgaccacgacattagtatggaagagggagaaaaacgggaagaggagaacgggacaaataccgccgaccacgtgagaaacagctcctgggccaaaaacggatcctatcagggagccctccacaacgcgtccgaagaggcgacagaacagaacataagggctggcactcaggccgttttacaagtgtttatcattaactccagcaacattttcctccttgagccagcaaatgagattaagaatctgttagacgagcatactgacatgtgcaagcgtatattgaacatctatcgatacatggtcgttcaggtgagcatggacaagaagacttgggagcagatgctcctggtcctcctgcgggttaccgaaagtgtcctgaagatgccatcccaggcttttttgcagttccaagggaaaaaaaacatgacgcttgcaggaagattggctggcccattgtttcagacccttatagtggcatggatcaaggccaatctgaatgtttacatctcccgggaactgtgggacgatctgctgtccgtcctgtcttccctcacctattgggaggagctggccacggaatggtctctcacaatggaaaccctcactaaggtgctggctcggaatctctacagcctggatctcagtgacttgcctttggacaagctgtccgagcaaaaacagaaaaagcacaaaggaaaaggcgtcggccacgagtttcagaaagtctctgtggataagtccttcagtcggggttggtcacgcgaccaacctggacaggctcctatgaggcagcgttcagcaacaacgaccggaagccctgggaccgaaaaggccagaagtatagtacgccagaagactgttgctatgcggtctagaagcatcggagagtgtgccctgccctcggcatacatccgatccgctaagtctgcacccgtgttgatccatacctccaaacctttcctgcctgacattgtgctgaccccgctatccgacgaattatctgatattgacgacgcccagattttgccaaggtctacacgcgtcaggcacttctcccagagcgaagagaccggtaacgaggtgttcggcgctctgaatgaagaacagcctctccccaggtccagctctacgtcggacatactggaaccctttacagtggagagagccaaagtgaacaaggaggacatgtcacagaaattacctcccctcaattcagatatcgggggatcttctgcaaatgtgccagacctgatggatgaattcattgccgaacgactgcgctctggaaacgccagtaccatgacacgccgaggatcaagtccgggatccttagaaatacccaaagacttacctgatatcctgaataagcagaatcagatgcgtcccatcgacgatccaggagtgccctccgaatggacaagtcctgccagcgccggaagctctgacctgatcagtagcgatagccattccgacagcttcagcgctttccagtacgacgggaggaagttcgacaattttgggttcggcacggatacaggggtcacatctagcgctgacgtcgattccggctcaggacaccatcagtccgctgaagaacaagaggtagcttcactgactacattacacattgattctgagacaagttccctcaatcaacaggccttcagtgcggaggtagccactataacaggttcggaaagcgctagtcccgttcactcaccactggggtctaggagtcaaaccccctcccctagcacacttaacatcgatcacatggaacaaaaggacctccaactagatgagaagctacatcattcagtactgcagaccccagatgatctggagatctccgagttcccatctgaatgctgtagtgtgatggcagggggtactttgacaggttggcatgctgacgtggccacggtgatgtggagacgcatgctcgggatactgggtgacgtgaatagcataatggacccagagatccatgcacaagtctttgactatttgtgtgaactgtggcaaaatctggctaaaatcagagacaacctcggaatcagcacagacaacctcacttcaccatctccacccgtgttgataccccctctgcgcattcttacaccctggctgttcaaggctacaatgctgactgataagtataaacaggggaaattgcacgcctacaaattgatctgtaatacgatgaagagaaggcaggatgtttccccaaaccgggattttttgacccacttctacaacatcatgcactgcgggttactccatatagaccaggacatcgtaaatacaatcattaagcattgttccccccagtttttttcgctaggactgccaggcgcaactatgctaattatggattttatcgttgcggctggacgcgtagctagttccgcgttcctgaacgcccctagagtggaggctcaagtgcttctgggcagcctggtttgtttcccaaacttgtattgtgagctgcccagtctacaccccaacatcccggatgtcgccgtctcacagttcacggacgtcaaagagctgatcatcaaaacggtacttagtagtgctagggatgagccctccggcccagcgaggtgtgtggcactttgcagcttgggtatttggatctgtgaagaactcgttcatgagtcacaccatccacaaatcaaggaagccctgaacgtcatctgcgtatctttaaaattcactaataagaccgttgcccacgtagcttgcaacatgctacacatgcttgtgcactatgtccctagacttcaaatctatcagccagattccccattgaagatcattcagattctcatagcgacgatcacacacctcctgccaagcactgaggcaagcagctatgaaatggataaacgtctggtggtcagtctgctgttgtgcctcttggattggataatggctctccccctgaagacattactgcaacctttccacgccaccggggctgagagcgataagactgagaagtctgtgcttaactgcatctacaaggttttgcacggatgtgtttacggggctcagtgtttctcgaatcctcgttattttccgatgtcgctatctgacttagcatctgttgactacgaccccttcatgcacctagagtctttgaaagagccagagcctctgcactccccggactctgaacgtagctctaaactgcagcccgttacggaagttaaaacacaaatgcagcatggcctgatcagtatcgcagcaagaacggttataacccacctggtcaaccaccttggccattaccccatgagtggtggtccggcaatgttaacatcgcaggtttgtgagaaccacgacaaccactactctgagagcaccgagctgagccccgagctgttcgagagtcctaatattcaatttttcgttttaaacaataccaccctcgtgtcttgcatccaaataaggtccgaagaaaacatgcccggaggtggcctttcagctggacttgcctccgctaattctaatgtcagaatcattgtaagagacctgtcggggaagtactcatgggatagcgccatcttgtacggacccccaccagtgtccggactttcagaacctacgtcctttatgctgtcactgtcacatcaagagaaacccgaggaaccaccaacttccaacgagtgtctggaggacatcacggtgaaggacggcctgtcactacagtttaagaggtttcgcgagactgtgccaacgtgggacactatccgggacgaagaagatgtgctcgacgagctgctgcaataccttggagtaacatctccagaatgtttacagcggactgggatctccttaaacattcccgctccccagcccgtgtgtatctctgagaaacaggaaaacgatgttatcaatgccatcttaaaacagcacacagaagaaaaagagtttgtcgaaaaacacttcaacgatctaaacatgaaggcagtggaacaggacgagcctattccccagaagcctcaatctgctttctattattgccggttgctgctgtccatactcggtatgaacagctgggataaacggagatcttttcatttgcttaaaaaaaacgagaaacttcttagggagcttcgaaacttggacagccggcagtgccgggaaacacataagatcgcagtgttctatgtggccgaggggcaggaggataaacatagtatcttaaccaacacaggaggttcgcaagcctacgaagactttgttgctggcctgggctgggaggtgaatcttaccaatcactgcggattcatgggagggctacagaagaataagtccaccggactgacaaccccttacttcgccacaagcacagtggaggtgatatttcacgtgtcaactagaatgccctctgactctgatgattcactgaccaagaagctcaggcacttgggaaacgacgaggtgcatatagtgtggagcgagcacacccgggactaccgccgtggaattattcccaccgaattcggtgacgtccttattgtcatctatcctatgaaaaaccatatgttctcaatccaaattatgaagaaacccgaagtgcccttcttcggaccactgttcgacggggcaattgttaacggtaaggtgctgccaatcatggtgcgtgctacagcaatcaacgcctcgagggcccttaagtctctgatcccattgtaccaaaatttttacgaggagcgggctaggtaccttcaaaccatagtgcagcaccaccttgagccaactaccttcgaagacttcgccgcacaggtcttctcccctgctccttaccatcatctaccaagcgatgctgaccatta

SEQ ID NO: 103339 - DNA, 8004 bp, Artificial Sequence
  derived and/or modified sequence
agggagagagttgtgctcctgccgccgagagctccaccttcgtggctctgggtccggggccccggcctgtggcggcgagcggcggccgctggagacgagcggcggcggcaggcggccagcccgggtctgcctcgctccgtgcagggccgggagagggatccgccatattggagctggggccgaaggtgccttggagccgcggcgcgaggcgggtggaggtggcggccctggcctggatcgggaaggagtcggctctgccctggcccgcaaggctggggagctaatgagcctctctggctagtctcctccccgtccactccctccactttctgccgccgggacccggctgggagccggctgtggcagtggcagtggcagtggcagcgacaggatgttctccaagaagccgcacggggacgtgaagaagtccacccagaaggtgctagacaccaagaaggacgcactgactcgcctcaagcacctgcgcatcgtcatcgagaatgcagaatctattgatcttaaacagtttttcgaccaacatttttcacatatatactatgtgttctttgaaaattttgtgactattgaagctagtcttaaacagaaaggtcacaagtctcaaagagaggaattggatgctatactttttatttttgagaaaattttacaacttcttccagaaagaattcatcagcgatggcagtttcatagtattggattgattttaaagaagctacttcacacaggaaactccttaaagattaggcgggaaggtgttcgtcttttcttactatggttgcaagctcttcagaataactgtagcaaagaacagctctggatgttttcatgcttaatccctggattttcagcaccacagtctgaacatggacctcgaactttagataatctcattaatcctccactcaaccttcaagaaactcaagtcactatagaagaaatcactcctcttgtccccccacaatcaggagataaagggcaagaagatctcacaagctattttcttgaagcacttctaaaatacatagtcattcaggtaaaaagtttagaatggaagaacaaagaaaaccaagaaaggggattttcatttttgttttcacattttaagaaatattacttgccttatatttttccaaacatctgtaaggaaaacagtttatatcatcctatacttgacatcccgcagatgagaccaaagccacattatgtcgtgataaagaaagatgctgaaaccaatgaagcaatctattgtacaaaggagcctttcattaaggctcgtgttattgtcattcgttggctggtttctttctggctggagccaaaaccacatacaggacctcatattcctgggatggaaggtgaagtcttgccaaagaatattcagagagcagctgctagtttagtatccagagaagaaagcaaaaatgataatgctgataaaacagacagaactacagaacccgaacagtctcattccaatacaagcactctcacggagcgagaacctagctcatctagtctctgtagtattgatgaagaacatctcacagacattgaaatagttcgcagagttttttcttctaaaaggagtaatgtaaactttgtgacagagatatttcgtcaggcatttttattaccaatttgtgaagcagcagctatgagaaaagtggtaaaagtatatcaagaatggatccaacaagaggaaaaacctttgttcatgcaagagcctgaagaaattgtgatcacttcttcagacctcccttgcattgaaaatgtcacagaccatgatatttcaatggaagaaggagaaaaaagagaagaggaaaatgggaccaatactgctgatcatgttcgaaattccagttgggcaaaaaacggctcctaccaaggtgctcttcataacgcctctgaagaagccacagaacaaaacatacgagctggtacccaggcagttttgcaggtgtttattataaactcatcaaatatatttcttcttgaacctgcaaatgaaataaaaaatcttctggatgaacacacagatatgtgtaaacgcattcttaacatttatcggtacatggttgtacaagtatcaatggacaaaaagacttgggaacagatgctgcttgtgttgctcagagtcacggaatctgtactgaagatgccatcacaagcttttctacagttccaagggaaaaaaaatatgaccttggcaggtcgacttgcaggaccacttttccagacccttatagttgcctggatcaaagcaaacctaaatgtgtacatctcccgagaactttgggatgacttactgtcagtattgtcatcgctgacctattgggaagagttggccactgagtggtcactgactatggagacattaactaaagttttagctaggaatttatatagtttggatctcagtgatttaccattggataagctgagtgaacagaaacaaaaaaagcacaaagggaaaggagttggacatgaatttcagaaagtttcagttgacaagtcattttctagaggatggagtcgtgatcagcctggccaagccccaatgagacagaggagtgcaacaaccactggttctccaggaaccgaaaaggcgaggagtatagtacggcaaaaaactgtcgccatgagaagccgatccattggtgaatgtgctctgccatcggcctatatacgcagtgctaaaagtgctcctgttctgatccatacttccaaacccttcttgcctgatattgttctcactcccctttctgatgagctttcagatattgatgatgctcaaatacttccccgctcaactagagtcagacatttttcacaaagtgaagaaactggaaatgaagtttttggtgctttgaatgaggagcagccattgcctcgaagtagcagcacttctgacatcttggaaccattcactgttgaacgagccaaagtcaataaagaggacatgagccaaaaactgcctcctcttaatagtgatattggcggcagcagtgctaatgttcctgatctgatggatgagtttatagcagaacgacttcgaagtggtaatgcctcgactatgacaagaagaggaagtagtccaggcagcctggaaattcccaaagacctccctgatattctaaacaagcagaaccagatgcgccctattgatgacccaggtgtgccctcagaatggacttctcctgccagtgcagggagcagtgatcttatcagctcagatagtcattcggattctttcagcgctttccaatatgatggccgaaaatttgacaattttggctttggaaccgacactggggttacgtcctctgctgatgtggattcaggttctggccatcatcagagtgctgaagagcaggaagtggctagtctaactactcttcatatagattctgaaacaagcagtcttaatcagcaagctttctctgctgaagttgcaactattactggttcagaaagtgcttccccagtccactcacctctgggctccaggtcacagactccttccccttctacattgaatatagatcacatggaacagaaggatctgcagctcgacgagaagctccaccactctgttcttcagacaccagatgatctagaaattagtgaatttccatcagaatgttgtagtgtgatggcaggaggtactctgactggatggcatgctgatgttgctactgtaatgtggcgaagaatgctaggcattttgggagatgtaaattcaatcatggatcctgaaatacatgctcaagtttttgattacctctgtgaactttggcagaatctagctaagattagagataaccttggcatttcaactgataacctgacctccccttctccaccagttttaattcctccactgagaattcttacaccttggctttttaaggcaaccatgttgactgataaatataaacaaggtaaattacatgcatataaacttatttgtaatacaatgaaaagaagacaagatgtttctccaaatagagattttctaacacatttctacaatataatgcattgtggattacttcatattgaccaggatattgtcaatacaatcatcaaacactgctcacctcaatttttttcacttggtttgcctggtgccacaatgcttattatggattttattgtagcagctggtagagtggcttcttcagcttttctcaatgcaccaagagtagaagcacaagttcttctgggatctttggtttgctttcccaacttatattgtgaactgccttctcttcatcccaacattcctgatgttgctgtgtctcagtttacagatgttaaggaacttataatcaaaactgtattaagctcggcaagagatgagccctctggtcctgcacgatgtgtagcactttgtagtttaggtatttggatttgtgaagaactagtccatgagtctcatcatcctcaaattaaggaagctctgaatgtgatttgtgtttccttaaagtttactaataaaacagtagcccacgtagcttgtaacatgcttcacatgctggttcattatgtacctagacttcagatttaccagcctgattctcccttgaaaattattcaaatcctaatagctaccatcacccatcttttaccaagtacagaggcttcatcttatgaaatggacaagaggttggtagtatctttacttctctgccttctggactggatcatggccttacctctaaagacactgctccaaccatttcatgctacgggagcagaaagcgataaaacagaaaaatctgttctcaattgcatttataaggttttacatgggtgtgtttatggagctcagtgttttagcaatccaaggtattttcccatgagcctctctgatttggcatctgtagattatgatccttttatgcatttggaaagtctgaaagagcctgagcctctgcactctcctgactcagaacgatcttctaaactccagccagtaacagaagtgaaaactcaaatgcagcatggattaatctctatagcagcccgcactgttattacacatctggtaaatcacctgggccattatccaatgagcggtggtcctgctatgctaacaagtcaggtgtgtgaaaatcacgacaatcattacagtgaaagtactgaactttctcctgaactctttgagagtccaaatatccagttctttgtgttaaataatacaaccttagtgtcctgtatccagatcagatcagaagagaatatgcctggaggaggtttatctgctggccttgcatcagccaattcaaatgtcagaatcatagtacgtgatctctctggaaaatattcatgggattctgctatactgtatggcccacctcctgtaagtggcttgtcagaacctacatctttcatgctttcattgtctcaccaagagaagccagaagagcctccgacatctaatgaatgcttagaagatataaccgtaaaagatggactttctctccagtttaaaagatttagagaaactgtaccaacttgggatacaataagagatgaagaagatgttcttgatgagctcttgcagtatttgggtgttactagtcctgaatgcttacagagaactggaatctcacttaatattcctgctccacaacctgtgtgcatttctgaaaaacaagaaaatgatgttattaatgctatccttaagcaacatacagaagaaaaagaatttgttgagaagcactttaatgacttaaacatgaaagctgtggaacaagatgaaccaatacctcaaaaacctcagtcagcattttattattgcagattgcttcttagtatattgggaatgaattcctgggacaaacggaggagctttcatctcctgaagaaaaatgaaaagctacttagagaacttaggaacttggattcaaggcagtgccgagagacacacaagattgcagtattttatgttgctgaaggacaagaagacaaacactccattctcaccaatacaggaggaagtcaagcatatgaagattttgtagctggtcttggttgggaggtaaatcttacaaaccattgtggttttatgggaggactacaaaaaaacaaaagcactggattgaccactccatattttgctacctctacagtagaggtaatatttcacgtgtcaacaagaatgccttctgattctgatgattctttgaccaaaaaattgagacatttgggaaatgatgaagtgcacattgtttggtcagagcatactagagactacaggagaggaattattcccacagaatttggtgatgtccttattgtaatatatccaatgaaaaatcacatgttcagtattcagataatgaaaaaaccagaggttcccttctttggtcccctttttgatggtgctattgtgaatggaaaggttctacccattatggttagagcaacagctataaatgcaagccgtgctctgaaatctctgattccattgtatcaaaacttctatgaggagagagcacgatacctgcaaacaattgtccagcaccacttagaaccaacaacatttgaagattttgcagcacaggttttttctccagctccctaccaccatttaccatctgatgccgatcattaaatatcagttctgtttatctgaaggctcctacccagagattctacccagtgaaactcccacagcaacgcaggtagatggggctgacctggcctctccaatgtctcctcgaactagcaaaagccgcatgtccatgaagctgcgtcgttcctctggctcagccaataaatcctaaggagacaagcagcccagcagtgatcagcagtagccaccttagcacgaacatagggttaaccctttcaggccttcatgtctgccataacatgcatgtttcttcctgtacatttatttgagaaaacactggatttaaataattttaaataatttgtagcttaatattaaagatttaagttatttattgtttcattttttttcccacaatccaagctgccatattttgagggcagggggagttttattctacaccctttaccttcctagataattatgtctaagtagttttatctttaatttcatggttaactgtgagccaaaatacaattggacaattagtctcattatttattgtgccccattgcaactttatggttcaataaatatataattttttacaaatgtaaaattttacatttaagcatttgtaaagttacagcaaaagatgtacctgttaatacacagaatgtgtacagattatttgttatgacaataaaacactcaaaataaatggtctttagcatctcaaattccaactgaaatcattttagtattaactcttcttcccaaagcaatgtctcatttcttggctgtgcaggtgatgccatgttatatccaataactagaaaaatcactgtgctgaacttttatgtttagcttccaagtatttttctaatgttttgcatttcaagtggtatcactgttaaatgccatttgttttcagattgtggccttttattattggctgctagatcctggtgtttctatgttcttttttaagcaccaaaaagaagatggggaagaaaagaaggaaaattttctgatataaatatgttgttcaaattatgagtattatttaaaaaagaaaaaggaacataacccaggagtctaagttaaatctaatattgttaatactgaacttgcaggtccaggttggtatacattccaccctctagaagtattttcttacagtagataagctgctcacattttgttttgaatgggcatctcctgaggaaatgtagcatgacattggtactaactgcatgtgtaaatacatcatactggcaaaccgtaaaatataaattatgtatcatcattcatgtagtatctataatttgtaacagtgggggggaaagatgacatggtatttaataatacaataaaaatattcttatcacttcctatcc

SEQ ID NO: 103340 - DNA, 6250 bp, Artificial Sequence
  derived and/or modified sequence
atgttctccaagaagccgcacggggacgtgaagaagtccacccagaaggtgctagacaccaagaaggacgcactgactcgcctcaagcacctgcgcatcgtcatcgagaatgcagaatctattgatcttaaacagtttttcgaccaacatttttcacatatatactatgtgttctttgaaaattttgtgactattgaagctagtcttaaacagaaaggtcacaagtctcaaagagaggaattggatgctatactttttatttttgagaaaattttacaacttcttccagaaagaattcatcagcgatggcagtttcatagtattggattgattttaaagaagctacttcacacaggaaactccttaaagattaggcgggaaggtgttcgtcttttcttactatggttgcaagctcttcagaataactgtagcaaagaacagctctggatgttttcatgcttaatccctggattttcagcaccacagtctgaacatggacctcgaactttagataatctcattaatcctccactcaaccttcaagaaactcaagtcactatagaagaaatcactcctcttgtccccccacaatcaggagataaagggcaagaagatctcacaagctattttcttgaagcacttctaaaatacatagtcattcaggtaaaaagtttagaatggaagaacaaagaaaaccaagaaaggggattttcatttttgttttcacattttaagaaatattacttgccttatatttttccaaacatctgtaaggaaaacagtttatatcatcctatacttgacatcccgcagatgagaccaaagccacattatgtcgtgataaagaaagatgctgaaaccaatgaagcaatctattgtacaaaggagcctttcattaaggctcgtgttattgtcattcgttggctggtttctttctggctggagccaaaaccacatacaggacctcatattcctgggatggaaggtgaagtcttgccaaagaatattcagagagcagctgctagtttagtatccagagaagaaagcaaaaatgataatgctgataaaacagacagaactacagaacccgaacagtctcattccaatacaagcactctcacggagcgagaacctagctcatctagtctctgtagtattgatgaagaacatctcacagacattgaaatagttcgcagagttttttcttctaaaaggagtaatgtaaactttgtgacagagatatttcgtcaggcatttttattaccaatttgtgaagcagcagctatgagaaaagtggtaaaagtatatcaagaatggatccaacaagaggaaaaacctttgttcatgcaagagcctgaagaaattgtgatcacttcttcagacctcccttgcattgaaaatgtcacagaccatgatatttcaatggaagaaggagaaaaaagagaagaggaaaatgggaccaatactgctgatcatgttcgaaattccagttgggcaaaaaacggctcctaccaaggtgctcttcataacgcctctgaagaagccacagaacaaaacatacgagctggtacccaggcagttttgcaggtgtttattataaactcatcaaatatatttcttcttgaacctgcaaatgaaataaaaaatcttctggatgaacacacagatatgtgtaaacgcattcttaacatttatcggtacatggttgtacaagtatcaatggacaaaaagacttgggaacagatgctgcttgtgttgctcagagtcacggaatctgtactgaagatgccatcacaagcttttctacagttccaagggaaaaaaaatatgaccttggcaggtcgacttgcaggaccacttttccagacccttatagttgcctggatcaaagcaaacctaaatgtgtacatctcccgagaactttgggatgacttactgtcagtattgtcatcgctgacctattgggaagagttggccactgagtggtcactgactatggagacattaactaaagttttagctaggaatttatatagtttggatctcagtgatttaccattggataagctgagtgaacagaaacaaaaaaagcacaaagggaaaggagttggacatgaatttcagaaagtttcagttgacaagtcattttctagaggatggagtcgtgatcagcctggccaagccccaatgagacagaggagtgcaacaaccactggttctccaggaaccgaaaaggcgaggagtatagtacggcaaaaaactgtcgccatgagaagccgatccattggtgaatgtgctctgccatcggcctatatacgcagtgctaaaagtgctcctgttctgatccatacttccaaacccttcttgcctgatattgttctcactcccctttctgatgagctttcagatattgatgatgctcaaatacttccccgctcaactagagtcagacatttttcacaaagtgaagaaactggaaatgaagtttttggtgctttgaatgaggagcagccattgcctcgaagtagcagcacttctgacatcttggaaccattcactgttgaacgagccaaagtcaataaagaggacatgagccaaaaactgcctcctcttaatagtgatattggcggcagcagtgctaatgttcctgatctgatggatgagtttatagcagaacgacttcgaagtggtaatgcctcgactatgacaagaagaggaagtagtccaggcagcctggaaattcccaaagacctccctgatattctaaacaagcagaaccagatgcgccctattgatgacccaggtgtgccctcagaatggacttctcctgccagtgcagggagcagtgatcttatcagctcagatagtcattcggattctttcagcgctttccaatatgatggccgaaaatttgacaattttggctttggaaccgacactggggttacgtcctctgctgatgtggattcaggttctggccatcatcagagtgctgaagagcaggaagtggctagtctaactactcttcatatagattctgaaacaagcagtcttaatcagcaagctttctctgctgaagttgcaactattactggttcagaaagtgcttccccagtccactcacctctgggctccaggtcacagactccttccccttctacattgaatatagatcacatggaacagaaggatctgcagctcgacgagaagctccaccactctgttcttcagacaccagatgatctagaaattagtgaatttccatcagaatgttgtagtgtgatggcaggaggtactctgactggatggcatgctgatgttgctactgtaatgtggcgaagaatgctaggcattttgggagatgtaaattcaatcatggatcctgaaatacatgctcaagtttttgattacctctgtgaactttggcagaatctagctaagattagagataaccttggcatttcaactgataacctgacctccccttctccaccagttttaattcctccactgagaattcttacaccttggctttttaaggcaaccatgttgactgataaatataaacaaggtaaattacatgcatataaacttatttgtaatacaatgaaaagaagacaagatgtttctccaaatagagattttctaacacatttctacaatataatgcattgtggattacttcatattgaccaggatattgtcaatacaatcatcaaacactgctcacctcaatttttttcacttggtttgcctggtgccacaatgcttattatggattttattgtagcagctggtagagtggcttcttcagcttttctcaatgcaccaagagtagaagcacaagttcttctgggatctttggtttgctttcccaacttatattgtgaactgccttctcttcatcccaacattcctgatgttgctgtgtctcagtttacagatgttaaggaacttataatcaaaactgtattaagctcggcaagagatgagccctctggtcctgcacgatgtgtagcactttgtagtttaggtatttggatttgtgaagaactagtccatgagtctcatcatcctcaaattaaggaagctctgaatgtgatttgtgtttccttaaagtttactaataaaacagtagcccacgtagcttgtaacatgcttcacatgctggttcattatgtacctagacttcagatttaccagcctgattctcccttgaaaattattcaaatcctaatagctaccatcacccatcttttaccaagtacagaggcttcatcttatgaaatggacaagaggttggtagtatctttacttctctgccttctggactggatcatggccttacctctaaagacactgctccaaccatttcatgctacgggagcagaaagcgataaaacagaaaaatctgttctcaattgcatttataaggttttacatgggtgtgtttatggagctcagtgttttagcaatccaaggtattttcccatgagcctctctgatttggcatctgtagattatgatccttttatgcatttggaaagtctgaaagagcctgagcctctgcactctcctgactcagaacgatcttctaaactccagccagtaacagaagtgaaaactcaaatgcagcatggattaatctctatagcagcccgcactgttattacacatctggtaaatcacctgggccattatccaatgagcggtggtcctgctatgctaacaagtcaggtgtgtgaaaatcacgacaatcattacagtgaaagtactgaactttctcctgaactctttgagagtccaaatatccagttctttgtgttaaataatacaaccttagtgtcctgtatccagatcagatcagaagagaatatgcctggaggaggtttatctgctggccttgcatcagccaattcaaatgtcagaatcatagtacgtgatctctctggaaaatattcatgggattctgctatactgtatggcccacctcctgtaagtggcttgtcagaacctacatctttcatgctttcattgtctcaccaagagaagccagaagagcctccgacatctaatgaatgcttagaagatataaccgtaaaagatggactttctctccagtttaaaagatttagagaaactgtaccaacttgggatacaataagagatgaagaagatgttcttgatgagctcttgcagtatttgggtgttactagtcctgaatgcttacagagaactggaatctcacttaatattcctgctccacaacctgtgtgcatttctgaaaaacaagaaaatgatgttattaatgctatccttaagcaacatacagaagaaaaagaatttgttgagaagcactttaatgacttaaacatgaaagctgtggaacaagatgaaccaatacctcaaaaacctcagtcagcattttattattgcagattgcttcttagtatattgggaatgaattcctgggacaaacggaggagctttcatctcctgaagaaaaatgaaaagctacttagagaacttaggaacttggattcaaggcagtgccgagagacacacaagattgcagtattttatgttgctgaaggacaagaagacaaacactccattctcaccaatacaggaggaagtcaagcatatgaagattttgtagctggtcttggttgggaggtaaatcttacaaaccattgtggttttatgggaggactacaaaaaaacaaaagcactggattgaccactccatattttgctacctctacagtagaggtaatatttcacgtgtcaacaagaatgccttctgattctgatgattctttgaccaaaaaattgagacatttgggaaatgatgaagtgcacattgtttggtcagagcatactagagactacaggagaggaattattcccacagaatttggtgatgtccttattgtaatatatccaatgaaaaatcacatgttcagtattcagataatgaaaaaaccagaggttcccttctttggtcccctttttgatggtgctattgtgaatggaaaggttctacccattatggttagagcaacagctataaatgcaagccgtgctctgaaatctctgattccattgtatcaaaacttctatgaggagagagcacgatacctgcaaacaattgtccagcaccacttagaaccaacaacatttgaagattttgcagcacaggttttttctccagctccctaccaccatttaccatctgatgccgatcatt

SEQ ID NO: 103341 - DNA, 6252 bp, Artificial Sequence
  derived and/or modified sequence
atgttcagcaagaagccccacggcgacgtgaagaagagcacccagaaggtgctggacaccaagaaggacgccctgaccagactgaagcacctgagaatcgtgatcgagaacgccgagagcatcgacctgaagcagttcttcgaccagcacttcagccacatctactacgtgttcttcgagaacttcgtgaccatcgaggccagcctgaagcagaagggccacaagagccagagagaggagctggacgccatcctgttcatcttcgagaagatcctgcagctgctgcccgagagaatccaccagagatggcagttccacagcatcggcctgatcctgaagaagctgctgcacaccggcaacagcctgaagatcagaagagagggcgtgagactgttcctgctgtggctgcaggccctgcagaacaactgcagcaaggagcagctgtggatgttcagctgcctgatccccggcttcagcgccccccagagcgagcacggccccagaaccctggacaacctgatcaacccccccctgaacctgcaggagacccaggtgaccatcgaggagatcacccccctggtgcccccccagagcggcgacaagggccaggaggacctgaccagctacttcctggaggccctgctgaagtacatcgtgatccaggtgaagagcctggagtggaagaacaaggagaaccaggagagaggcttcagcttcctgttcagccacttcaagaagtactacctgccctacatcttccccaacatctgcaaggagaacagcctgtaccaccccatcctggacatcccccagatgagacccaagccccactacgtggtgatcaagaaggacgccgagaccaacgaggccatctactgcaccaaggagcccttcatcaaggccagagtgatcgtgatcagatggctggtgagcttctggctggagcccaagccccacaccggcccccacatccccggcatggagggcgaggtgctgcccaagaacatccagagagccgccgccagcctggtgagcagagaggagagcaagaacgacaacgccgacaagaccgacagaaccaccgagcccgagcagagccacagcaacaccagcaccctgaccgagagagagcccagcagcagcagcctgtgcagcatcgacgaggagcacctgaccgacatcgagatcgtgagaagagtgttcagcagcaagagaagcaacgtgaacttcgtgaccgagatcttcagacaggccttcctgctgcccatctgcgaggccgccgccatgagaaaggtggtgaaggtgtaccaggagtggatccagcaggaggagaagcccctgttcatgcaggagcccgaggagatcgtgatcaccagcagcgacctgccctgcatcgagaacgtgaccgaccacgacatcagcatggaggagggcgagaagagagaggaggagaacggcaccaacaccgccgaccacgtgagaaacagcagctgggccaagaacggcagctaccagggcgccctgcacaacgccagcgaggaggccaccgagcagaacatcagagccggcacccaggccgtgctgcaggtgttcatcatcaacagcagcaacatcttcctgctggagcccgccaacgagatcaagaacctgctggacgagcacaccgacatgtgcaagagaatcctgaacatctacagatacatggtggtgcaggtgagcatggacaagaagacctgggagcagatgctgctggtgctgctgagagtgaccgagagcgtgctgaagatgcccagccaggccttcctgcagttccagggcaagaagaacatgaccctggccggcagactggccggccccctgttccagaccctgatcgtggcctggatcaaggccaacctgaacgtgtacatcagcagagagctgtgggacgacctgctgagcgtgctgagcagcctgacctactgggaggagctggccaccgagtggagcctgaccatggagaccctgaccaaggtgctggccagaaacctgtacagcctggacctgagcgacctgcccctggacaagctgagcgagcagaagcagaagaagcacaagggcaagggcgtgggccacgagttccagaaggtgagcgtggacaagagcttcagcagaggctggagcagagaccagcccggccaggcccccatgagacagagaagcgccaccaccaccggcagccccggcaccgagaaggccagaagcatcgtgagacagaagaccgtggccatgagaagcagaagcatcggcgagtgcgccctgcccagcgcctacatcagaagcgccaagagcgcccccgtgctgatccacaccagcaagcccttcctgcccgacatcgtgctgacccccctgagcgacgagctgagcgacatcgacgacgcccagatcctgcccagaagcaccagagtgagacacttcagccagagcgaggagaccggcaacgaggtgttcggcgccctgaacgaggagcagcccctgcccagaagcagcagcaccagcgacatcctggagcccttcaccgtggagagagccaaggtgaacaaggaggacatgagccagaagctgccccccctgaacagcgacatcggcggcagcagcgccaacgtgcccgacctgatggacgagttcatcgccgagagactgagaagcggcaacgccagcaccatgaccagaagaggcagcagccccggcagcctggagatccccaaggacctgcccgacatcctgaacaagcagaaccagatgagacccatcgacgaccccggcgtgcccagcgagtggaccagccccgccagcgccggcagcagcgacctgatcagcagcgacagccacagcgacagcttcagcgccttccagtacgacggcagaaagttcgacaacttcggcttcggcaccgacaccggcgtgaccagcagcgccgacgtggacagcggcagcggccaccaccagagcgccgaggagcaggaggtggccagcctgaccaccctgcacatcgacagcgagaccagcagcctgaaccagcaggccttcagcgccgaggtggccaccatcaccggcagcgagagcgccagccccgtgcacagccccctgggcagcagaagccagacccccagccccagcaccctgaacatcgaccacatggagcagaaggacctgcagctggacgagaagctgcaccacagcgtgctgcagacccccgacgacctggagatcagcgagttccccagcgagtgctgcagcgtgatggccggcggcaccctgaccggctggcacgccgacgtggccaccgtgatgtggagaagaatgctgggcatcctgggcgacgtgaacagcatcatggaccccgagatccacgcccaggtgttcgactacctgtgcgagctgtggcagaacctggccaagatcagagacaacctgggcatcagcaccgacaacctgaccagccccagcccccccgtgctgatcccccccctgagaatcctgaccccctggctgttcaaggccaccatgctgaccgacaagtacaagcagggcaagctgcacgcctacaagctgatctgcaacaccatgaagagaagacaggacgtgagccccaacagagacttcctgacccacttctacaacatcatgcactgcggcctgctgcacatcgaccaggacatcgtgaacaccatcatcaagcactgcagcccccagttcttcagcctgggcctgcccggcgccaccatgctgatcatggacttcatcgtggccgccggcagagtggccagcagcgccttcctgaacgcccccagagtggaggcccaggtgctgctgggcagcctggtgtgcttccccaacctgtactgcgagctgcccagcctgcaccccaacatccccgacgtggccgtgagccagttcaccgacgtgaaggagctgatcatcaagaccgtgctgagcagcgccagagacgagcccagcggccccgccagatgcgtggccctgtgcagcctgggcatctggatctgcgaggagctggtgcacgagagccaccacccccagatcaaggaggccctgaacgtgatctgcgtgagcctgaagttcaccaacaagaccgtggcccacgtggcctgcaacatgctgcacatgctggtgcactacgtgcccagactgcagatctaccagcccgacagccccctgaagatcatccagatcctgatcgccaccatcacccacctgctgcccagcaccgaggccagcagctacgagatggacaagagactggtggtgagcctgctgctgtgcctgctggactggatcatggccctgcccctgaagaccctgctgcagcccttccacgccaccggcgccgagagcgacaagaccgagaagagcgtgctgaactgcatctacaaggtgctgcacggctgcgtgtacggcgcccagtgcttcagcaaccccagatacttccccatgagcctgagcgacctggccagcgtggactacgaccccttcatgcacctggagagcctgaaggagcccgagcccctgcacagccccgacagcgagagaagcagcaagctgcagcccgtgaccgaggtgaagacccagatgcagcacggcctgatcagcatcgccgccagaaccgtgatcacccacctggtgaaccacctgggccactaccccatgagcggcggccccgccatgctgaccagccaggtgtgcgagaaccacgacaaccactacagcgagagcaccgagctgagccccgagctgttcgagagccccaacatccagttcttcgtgctgaacaacaccaccctggtgagctgcatccagatcagaagcgaggagaacatgcccggcggcggcctgagcgccggcctggccagcgccaacagcaacgtgagaatcatcgtgagagacctgagcggcaagtacagctgggacagcgccatcctgtacggccccccccccgtgagcggcctgagcgagcccaccagcttcatgctgagcctgagccaccaggagaagcccgaggagccccccaccagcaacgagtgcctggaggacatcaccgtgaaggacggcctgagcctgcagttcaagagattcagagagaccgtgcccacctgggacaccatcagagacgaggaggacgtgctggacgagctgctgcagtacctgggcgtgaccagccccgagtgcctgcagagaaccggcatcagcctgaacatccccgccccccagcccgtgtgcatcagcgagaagcaggagaacgacgtgatcaacgccatcctgaagcagcacaccgaggagaaggagttcgtggagaagcacttcaacgacctgaacatgaaggccgtggagcaggacgagcccatcccccagaagccccagagcgccttctactactgcagactgctgctgagcatcctgggcatgaacagctgggacaagagaagaagcttccacctgctgaagaagaacgagaagctgctgagagagctgagaaacctggacagcagacagtgcagagagacccacaagatcgccgtgttctacgtggccgagggccaggaggacaagcacagcatcctgaccaacaccggcggcagccaggcctacgaggacttcgtggccggcctgggctgggaggtgaacctgaccaaccactgcggcttcatgggcggcctgcagaagaacaagagcaccggcctgaccaccccctacttcgccaccagcaccgtggaggtgatcttccacgtgagcaccagaatgcccagcgacagcgacgacagcctgaccaagaagctgagacacctgggcaacgacgaggtgcacatcgtgtggagcgagcacaccagagactacagaagaggcatcatccccaccgagttcggcgacgtgctgatcgtgatctaccccatgaagaaccacatgttcagcatccagatcatgaagaagcccgaggtgcccttcttcggccccctgttcgacggcgccatcgtgaacggcaaggtgctgcccatcatggtgagagccaccgccatcaacgccagcagagccctgaagagcctgatccccctgtaccagaacttctacgaggagagagccagatacctgcagaccatcgtgcagcaccacctggagcccaccaccttcgaggacttcgccgcccaggtgttcagccccgccccctaccaccacctgcccagcgacgccgaccactag

SEQ ID NO: 103342 - protein, 309 aa, Artificial Sequence
  derived and/or modified sequence
MRLGSPGLLFLLFSSLRADTQEKEVRAMVGSDVELSCACPEGSRFDLNDVYVYWQTSESKTVVTYHIPQNSSLENVDSRYRNRALMSPAGMLRGDFSLRLFNVTPQDEQKFHCLVLSQSLGFQEVLSVEVTLHVAANFSVPVVSAPHSPSQDELTFTCTSINGYPRPNVYWINKTDNSLLDQALQNDTVFLNMRGLYDVVSVLRIARTPSVNIGCCIENVLLQQNLTVGSQTGNDIGERDKITENPVSTGEKNAATWSILAVLCLLVVVAVAIGWVCRDRCLQHSYAGAWAVSPETELTESWNLLLLLS

SEQ ID NO: 103343 - DNA, 930 bp, Artificial Sequence
  derived and/or modified sequence
atgcgcctcggatcaccggggctgctgttcctcctcttttcctctctccgcgctgacacgcaggagaaggaggttcgcgccatggttggcagcgacgtggagctcagctgcgcatgtcctgagggtagtcgctttgatctgaacgatgtgtacgtatactggcagaccagcgagagcaagactgtcgtcacataccacatcccacaaaactcttccctcgagaatgttgattcaaggtaccgcaatagggctctgatgtcccctgcaggtatgctgcgtggggatttctccctcagattgttcaacgtgaccccgcaagatgaacagaaattccattgtctcgtcctgagccagagccttggcttccaggaagttctctcagtcgaggtcactctgcacgtcgcggcaaacttctccgtgcctgtggtgtccgctccacactctccaagccaagacgagcttacgttcacctgcacatccatcaatggctatccaagacctaacgtctactggattaataagaccgacaactctcttctcgaccaggccttgcagaacgacaccgtattcctgaacatgagagggttatacgatgttgtgtcggtgctaagaatagccagaacccctagcgtgaatattggctgttgtatcgaaaacgtgctgttgcagcagaacctgaccgtgggcagtcagacaggaaatgacataggtgagcgcgataagattaccgagaatcctgtcagtactggagagaaaaacgccgccacctggagcatacttgccgtgctttgtctgttggtggtggtcgctgttgctattgggtgggtgtgtagagaccgatgcctgcaacatagctatgcaggggcctgggccgtgtcaccagagactgagctgactgaatcctggaacttgcttctcctgttgtcgtag

SEQ ID NO: 103344 - DNA, 930 bp, Artificial Sequence
  derived and/or modified sequence
atgaggctgggcagccctggcctgctcttcctgctcttcagcagcctgcgggctgacacccaggagaaggaggtgcgggccatggtgggcagtgatgtggagctgagctgtgcctgcccagagggcagcagatttgacctgaatgatgtgtatgtgtactggcagaccagcgagagcaagacagtggtgacctaccacatcccccagaacagcagcctggagaatgtggacagccgctacagaaacagagccctgatgagccctgctggcatgctgcggggggacttcagcctgcggctcttcaacgtgaccccccaggatgagcagaagttccactgcctggtgctgagccagagcctgggcttccaggaggtgctgtctgtggaggtgaccctgcacgtggccgccaacttctctgtgcctgtggtgtctgccccccacagccccagccaggatgagctgaccttcacctgcaccagcatcaatggctacccccggcccaacgtgtactggatcaacaagacagacaacagcctgctggaccaggccctgcagaatgacaccgtcttcctgaacatgaggggcctgtatgatgtggtgtctgtgctgagaattgcccggacccccagcgtgaacatcggctgctgcattgaaaatgtgctgctgcagcagaacctgactgtgggcagccagacaggaaatgacatcggggagcgggacaagatcacagagaaccctgtgtccactggagagaagaatgctgccacctggagcatcctggccgtgctgtgcctgctggtggtggtggccgtggccatcggctgggtgtgccgggaccgctgcctgcagcacagctatgctggggcctgggccgtgtccccagagacagagctgacagagagctggaacctgctgctgctgctgtcctag

SEQ ID NO: 103345 - DNA, 930 bp, Artificial Sequence
  derived and/or modified sequence
atgcggctgggcagccccggcctgctgttcctgctgttcagcagcctgcgcgctgatacccaggagaaagaagtcagggctatggtgggatcagacgtagagctgtcttgtgcctgtccagaggggagccgattcgatctcaacgatgtctacgtgtactggcagacgtctgagagcaaaacagttgtaacctaccatattccccagaattcctcgctggaaaacgttgattcacggtaccggaacagggctttaatgtcccccgcaggaatgctccgcggggacttctccctcagattgttcaatgtgacaccccaagacgagcagaagttccactgcctggtgttgtcccagtcactcgggtttcaagaggtcctatccgtagaggttacactgcacgttgcagcaaattttagcgttccggtcgtttctgctcctcactctccatcccaggatgaattgaccttcacttgtacatccataaatggatatcctagaccaaatgtctattggatcaacaagaccgataattctctgctggatcaggcgctgcagaatgatacagtcttcctcaacatgcggggcttgtacgacgtggtcagcgttctgcgtattgcaagaaccccttctgttaacattggctgttgtattgagaacgtattactgcaacagaatctgacagtgggttcccagacaggcaacgacataggagaaagggacaagataacagaaaaccccgtgtctacaggcgagaaaaatgcagccacctggtccatacttgccgtgctctgtctcctggtggtggtggcagttgcaattggatgggtttgtcgcgataggtgtctgcaacactcctacgctggagcttgggcagtctcccccgagacagagctcacggagagctggaatctacttctgctcctctcctag

SEQ ID NO: 103346 - DNA, 930 bp, Artificial Sequence
  derived and/or modified sequence
atgcgtctgggctcccctggcctactgttcttgctgtttagttcccttcgagcagacacacaggaaaaggaggtgagagctatggtcggctcagacgttgaattatcatgtgcgtgcccggaagggagcaggtttgacctcaatgatgtatatgtgtactggcagacttctgaaagtaaaactgtggtgacataccatataccacaaaacagtagcctggagaatgtggactcacggtatagaaatcgggcacttatgtccccagctggcatgctgcggggagatttttctctgaggctctttaatgtgacacctcaggatgaacagaagtttcattgcttggtcctgtcccagtccctgggctttcaggaagtgctgtccgtggaagtgactttgcatgtcgcggcaaatttctccgtccccgtagtaagcgcaccccattcaccctctcaggacgagttgacattcacatgtacaagtataaatgggtaccccagacccaatgtgtattggattaataagactgataactccctactcgaccaagccctccaaaatgataccgtgtttctcaatatgcgtggcctatacgatgtggtttccgtgctgcgtatcgcacgcacgccgtccgtgaatattgggtgctgtatagagaatgtgcttctacaacagaacctcacggtgggttcccagaccggcaacgatataggcgaacgggataaaatcactgagaatcccgtgtcaacaggggagaagaacgctgctacatggtccatcctggctgtgctgtgcttgctggtcgtagtggcagtggctattggctgggtgtgccgggatcgatgcctccagcatagctacgctggggcttgggctgtgagtcccgagacagagctgactgaaagctggaacttgcttctgctgctgtcttag

SEQ ID NO: 103347 - DNA, 930 bp, Artificial Sequence
  derived and/or modified sequence
atgagactgggcagccccggcctgctgttcctgctgttcagcagcctgagagccgacacccaggagaaggaggtgagagccatggtgggcagcgacgtggagctgagctgcgcctgccccgagggcagcagattcgacctgaacgacgtgtacgtgtactggcagaccagcgagagcaagaccgtggtgacctaccacatcccccagaacagcagcctggagaacgtggacagcagatacagaaacagagccctgatgagccccgccggcatgctgagaggcgacttcagcctgagactgttcaacgtgaccccccaggacgagcagaagttccactgcctggtgctgagccagagcctgggcttccaggaggtgctgagcgtggaggtgaccctgcacgtggccgccaacttcagcgtgcccgtggtgagcgccccccacagccccagccaggacgagctgaccttcacctgcaccagcatcaacggctaccccagacccaacgtgtactggatcaacaagaccgacaacagcctgctggaccaggccctgcagaacgacaccgtgttcctgaacatgagaggcctgtacgacgtggtgagcgtgctgagaatcgccagaacccccagcgtgaacatcggctgctgcatcgagaacgtgctgctgcagcagaacctgaccgtgggcagccagaccggcaacgacatcggcgagagagacaagatcaccgagaaccccgtgagcaccggcgagaagaacgccgccacctggagcatcctggccgtgctgtgcctgctggtggtggtggccgtggccatcggctgggtgtgcagagacagatgcctgcagcacagctacgccggcgcctgggccgtgagccccgagaccgagctgaccgagagctggaacctgctgctgctgctgagctag

SEQ ID NO: 103348 - protein, 185 aa, Artificial Sequence
  derived and/or modified sequence
MRLGSPGLLFLLFSSLRAANFSVPVVSAPHSPSQDELTFTCTSINGYPRPNVYWINKTDNSLLDQALQNDTVFLNMRGLYDVVSVLRIARTPSVNIGCCIENVLLQQNLTVGSQTGNDIGERDKITENPVSTGEKNAATWSILAVLCLLVVVAVAIGWVCRDRCLQHSYAGAWAVSPETELTGHV

SEQ ID NO: 103349 - DNA, 558 bp, Artificial Sequence
  derived and/or modified sequence
atgagactggggagccctggactgttgttcctgcttttttcgtcgctgcgggctgccaatttttccgttcctgtggtgtcagctccacattctcccagccaggatgagctgacttttacctgcacgtccatcaacggctatccacggcccaacgtctattggataaataagacagataactcccttctggatcaggccctccagaacgatactgtgtttctgaatatgcgtggtctttacgatgtcgtgagcgtgttaagaatcgcgagaaccccgtccgttaatatcgggtgctgtatagagaatgttctgctgcagcagaatctgacagtggggagccagaccggtaatgatattggggagcgtgacaagattactgaaaaccctgtgagcaccggcgagaagaatgccgccacttggagcattttggctgtgctgtgcttacttgtcgtggtcgctgttgctatcggctgggtttgtcgcgatcgctgtttgcagcactcatacgccggagcctgggcagtgtctccggaaactgagctgaccggtcatgtgtag

SEQ ID NO: 103350 - DNA, 2907 bp, Artificial Sequence
  derived and/or modified sequence
agagcctcgggcgcggcgggagcgcagttagagccgatctcccgcgccccgaggttgctcctctccgaggtctcccgcggcccaagttctccgcgccccgaggtctccgcgccccgaggtctccgcggcccgaggtctccgcccgcaccatgcggctgggcagtcctggactgctcttcctgctcttcagcagccttcgagctgcaaacttcagcgtgcccgtcgtcagcgccccccacagcccctcccaggatgagctcaccttcacgtgtacatccataaacggctaccccaggcccaacgtgtactggatcaataagacggacaacagcctgctggaccaggctctgcagaatgacaccgtcttcttgaacatgcggggcttgtatgacgtggtcagcgtgctgaggatcgcacggacccccagcgtgaacattggctgctgcatagagaacgtgcttctgcagcagaacctgactgtcggcagccagacaggaaatgacatcggagagagagacaagatcacagagaatccagtcagtaccggcgagaaaaacgcggccacgtggagcatcctggctgtcctgtgcctgcttgtggtcgtggcggtggccataggctgggtgtgcagggaccgatgcctccaacacagctatgcaggtgcctgggctgtgagtccggagacagagctcactggccacgtttgaccggagctcaccgcccagagcgtggacagggcttccgtgagacgccaccgtgagaggccaggtggcagcttgagcatggactcccagactgcaggggagcacttggggcagcccccagaaggaccactgctggatcccagggagaacctgctggcgttggctgtgatcctggaatgaggccctttcaaaagcgtcatccacaccaaaggcaaatgtccccaagtgagtgggctccccgctgtcactgccagtcacccacaggaagggactggtgatgggctgtctctacccggagcgtgcgggattcagcaccaggctcttcccagtaccccagacccactgtgggtcttcccgtgggatgcgggatcctgagaccgaagggtgtttggtttaaaaagaagactgggcgtccgctcttccaggacggcctctgtgctgctggggtcacgcgaggctgtttgcaggggacacggtcacaggagctcttctgccctgaacgctcccaacctgcctcccgcccggaagccacaggacccactcatgtgtgtgcccacaagtgtagttagccgtccacaccgaggagcccccggaagtccccactgggcttcagtgtcctctgccacattccctgggaggaacaatgtccctcggctgttccggtgaaaagttgagccacctttggaagacgcacgggtggagtttgccagaagaaaggctgtgccagggccgtgtttggctacaggggctgccggggctcttggctctgcagcgagaaagacacagcccagcagggctggagacgcccatgtccagcaggcgcaggcctggcaacacggtccccagagtcctgagcagcagttaggtgcatggagagggtatcacctggtggccacagtcccccttctcacctcagcaatgatccccaaagtgagaggtggctcccccggcccccaccaccctcagcagccccaccccactcaaccctgagggtccccagggtcctgatgaagacctccgaccccagcgccaggctcctcggagcccaacagtcccaagggggcaggagacggggtggtccagtgctgaggggtacagccctgggccctgaccagccccggcacctgccatgctggttcccggaatgaatcagctgctgactgtctccagaagggctggaaaggatgctgccaggtgacccgaggtgcactcgccccagggagatggagtagacagcctggcctggccctcgggacacattgtctgccccggggctatgggcaaatgcccctccttcttacttcccagaatcccctgacattcccagggtcagccaggacctgttacagccctggtcacttggaactgacagctgtgtgaggcctgcacttctcagacccagacttagaacaaaaggaggagtgaggactcaaggctacaatgaggttccagtacttgttacaagaaattggttttctgcaaaaaaagtccctacctgagcctttaggtgaatgtgggatccactcccgcttttaacatgaaagcattagaagatgtgtggtgtttataaaagaacagttgtcatcaccgggcattgattggcagggacaaggagctgcttgggtgtggaaagttggggcgttggaaagtgggctgtggtgcccatttgcagtgactgtgaagtgactccaggacggacctgcgggggcacccagaggtcctaagccccaggactgagggtcgtgcatcaccactcgggtgtcccgggaggtgccctgggcccggggacctcacaggcaggacggcgacactaatgcagggagagggagtctggccccagcttttcctatcagaggcgattttccttcaccaggggatgggcaggaaagaggcaggggccccagaagcttctgtccctcatgcctgagggcacgggggacacttggaggctgctgtcaccactgtgcgtccaaggccatgctctctgcgggtcagtgcctgagtctcgcctccctgctggtccctgaagccccctcagaagccctgcctgtcacgtcggcatttgtgagacctaccctgtaacgcctgcccctctcagcccaacatcagcttcctctttctcccttgctgtagacaggctggattccagtgttgggacagccatctccagaaacctgacttaagagagtaagatgcaaatcgt

SEQ ID NO: 103351 - DNA, 558 bp, Artificial Sequence
  derived and/or modified sequence
atgaggctgggcagccctggcctgctcttcctgctcttcagcagcctgcgggccgccaacttctctgtgcctgtggtgtctgccccccacagccccagccaggatgagctgaccttcacctgcaccagcatcaatggctacccccggcccaacgtgtactggatcaacaagacagacaacagcctgctggaccaggccctgcagaatgacacagtgttcctgaacatgaggggcctgtatgatgtggtgtctgtgctgcgcatcgcccggaccccatctgtgaacatcggctgctgcattgaaaatgtgctgctgcagcagaacctgactgtgggcagccagacaggaaatgacattggagagcgggacaagatcacagaaaatcctgtgtccactggagagaagaatgctgccacctggagcatcctggccgtgctgtgcctgctggtggtggtggccgtggccatcggctgggtgtgccgggaccgctgcctgcagcacagctatgctggggcctgggccgtgtccccagagacagagctgaccggccacgtgtag

SEQ ID NO: 103352 - DNA, 558 bp, Artificial Sequence
  derived and/or modified sequence
atgcggctgggcagccccggcctgctgttcctgctgttcagcagccttcgagccgccaactttagcgtacctgtcgtgtccgcccctcatagcccatcccaggacgagctgacctttacttgtacttctatcaatggctaccctaggccgaacgtttactggatcaacaagaccgacaacagtctgctggaccaagctctgcaaaatgacacggtatttctcaatatgcgcgggttgtatgatgtcgtgtccgtcctgagaatcgccagaacgccatctgtgaatatcggctgctgcattgaaaacgtcctcttacagcagaaccttacagtaggatcccagactgggaatgatattggggagcgcgacaagattactgagaatccagtgagtactggtgagaagaacgccgccacctggagcattctggctgtcctgtgtctcctggtcgtggtggctgttgccattgggtgggtgtgccgcgaccggtgtttacagcacagttacgccggcgcatgggccgtgtccccagagactgaactgacagggcacgtgtag

SEQ ID NO: 103353 - DNA, 558 bp, Artificial Sequence
  derived and/or modified sequence
atgaggctcggcagtccgggactgttgtttcttctgttttcatcactaagggccgctaactttagcgtgcctgttgtttccgcgcctcactctccgagtcaggacgaactgacttttacctgcacaagcattaatggttatccccgaccaaacgtctactggattaataaaaccgacaattctctgctggatcaggctttacaaaatgataccgtgtttctaaacatgaggggactgtatgatgtcgtctctgtgctgcgaattgcacgtacacctagcgtcaatatcggctgctgcatcgagaatgtgctgctgcagcaaaacttgactgtgggctcacagacagggaacgatattggcgagcgcgataaaattactgaaaacccagtgtcaacgggggagaaaaatgccgctacttggagcattctggcagtgctatgtctgctggtggttgtggccgtcgctataggatgggtctgccgtgacaggtgtttgcagcattcctacgcaggggcatgggctgtgagcccggaaacggagctcactggacatgtgtag

SEQ ID NO: 103354 - DNA, 558 bp, Artificial Sequence
  derived and/or modified sequence
atgagactgggcagccccggcctgctgttcctgctgttcagcagcctgagagccgccaacttcagcgtgcccgtggtgagcgccccccacagccccagccaggacgagctgaccttcacctgcaccagcatcaacggctaccccagacccaacgtgtactggatcaacaagaccgacaacagcctgctggaccaggccctgcagaacgacaccgtgttcctgaacatgagaggcctgtacgacgtggtgagcgtgctgagaatcgccagaacccccagcgtgaacatcggctgctgcatcgagaacgtgctgctgcagcagaacctgaccgtgggcagccagaccggcaacgacatcggcgagagagacaagatcaccgagaaccccgtgagcaccggcgagaagaacgccgccacctggagcatcctggccgtgctgtgcctgctggtggtggtggccgtggccatcggctgggtgtgcagagacagatgcctgcagcacagctacgccggcgcctgggccgtgagccccgagaccgagctgaccggccacgtgtag

SEQ ID NO: 103355 - protein, 189 aa, Artificial Sequence
  derived and/or modified sequence
MTLAAYKEKMKELPLVSLFCSCFLADPLNKSSYKYEADTVDLNWCVISDMEVIELNKCTSGQSFEVILKPPSFDGVPEFNASLPRRRDPSLEEIQKKLEAAEERRKYQEAELLKHLAEKREHEREVIQKAIEENNNFIKMAKEKLAQKMESNKENREAHLAAMLERLQEKDKHAEEVRKNKELKEEASR

SEQ ID NO: 103356 - DNA, 570 bp, Artificial Sequence
  derived and/or modified sequence
atgaccctggccgcctacaaggagaagatgaaggagctgcccctggtgagcctgttctgcagctgcttcctggccgaccccctgaacaagagcagctacaagtacgaggccgacaccgtggacctgaactggtgcgtgatcagcgacatggaggtgatcgagctgaacaagtgcaccagcggccagagcttcgaggtgatcctgaagccccccagcttcgacggcgtgcccgagttcaacgccagcctgcccagaagaagagaccccagcctggaggagatccagaagaagctggaggccgccgaggagagaagaaagtaccaggaggccgagctgctgaagcacctggccgagaagagagagcacgagagagaggtgatccagaaggccatcgaggagaacaacaacttcatcaagatggccaaggagaagctggcccagaagatggagagcaacaaggagaacagagaggcccacctggccgccatgctggagagactgcaggagaaggacaagcacgccgaggaggtgagaaagaacaaggagctgaaggaggaggccagcagatag

SEQ ID NO: 103357 - DNA, 570 bp, Artificial Sequence
  derived and/or modified sequence
atgacccttgcagcctacaaagaaaagatgaaggaacttcccctagtctccctcttctgttcttgcttcctcgctgatcctctaaacaaatccagctacaagtacgaagccgacaccgtagacctgaactggtgcgtgatctccgatatggaggttatcgaactcaacaaatgtacttctggccagagttttgaagtaatacttaagcccccctcattcgacggagtgcccgagttcaacgcatccctacctcgccgccgcgacccatctctggaggagattcaaaaaaagctggaggcagccgaggagagaagaaagtaccaggaagctgaactgctcaaacatctggccgagaaaagagagcacgagagggaggtgattcagaaggcaatcgaagaaaataacaacttcataaaaatggctaaggaaaagctggcacaaaagatggagtcgaacaaggaaaacagagaggctcacctggctgctatgctggagcgactgcaggagaaagacaagcatgccgaagaggtaaggaagaataaggaattaaaggaggaggcatctaggtag

SEQ ID NO: 103358 - DNA, 570 bp, Artificial Sequence
  derived and/or modified sequence
atgaccctggccgcctacaaggagaagatgaaggagctgcccctggtgtccctcttctgcagctgcttcctggccgaccccctgaacaagagcagctacaagtatgaagctgacacagtggacctgaactggtgtgtgatcagtgacatggaggtgattgagctgaacaagtgcaccagcggccagagctttgaggtgatcctgaagccacccagctttgatggagtgcctgagttcaatgccagcctgccccggcggcgggaccccagcctggaggagatccagaagaagctggaggccgctgaggagaggaggaagtaccaggaggccgagctgctgaagcacctggccgagaagcgggagcacgagcgggaggtgatccagaaggccatcgaggagaacaacaacttcatcaagatggccaaggagaagctggcccagaagatggagagcaacaaggagaaccgggaggcccacctggccgccatgctggagcggctgcaggagaaggacaagcacgccgaggaggtgaggaagaacaaggagctgaaggaggaggccagcaggtag

SEQ ID NO: 103359 - DNA, 570 bp, Artificial Sequence
  derived and/or modified sequence
atgaccctggccgcctacaaggagaagatgaaggagctgcccctggtgagtctcttttgttcctgcttccttgccgacccattgaacaaatcttcatacaagtatgaagccgatacagtcgacttgaactggtgtgtcatttctgacatggaggtgattgaactcaataaatgtacctcaggacagtcttttgaggtgatcttaaagccaccctccttcgatggagtccctgagttcaatgcatccctgccacggagaagggaccccagcctcgaggagatacagaaaaaactggaagccgccgaggaacgtcggaagtaccaagaagccgagctgttgaaacacctggccgagaaacgagaacacgaacgagaggtcatccagaaggcaatcgaggagaataataactttatcaagatggcaaaggagaagttagctcaaaaaatggaatctaacaaggagaaccgggaggcccatctggcagccatgttggagagactgcaggagaaggataaacacgcagaagaagttcggaagaataaagaattgaaagaagaggcatccaggtag

SEQ ID NO: 103360 - DNA, 570 bp, Artificial Sequence
  derived and/or modified sequence
atgacacttgcagcttacaaagagaagatgaaagaattgccactagtgagtctgttctgctcatgtttcttggcagatccactcaataagtcctcttacaagtatgaggctgacacagtagacctcaactggtgcgtcatatcagatatggaagttatcgagcttaataagtgcacctctggccagagcttcgaggtcattcttaagccaccctcatttgatggtgtacccgaattcaacgcctcgctgcccagaagacgggacccttctctggaggagattcagaagaaacttgaggccgcagaagaacgccgtaagtaccaggaagctgaactccttaaacacctcgccgagaaacgcgaacacgagcgtgaggtgatccagaaggcaattgaggagaataataactttatcaaaatggcgaaggaaaaactggcacaaaagatggaatctaataaagaaaatcgcgaggcgcacctggcggcaatgctcgagagactgcaggagaaggacaaacacgccgaggaagttcgcaaaaacaaagaactgaaggaggaggcgtcccggtag

SEQ ID NO: 103361 - DNA, 1250 bp, Artificial Sequence
  derived and/or modified sequence
agggtaccactaattgagggagtgaggaagagagcagctcgcttctaactggactgcacgttggtgacagcgtcccaagctggtgacagacccactctgtaactttcagctagattcagccaccagatcccagaaacatgacccttgctgcctacaaagagaagatgaaggagctcccgctggtgtccttgttctgctcctgcttcctggccgatcccctgaataagtcgtcctacaaatatgaagcagacacggtggacctgaattggtgcgtcatttccgacatggaagtcatcgagctgaacaaatgcacctcgggccaatcctttgaagtcatcctgaagccaccctcctttgatggggttcccgagttcaacgcctccctgccaaggcggcgagacccatccctggaagagatccagaagaaactagaagcggctgaggagcgaaggaagtaccaggaagcggagctcctgaaacacctagcagagaaacgggaacatgagagagaggtgatccaaaaggccattgaggaaaacaacaacttcatcaagatggctaaggaaaaactggcccagaagatggaatccaacaaggagaacagggaggcccacctcgccgccatgttggaacggctgcaagagaaggacaagcacgccgaggaggtgcggaaaaacaaggagctgaaggaagaggcctccaggtaaagcctagaggccaaagaactttccaggtcagccggacagctccagcagctccacgttccaggcagcctcgcccgccggctgcgctcccagcactggggtttggggggaggggggtggccaaggggcgtttcctctgcttttggtgtttgtacatgttaagaattgaccagtgaagccatcctatttgtttccggggaacaatgacggggtgggagaggggagaggagagagtttgggaaagggagatggagaagaactcaaggacattgcaaccctgcccggcgcagatctgattttcacatctctacctggacattgagcctccaggcaccatgttgaggagagatgaaaaccagggcggtagaacttcagggtgaaggacagagtcctgggtggggcagcggctgcagggcgcaccagagaacccagccagaggggttgtgagtaccagtggtgttgcttccaccctgcagcaggtgggatgaggtctgtgtgtgtgtgtgaaccatcattttttgatcatcatgaccaatgaaacattga

SEQ ID NO: 103362 - protein, 276 aa, Artificial Sequence
  derived and/or modified sequence
MCIIFFKFDPRPVSKNAYRLILAANRDEFYSRPSKLADFWGNNNEILSGLDMEEGKEGGTWLGISTRGKLAALTNYLQPQLDWQARGRGELVTHFLTTDVDSLSYLKKVSMEGHLYNGFNLIAADLSTAKGDVICYYGNRGEPDPIVLTPGTYGLSNALLETPWRKLCFGKQLFLEAVERSQALPKDVLIASLLDVLNNEEAQLPDPAIEDQGGEYVQPMLSKYAAVCVRCPGYGTRTNTIILVDADGHVTFTERSMMDKDLSHWETRTYEFTLQS

SEQ ID NO: 103363 - protein, 226 aa, Artificial Sequence
  derived and/or modified sequence
MCIIFFKFDPRPVSKNAYRLILAANRDEFYSRPSKLADFWGNNNEILSGLDMEEGKEGGTWLGISTRGKLAALTNYLQPQLDWQARGRGELVTHFLTTDVDSLSYLKKVSMEGHLYNGFNLIAADLSTAKGDVICYYGNRGEPDPIVLTPGTYGLSNALLETPWRKLCFGKQLFLEAVERSQALPKDVLIASLLDVLNNEEAQLPDPAIEDQGGEYVQPMLSKYAA

SEQ ID NO: 103364 - protein, 165 aa, Artificial Sequence
  derived and/or modified sequence
MCIIFFKFDPRPVSKNAYRLILAANRDEFYSRPSKLADFWGNNNEILSGLDMEEGKEGGTWLGISTRGKLAALTNYLQPQLDWQARGRGELVTHFLTTDVDSLSYLKKVSMEGHLYNGFNLIAADLSTAKGDVICYYGNRGEPDPIVLTPGTYGLSNALLETPWR

SEQ ID NO: 103365 - DNA, 2273 bp, Artificial Sequence
  derived and/or modified sequence
cggaagtcggcggcggtggcggaggcggtgagtgcgcggctccggggctggccgactccgctagtggcccggccggcctgggctcgggggctccgggctctgggctctgggtgcgcggaccgggccaggctgcttgaagacctcgcgacctgtgtcagcagagccgccctgcaccaccatgtgcatcatcttctttaagtttgatcctcgccctgtttccaaaaacgcgtacaggctcatcttggcagccaacagggatgaattctacagccgaccctccaagttagctgacttctgggggaacaacaacgagatcctcagtgggctggacatggaggaaggcaaggaaggaggcacatggctgggcatcagcacacgtggcaagctggcagcactcaccaactacctgcagccgcagctggactggcaggcccgagggcgaggtgaacttgtcacccactttctgaccactgacgtggacagcttgtcctacctgaagaaggtctctatggagggccatctgtacaatggcttcaacctcatagcagccgacctgagcacagcaaagggagacgtcatttgctactatgggaaccgaggggagcctgatcctatcgttttgacgccaggcacctacgggctgagcaacgcgctgctggagactccctggaggaagctgtgctttgggaagcagctcttcctggaggctgtggaacggagccaggcgctgcccaaggatgtgctcatcgccagcctcctggatgtgctcaacaatgaagaggcgcagctgccagacccggccatcgaggaccagggtggggagtacgtgcagcccatgctgagcaagtacgcggctgtgtgcgtgcgctgccctggctacggcaccagaaccaacactatcatcctggtagatgcggacggccacgtgaccttcactgagcgtagcatgatggacaaggacctctcccactgggagaccagaacctatgagttcacactgcagagctaaccccacctctgggcctggccagtgggctcctggggggccctgccttgaggggcactgtggacaggaaaccttcctttgccatactgcattgcactgcccgtggcttggccagcatcccccggatcagggccctgtggtttgcgtgttacccatctgtgtccccatgcccagttcagggtctgcctttatgccagtgaggagcagcagagtctgatactaggtctaggaccggccgaggtataccatgaacatgtggatacacctgagcccactcttgcacatgtacacaggcactcacatggcacacacatacactcctgcgtgtgcacaagcacacacatgcaagccatatacatggacaccgacacaggcacatgtacgtgcacaggtgtgctacacatgtgcacacatgcacagttgcacagacacacacacacaggtgcacacacacgatgccgaacaaggcagaagggcgactctcacctctcatgtgcttctggccagtaggtctttgttctggtccaacgacaggagtaggcttgtatttaaaagcggcccctcctctcctgtggccacagaacacaggcgtgcttggactcttgacaagcagacctgctcctgcagaggagacagccacatttggaattgggcaccgagaagacctgagaaaaacccactctctcttttttttttttttgagacggagtcttgctctgtcacccaggctggagtgcagtggcacgatctcggctcactgcaacctccgcctcccaagttcaagcaattctcctgccccagcctcctgattagctgggattacaggcgtgtgccaccatgcccagctaatttttgtgtttttagtagagacggggtttcaccatgttggtcaggctggtcttgaactcctgacgtggtgatccacctgcctcggcctcccaaagtgctgggattacaggcgtgagccaccacgcctggccgaaaaacccactctcataacagaagtgcagactcattgctagattcagtgcccttgagtgtgccagaggtcctctgtgtttgagacaatcctgtgtgtgccaggaggctccgtgtgcaccaggggctctcagaatcccgcttacccagctggagaccatgcctctggcagccccatctcagccagccctgctctctccctcttccctccaggtgaggcaaacttcataggaatctgtacctgaatgtgagctcctgataataaaactctgaggctttggtgagcgca

SEQ ID NO: 103366 - DNA, 931 bp, Artificial Sequence
  derived and/or modified sequence
gacctcgcgacctgtgtcagcagagccgccctgcaccaccatgtgcatcatcttctttaagtttgatcctcgccctgtttccaaaaacgcgtacaggctcatcttggcagccaacagggatgaattctacagccgaccctccaagttagctgacttctgggggaacaacaacgagatcctcagtgggctggacatggaggaaggcaaggaaggaggcacatggctgggcatcagcacacgtggcaagctggcagcactcaccaactacctgcagccgcagctggactggcaggcccgagggcgagcacagcaaagggagacgtcatttgctactatgggaaccgaggggagcctgatcctatcgttttgacgccaggcacctacgggctgagcaacgcgctgctggagactccctggaggaagctgtgctttgggaagcagctcttcctggaggctgtggaacggagccaggcgctgcccaaggatgtgctcatcgccagcctcctggatgtgctcaacaatgaagaggcgcagctgccagacccggccatcgaggaccagggtggggagtacgtgcagcccatgctgagcaagtacgcggctgtgtgcgtgcgctgccctggctacggcaccagaaccaacactatcatcctggtagatgcggacggccacgtgaccttcactgagcgtagcatgatggacaaggacctctcccactgggagaccagaacctatgagttcacactgcagagctaaccccacctctgggcctggccagtgggctcctggggggccctgccttgaggggcactgtggacaggaaaccttcctttgccatactgcattgcactgcccgtggcttggccagcatcccccggatcagggccctgtggtttgcgtgttacccatctgtgtccccatgcccagttca

SEQ ID NO: 103367 - DNA, 862 bp, Artificial Sequence
  derived and/or modified sequence
ctggccgactccgctagtggcccggccggcctgggctcgggggctccgggctctgggctctgggtgcgcggaccgggccaggctgcttgaaggtgggtgggctggccgcacttcctcaccctgcctcagtttcccctttctgagacctcgcgacctgtgtcagcagagccgccctgcaccaccatgtgcatcatcttctttaagtttgatcctcgccctgtttccaaaaacgcgtacaggctcatcttggcagccaacagggatgaattctacagccgaccctccaagttagctgacttctgggggaacaacaacgagatcctcagtgggctggacatggaggaaggcaaggaaggaggcacatggctgggcatcagcacacgtggcaagctggcagcactcaccaactacctgcagccgcagctggactggcaggcccgagggcgaggtgaacttgtcacccactttctgaccactgacgtggacagcttgtcctacctgaagaaggtctctatggagggccatctgtacaatggcttcaacctcatagcagccgacctgagcacagcaaagggagacgtcatttgctactatgggaaccgaggggagcctgatcctatcgttttgacgccaggcacctacgggctgagcaacgcgctgctggagactccctggaggaagctgtgctttgggaagcagctcttcctggaggctgtggaacggagccaggcgctgcccaaggatgtgctcatcgccagcctcctggatgtgctcaacaatgaagaggcgcagctgccagacccggccatcgaggaccagggtggggagtacgtgcagcccatgctgagcaagtacgcggctg

SEQ ID NO: 103368 - DNA, 1496 bp, Artificial Sequence
  derived and/or modified sequence
gaacctctgcggcggcggtggcagggtacgcgggaccgctccctcccagccgacttacgagaacatcccccgaccatccagccccgagcagggactggcagagccggcgccccttccccggactctggccgcgtagcctccgccaccactcccagttcacagctccatgcggacagctgtgaggcccccggagaaagccacagagagaaaatgctttcagctgggtgtcaagaacttttcaagagtggcagctgttgaaatcaaaagagtggccacagaagacctcgcgacctgtgtcagcagagccgccctgcaccaccatgtgcatcatcttctttaagtttgatcctcgccctgtttccaaaaacgcgtacaggctcatcttggcagccaacagggatgaattctacagccgaccctccaagttagctgacttctgggggaacaacaacgagatcctcagtgggctggacatggaggaaggcaaggaaggaggcacatggctgggcatcagcacacgtggcaagctggcagcactcaccaactacctgcagccgcagctggactggcaggcccgagggcgaggtgaacttgtcacccactttctgaccactgacgtggacagcttgtcctacctgaagaaggtctctatggagggccatctgtacaatggcttcaacctcatagcagccgacctgagcacagcaaagggagacgtcatttgctactatgggaaccgaggggagcctgatcctatcgttttgacgccaggcacctacgggctgagcaacgcgctgctggagactccctggaggaagctgtgctttgggaagcagctcttcctggaggctgtggaacggagccaggcgctgcccaaggatgtgctcatcgccagcctcctggatgtgctcaacaatgaagaggcgcagctgccagacccggccatcgaggaccagggtggggagtacgtgcagcccatgctgagcaagtacgcggctgtgtgcgtgcgctgccctggctacggcaccagaaccaacactatcatcctggtagatgcggacggccacgtgaccttcactgagcgtagcatgatggacaaggacctctcccactgggagaccagaacctatgagttcacactgcagagctaaccccacctctgggcctggccagtgggctcctggggggccctgccttgaggggcactgtggacaggaaaccttcctttgccatactgcattgcactgcccgtggcttggccagcatcccccggatcagggccctgtggtttgcgtgttacccatctgtgtccccatgcccagttcagggtctgcctttatgccagtgaggagcagcagagtctgatactaggtctaggaccggccgaggtataccatgaacatgtggatacacctgagcccactcttgcacatgtacacaggcactcacatggcacacacatacactcctgcgtgtgcacaagcacacacatgcaa

SEQ ID NO: 103369 - DNA, 831 bp, Artificial Sequence
  derived and/or modified sequence
atgtgcatcatcttcttcaagttcgaccccagacccgtgagcaagaacgcctacagactgatcctggccgccaacagagacgagttctacagcagacccagcaagctggccgacttctggggcaacaacaacgagatcctgagcggcctggacatggaggagggcaaggagggcggcacctggctgggcatcagcaccagaggcaagctggccgccctgaccaactacctgcagccccagctggactggcaggccagaggcagaggcgagctggtgacccacttcctgaccaccgacgtggacagcctgagctacctgaagaaggtgagcatggagggccacctgtacaacggcttcaacctgatcgccgccgacctgagcaccgccaagggcgacgtgatctgctactacggcaacagaggcgagcccgaccccatcgtgctgacccccggcacctacggcctgagcaacgccctgctggagaccccctggagaaagctgtgcttcggcaagcagctgttcctggaggccgtggagagaagccaggccctgcccaaggacgtgctgatcgccagcctgctggacgtgctgaacaacgaggaggcccagctgcccgaccccgccatcgaggaccagggcggcgagtacgtgcagcccatgctgagcaagtacgccgccgtgtgcgtgagatgccccggctacggcaccagaaccaacaccatcatcctggtggacgccgacggccacgtgaccttcaccgagagaagcatgatggacaaggacctgagccactgggagaccagaacctacgagttcaccctgcagagctag

SEQ ID NO: 103370 - DNA, 681 bp, Artificial Sequence
  derived and/or modified sequence
atgtgcatcatcttcttcaagttcgaccccagacccgtgagcaagaacgcctacagactgatcctggccgccaacagagacgagttctacagcagacccagcaagctggccgacttctggggcaacaacaacgagatcctgagcggcctggacatggaggagggcaaggagggcggcacctggctgggcatcagcaccagaggcaagctggccgccctgaccaactacctgcagccccagctggactggcaggccagaggcagaggcgagctggtgacccacttcctgaccaccgacgtggacagcctgagctacctgaagaaggtgagcatggagggccacctgtacaacggcttcaacctgatcgccgccgacctgagcaccgccaagggcgacgtgatctgctactacggcaacagaggcgagcccgaccccatcgtgctgacccccggcacctacggcctgagcaacgccctgctggagaccccctggagaaagctgtgcttcggcaagcagctgttcctggaggccgtggagagaagccaggccctgcccaaggacgtgctgatcgccagcctgctggacgtgctgaacaacgaggaggcccagctgcccgaccccgccatcgaggaccagggcggcgagtacgtgcagcccatgctgagcaagtacgccgcctag

SEQ ID NO: 103371 - DNA, 831 bp, Artificial Sequence
  derived and/or modified sequence
atgtgcattatatttttcaagttcgatccgcgtcctgtttccaagaatgcttatagacttatcctagcagcaaatagggacgaattttattcccgtccatcgaagctcgctgacttctggggaaacaacaatgaaatcttgagcggcctcgacatggaagagggaaaggagggaggcacctggttgggtattagtaccaggggcaagctggctgctctgacgaactacctacagcctcagctggattggcaagcccgcggccgaggcgagcttgttacacacttcctcacaacagacgtggactctctgtcctatctaaaaaaggtcagcatggagggccatctctataacggcttcaacctcattgccgccgacctttcgacggcgaaaggcgatgtgatctgttattatggtaaccgtggcgagcctgatcctatcgtcctcaccccaggaacatatggcctttcaaatgccctgctcgaaacaccttggaggaagctgtgcttcgggaaacagcttttcctcgaggcagttgaaagatcccaagctttgcctaaggacgtcttgatcgcctccctccttgatgtccttaacaatgaagaggctcagctgccagatcccgccattgaagaccaggggggcgaatatgtacagccaatgctcagcaagtatgcagccgtttgtgtgagatgtccaggctatggcacacgaactaacacaattatactggtagacgccgatggccacgttacctttactgaacgctcaatgatggacaaagatctgagccattgggagaccaggacgtatgaatttactctgcagagctag

SEQ ID NO: 103372 - DNA, 681 bp, Artificial Sequence
  derived and/or modified sequence
atgtgcattatctttttcaaatttgatccgagacccgttagcaagaacgcttacaggttgatactcgctgcaaatcgtgacgaattttacagcaggcccagcaagctagccgatttctgggggaacaacaatgagatcctgagtgggttggacatggaagaaggcaaggaaggaggaacatggttaggtatttcaacgagaggcaagctcgccgcactgaccaactacttacaaccccagttggattggcaggcccggggaaggggcgagctcgtgacgcatttccttactacggatgtggattccctgtcctatcttaagaaagtttcaatggagggacacctgtataacggcttcaatctgattgccgccgacctcagcacagctaagggagatgtgatctgctactatgggaaccggggagagcccgatccaattgtgctgacccccggaacatatggcctgagtaacgccttattagaaaccccttggagaaaactctgcttcgggaagcagctgtttttggaggccgttgaacggtcccaggcgctccccaaggatgtcttaatcgcgtctctgcttgatgtgcttaacaatgaggaggcacaattgcccgaccccgctatcgaagatcagggaggagagtatgttcagccaatgctgagtaagtacgctgcttag

SEQ ID NO: 103373 - DNA, 831 bp, Artificial Sequence
  derived and/or modified sequence
atgtgtatcattttcttcaagtttgatccacggcccgtgtccaaaaatgcatacagacttattttagccgctaatcgagacgagttttacagtcggccttccaagctggcagatttttggggaaataataacgagattctgagcggcctggatatggaggaaggcaaggaaggagggacttggctcggtatcagtacacgggggaagctggcggcgctgacgaactatctgcagccccagctcgattggcaagctcgaggtagaggcgaactcgtaacacactttctgacaaccgatgtggacagtctgagctacttgaaaaaggtgtcaatggagggacatctgtacaatggatttaacctgattgccgcggatttgtctacagctaaaggcgatgtcatctgctattacggaaaccgcggggaacctgaccctattgtcttgactcctggtacctacgggctcagcaatgcgttgttggagaccccctggagaaaactctgctttggcaagcagctcttccttgaagccgtagaaaggtcacaagccctcccaaaagacgtgctgatcgcatctttactagacgtgctgaataacgaagaagctcaactgcccgatcccgctattgaagatcagggcggtgaatatgttcagcctatgctgtctaaatacgccgcagtttgcgtgcgttgtccagggtacgggacaagaacgaacactattatcctggtggatgccgatggccacgttacatttaccgagaggtcaatgatggacaaggacctgtcccactgggagacacgcacttacgaatttacacttcaaagttag

SEQ ID NO: 103374 - DNA, 831 bp, Artificial Sequence
  derived and/or modified sequence
atgtgcatcatcttcttcaagtttgaccccaggcctgtgtccaagaatgcctaccgcctcatcctggccgccaacagagatgagttctacagccggcccagcaagctggccgacttctggggcaacaacaatgagatcctgagcggcctggacatggaggagggcaaggagggcggcacctggctgggcatcagcacccggggcaagctggccgccctgaccaactacctgcagccccagctggactggcaggcccggggccgcggggagctggtgacccacttcctgaccacagatgtggacagcctgagctacctgaagaaggtgtccatggagggccacctgtacaacggcttcaacctgattgctgctgacctgagcacagccaagggagatgtgatctgctactacggcaacagaggagagccagaccccatcgtgctgaccccaggcacctacggcctgagcaatgccctgctggagaccccctggaggaagctgtgcttcggcaagcagctgttcctggaggccgtggagaggagccaggccctgcccaaggatgtgctgattgccagcctgctggatgtgctgaacaatgaggaggcccagctgcctgaccctgccatcgaggaccagggcggggagtatgtgcagcccatgctgagcaaatatgctgctgtgtgtgtgcgctgccccggctacggcaccaggaccaacaccatcatcctggtggatgctgatggccacgtgaccttcacagagaggtccatgatggacaaggacctgagccactgggagaccaggacctatgagttcaccctgcagagctag

SEQ ID NO: 103375 - DNA, 681 bp, Artificial Sequence
  derived and/or modified sequence
atgtgcatcatcttcttcaagtttgaccccaggcctgtgtccaagaatgcctaccgcctcatcctggccgccaacagagatgagttctacagccggcccagcaagctggccgacttctggggcaacaacaatgagatcctgagcggcctggacatggaggagggcaaggagggcggcacctggctgggcatcagcacccggggcaagctggccgccctgaccaactacctgcagccccagctggactggcaggcccggggccgcggggagctggtgacccacttcctgaccacagatgtggacagcctgagctacctgaagaaggtgtccatggagggccacctgtacaacggcttcaacctgattgctgctgacctgagcacagccaagggagatgtgatctgctactacggcaacagaggagagccagaccccatcgtgctgaccccaggcacctacggcctgagcaatgccctgctggagaccccctggaggaagctgtgcttcggcaagcagctgttcctggaggccgtggagaggagccaggccctgcccaaggatgtgctgattgccagcctgctggatgtgctgaacaatgaggaggcccagctgcctgaccctgccatcgaggaccagggcggggagtatgtgcagcccatgctgagcaaatatgctgcctag

SEQ ID NO: 103376 - DNA, 831 bp, Artificial Sequence
  derived and/or modified sequence
atgtgcatcatcttcttcaagttcgacccccggcccgtgagcaagaacgcctataggctaatcctggctgccaatagggatgagttctactccagacctagtaaactcgccgatttttggggaaataataacgaaatcctatccggtctggacatggaggaaggcaaggagggaggcacttggctcgggatctcaacgagaggcaagcttgctgcgctcacgaactatctgcagccccagttggattggcaggcacgtggacgcggcgaactcgtaacccactttctgacaacagatgttgacagcctgtcttacctcaagaaagtaagcatggaagggcacttgtataacggttttaacctgattgctgccgatctgagcacagccaagggggacgtaatttgttactatggtaaccgtggtgaaccggatcctatagtgttgacacctgggacctacgggctgagcaatgctctgcttgaaaccccttggcggaaactgtgtttcggtaagcagctcttcctggaagcggtggagagatctcaggccctccccaaggacgtgctgattgcaagcctcctggacgtgctaaataatgaggaggctcagctccccgatcctgccatcgaagatcaagggggcgaatatgtccaacctatgctcagtaaatacgccgcagtatgtgtccggtgtcccgggtatggcacacggaccaatacaatcattctcgtggacgccgacggccatgttaccttcaccgagcggagcatgatggataaggacctgagccactgggagaccagaacctacgaattcaccttacagtcctag

SEQ ID NO: 103377 - DNA, 681 bp, Artificial Sequence
  derived and/or modified sequence
atgtgcatcatcttcttcaagttcgacccccggcccgtgagcaagaacgcatatcggctgatcctggcggccaaccgtgatgaattctactctcggcccagcaagctggctgacttctggggcaacaataacgagatccttagcggactcgatatggaagaagggaaagaagggggaacttggctgggcatctccacgcgggggaaactggctgcccttactaattacctgcagccacaactggactggcaggctagggggcggggtgagctagtgactcattttttaactactgacgtggattctcttagctacttaaagaaggtaagcatggaaggacacctgtacaacggtttcaacttgattgccgccgacctctctacagccaagggggacgtgatttgctattacggaaatcgcggcgagcctgatcccatagttctcacacccggtacttacgggctgtctaatgcgcttttggaaactccctggagaaagctctgtttcgggaagcagctcttcctggaggcagtagagagaagtcaggcactccccaaggacgtacttattgcctctctattggatgtgttgaataacgaagaagcacagctgcctgacccagctatcgaggatcagggaggcgaatacgtgcagccaatgctgtcgaaatacgccgcctag

SEQ ID NO: 103378 - DNA, 831 bp, Artificial Sequence
  derived and/or modified sequence
atgtgcatcatcttcttcaagttcgacccccggcccgtgagcaagaatgcgtaccgactgatcctggctgcaaatcgggacgaattctactcacgccctagtaagcttgctgatttctggggcaataataacgaaattttgagcggtttggatatggaagagggcaaagaagggggcacctggttagggatctcaacacgcggtaagctggctgcccttacgaattatctgcaaccacagcttgactggcaggctcggggaagaggagagcttgtgactcactttctcacgaccgacgtcgacagcttgagctatcttaagaaagtgagcatggaaggccatctgtataacggcttcaacctgatagcggccgacctttcgacggcaaaaggggatgttatttgttactacggtaatcgcggcgagcctgaccccatcgtgctgacccctggcacctacggcctgtccaacgctctgcttgagacaccctggaggaagctgtgtttcggaaagcaactctttcttgaagccgtagagcgatcacaagcgcttccaaaggatgtactcatcgcgagtctgctggacgtgttgaacaacgaggaggcccaactccctgatccagctatcgaagaccaagggggagagtatgtgcaacccatgttatccaagtacgccgcggtgtgcgtcagatgtcctgggtacggaacacgcaccaatacgatcatactggtggacgctgacggtcatgtcacatttacggagaggagtatgatggacaaggacctttctcattgggaaacccggacctatgaatttaccttgcagtcatag

SEQ ID NO: 103379 - DNA, 831 bp, Artificial Sequence
  derived and/or modified sequence
atgtgcataatttttttcaaattcgacccacggccagtgagtaaaaatgcttacaggctgatcctggccgcaaacagggacgagttttactcacgaccctccaagctggctgacttttggggaaataataacgaaatcctgtccggcctggacatggaggaaggtaaagagggcggaacttggttaggcatttcaactcgtggtaaactggcggcactgaccaactatctccagccacagcttgactggcaggcgcgaggcagaggagaattagtgacccattttttgaccaccgacgtcgacagcctttcctacctgaagaaagtgagcatggagggccatctctacaacggttttaatcttattgccgctgatttaagcactgccaagggagatgttatttgctactatggaaatcgcggtgaaccagacccaatcgtgctcacccctgggacttatggcttgtcaaatgcgctgctagagactccttggaggaagttatgcttcggaaaacaactgttcctggaggccgtggagcggagccaggctctgcccaaagacgttttgattgctagtctgttggatgtactcaacaatgaggaagcacaactcccagatccggctatcgaggaccaggggggtgaatacgtgcagccaatgctctctaagtacgccgcagtatgcgtccgatgtcctggatatggaacacgtactaatactatcatcctggttgacgctgatggccacgttactttcaccgaaagatccatgatggacaaggatttgagccattgggagacccgtacctacgaattcacactgcagagctag

SEQ ID NO: 103380 - DNA, 681 bp, Artificial Sequence
  derived and/or modified sequence
atgtgtattatattcttcaagtttgatcccagacccgtttcaaagaacgcgtacaggctaatccttgccgctaaccgcgacgagttctattcacggccttcaaagctggcggatttctggggtaacaataatgagatcctgtctgggctggacatggaggaaggtaaggagggaggcacatggcttgggatttccaccagaggcaaactggctgccctcaccaactatctgcagccccaactcgactggcaggcaaggggtcggggtgagctggtcacccacttcctcactaccgacgtcgattccctctcatatctgaaaaaggttagcatggagggccacttatataacgggttcaacctgatcgcagccgatctctccacggccaaaggcgacgtgatatgctactacggaaacagaggggaacctgatcctatagtgctgactccgggaacatacggtctcagcaatgctctcctagagacgccttggcgcaagctgtgctttggcaagcagcttttccttgaagcagtggaaagatcccaggctctgccgaaagacgtcctgatcgcctctctgctggacgtcctgaataatgaggaggcacagctacccgacccagccattgaggaccagggaggagagtatgtacagccaatgctgtccaagtacgccgcttag

SEQ ID NO: 103381 - DNA, 831 bp, Artificial Sequence
  derived and/or modified sequence
atgtgcatcatcttctttaagtttgaccccagacccgtctctaagaacgcctacaggcttatcctggccgctaaccgagacgaattttattctagaccttccaaattagcagatttttggggcaataacaacgagatcctctcaggactggacatggaggaggggaaggaagggggtacgtggctcggaataagtacaaggggaaaactcgccgctttgactaactaccttcagcctcaactcgactggcaggcacgtggacgcggagagttggtgacccacttcttaactacagatgttgattcactgtcttacctgaagaaagtgtcaatggaagggcatctgtataatgggtttaatctcattgccgcagacctttcaacagccaaaggagatgtgatctgttactacggaaatcgtggggagccagatcctatcgtgctgacacccggaacttatgggctgagtaacgccctcctcgagaccccttggcgcaaactctgttttggaaagcaacttttcctggaggccgtcgagcgctcccaagcccttccgaaggacgtacttatagccagcttgctcgacgtgttgaacaatgaggaagcccagctcccggaccctgctattgaagatcagggtggggaatacgtgcagcctatgttgagcaaatacgccgcagtgtgcgtgagatgccccggttacggcaccagaactaacacaatcattcttgtggacgccgatgggcacgttaccttcacagaaaggtctatgatggacaaggatttatcccattgggagacccggacatatgagttcaccctgcaatcctag

SEQ ID NO: 103382 - protein, 281 aa, Artificial Sequence [sequence omitted]

SEQ ID NO: 103383 - DNA, 2108 bp, Artificial Sequence
  derived and/or modified sequence
atgcctctcggggcggggactccagtcaatgtacaaagacgtgaagactcagccacagaaggcagccacaggctcatcttggcagccaacagggatgaattctacagccgaccctccaagttagctgacttctgggggaacaacaacgagatcctcagtgggctggacatggaggaaggcaaggaaggaggcacatggctgggcatcagcacacgtggcaagctggcagcactcaccaactacctgcagccgcagctggactggcaggcccgagggcgaggtgaacttgtcacccactttctgaccactgacgtggacagcttgtcctacctgaagaaggtctctatggagggccatctgtacaatggcttcaacctcatagcagccgacctgagcacagcaaagggagacgtcatttgctactatgggaaccgaggggagcctgatcctatcgttttgacgccaggcacctacgggctgagcaacgcgctgctggagactccctggaggaagctgtgctttgggaagcagctcttcctggaggctgtggaacggagccaggcgctgcccaaggatgtgctcatcgccagcctcctggatgtgctcaacaatgaagaggcgcagctgccagacccggccatcgaggaccagggtggggagtacgtgcagcccatgctgagcaagtacgcggctgtgtgcgtgcgctgccctggctacggcaccagaaccaacactatcatcctggtagatgcggacggccacgtgaccttcactgagcgtagcatgatggacaaggacctctcccactgggagaccagaacctatgagttcacactgcagagctaaccccacctctgggcctggccagtgggctcctggggggccctgccttgaggggcactgtggacaggaaaccttcctttgccatactgcattgcactgcccgtggcttggccagcatcccccggatcagggccctgtggtttgcgtgttacccatctgtgtccccatgcccagttcagggtctgcctttatgccagtgaggagcagcagagtctgatactaggtctaggaccggccgaggtataccatgaacatgtggatacacctgagcccactcttgcacatgtacacaggcactcacatggcacacacatacactcctgcgtgtgcacaagcacacacatgcaagccatatacatggacaccgacacaggcacatgtacgtgcacaggtgtgctacacatgtgcacacatgcacagttgcacagacacacacacacaggtgcacacacacgatgccgaacaaggcagaagggcgactctcacctctcatgtgcttctggccagtaggtctttgttctggtccaacgacaggagtaggcttgtatttaaaagcggcccctcctctcctgtggccacagaacacaggcgtgcttggactcttgacaagcagacctgctcctgcagaggagacagccacatttggaattgggcaccgagaagacctgagaaaaacccactctctcttttttttttttttgagacggagtcttgctctgtcacccaggctggagtgcagtggcacgatctcggctcactgcaacctccgcctcccaagttcaagcaattctcctgccccagcctcctgattagctgggattacaggcgtgtgccaccatgcccagctaatttttgtgtttttagtagagacggggtttcaccatgttggtcaggctggtcttgaactcctgacgtggtgatccacctgcctcggcctcccaaagtgctgggattacaggcgtgagccaccacgcctggccgaaaaacccactctcataacagaagtgcagactcattgctagattcagtgcccttgagtgtgccagaggtcctctgtgtttgagacaatcctgtgtgtgccaggaggctccgtgtgcaccaggggctctcagaatcccgcttacccagctggagaccatgcctctggcagccccatctcagccagccctgctctctccctcttccctccaggtgaggcaaacttcataggaatctgtacctgaatgtgagctcctgataataaaactctgaggctttggtgagcg

SEQ ID NO: 103384 - DNA, 846 bp, Artificial Sequence
  derived and/or modified sequence
atgcccctgggcgccggcacccccgtgaacgtgcagagaagagaggacagcgccaccgagggcagccacagactgatcctggccgccaacagagacgagttctacagcagacccagcaagctggccgacttctggggcaacaacaacgagatcctgagcggcctggacatggaggagggcaaggagggcggcacctggctgggcatcagcaccagaggcaagctggccgccctgaccaactacctgcagccccagctggactggcaggccagaggcagaggcgagctggtgacccacttcctgaccaccgacgtggacagcctgagctacctgaagaaggtgagcatggagggccacctgtacaacggcttcaacctgatcgccgccgacctgagcaccgccaagggcgacgtgatctgctactacggcaacagaggcgagcccgaccccatcgtgctgacccccggcacctacggcctgagcaacgccctgctggagaccccctggagaaagctgtgcttcggcaagcagctgttcctggaggccgtggagagaagccaggccctgcccaaggacgtgctgatcgccagcctgctggacgtgctgaacaacgaggaggcccagctgcccgaccccgccatcgaggaccagggcggcgagtacgtgcagcccatgctgagcaagtacgccgccgtgtgcgtgagatgccccggctacggcaccagaaccaacaccatcatcctggtggacgccgacggccacgtgaccttcaccgagagaagcatgatggacaaggacctgagccactgggagaccagaacctacgagttcaccctgcagagctag

SEQ ID NO: 103385 - DNA, 846 bp, Artificial Sequence
  derived and/or modified sequence
atgcccctaggcgcaggcaccccggttaacgtgcagcgacgagaggatagtgctaccgagggctcccataggctcattcttgcagctaacagggatgagttttactcacgccccagtaaactcgcagatttctggggcaataacaatgagatcctgagcgggctcgatatggaggaaggcaaagaaggcggcacatggttgggtatctcgacccgcggcaagctcgccgccctcactaactacttgcagcctcagctcgactggcaggcgagaggaaggggcgaactagtcacacacttcctgacaactgatgttgactcgctgtcctatcttaaaaaagttagcatggaaggccacctgtataacggcttcaaccttatcgccgctgatttatctaccgccaaaggagacgtgatctgctactatggtaaccgtggggaacctgaccctattgtcttgacccccgggacttacggcctctctaacgcactgctggagaccccatggaggaagctgtgcttcggtaaacagctgttccttgaagcagtcgaacgatcccaagccctgccaaaagacgttcttatagccagtctactcgatgtcttgaacaacgaggaggcccagctgcccgatcccgcgattgaagaccagggaggtgaatacgtccagccaatgctcagcaagtatgccgccgtgtgcgtgaggtgcccaggctatgggactaggactaacaccatcatcctggtagacgcggacggccacgttaccttcaccgagcgttcgatgatggacaaagacctatctcactgggagaccaggacctacgagttcacacttcagtcttag

SEQ ID NO: 103386 - DNA, 846 bp, Artificial Sequence
  derived and/or modified sequence
atgcccctgggcgccggcacccctgtgaatgtgcagaggagagaagattctgccacagagggcagccacaggctcatcctggccgccaacagagatgagttctacagccggcccagcaagctggccgacttctggggcaacaacaatgagatcctgagcggcctggacatggaggagggcaaggagggcggcacctggctgggcatcagcacccggggcaagctggccgccctgaccaactacctgcagccccagctggactggcaggcccggggccgcggggagctggtgacccacttcctgaccacagatgtggacagcctgagctacctgaagaaggtgtccatggagggccacctgtacaacggcttcaacctgattgctgctgacctgagcacagccaagggagatgtgatctgctactacggcaacagaggagagccagaccccatcgtgctgaccccaggcacctacggcctgagcaatgccctgctggagaccccctggaggaagctgtgcttcggcaagcagctgttcctggaggccgtggagaggagccaggccctgcccaaggatgtgctgattgccagcctgctggatgtgctgaacaatgaggaggcccagctgcctgaccctgccatcgaggaccagggcggggagtatgtgcagcccatgctgagcaaatatgctgctgtgtgtgtgcgctgccccggctacggcaccaggaccaacaccatcatcctggtggatgctgatggccacgtgaccttcacagagaggtccatgatggacaaggacctgagccactgggagaccaggacctatgagttcaccctgcagagctag

SEQ ID NO: 103387 - DNA, 846 bp, Artificial Sequence
  derived and/or modified sequence
atgcccctgggcgccggcacccccgtgaacgtgcagcggcgggaggatagtgctaccgagggatcccatcggttgatccttgcggccaacagagatgagttctattccaggccgtcgaagctcgccgatttctggggtaacaacaatgagatcctttcaggtttggatatggaagagggcaaggaaggaggcacgtggctgggaatctctacccgagggaagctcgcggcccttaccaattatctacagcctcagctcgattggcaggctcgcggacgcggcgagcttgtgacacactttctcaccacagacgtggattctctgagctatctgaaaaaggtttcaatggaaggccacttgtacaatgggtttaatttgatcgctgccgatctgtccaccgcgaaaggcgacgtcatttgttattatggcaaccgcggtgaaccagacccaatagtcctgacgcctggcacgtacggactgtccaacgccctcctggagacaccctggcgcaagctttgtttcggaaaacagctgtttcttgaagctgtggagcgcagtcaggctctgccaaaagacgtactgattgcaagtctcctcgatgtcctgaataacgaggaagctcaactgccggatccggccatcgaagaccaaggtggggagtacgtccagcccatgctgtctaagtatgccgctgtgtgcgttagatgccccggctatggcactaggacaaatacaattattctggtcgatgctgacggtcatgtcacctttaccgaaaggtctatgatggacaaggatctttctcactgggagacaagaacgtacgaattcaccctgcagtcttag

SEQ ID NO: 103388 - DNA, 846 bp, Artificial Sequence
  derived and/or modified sequence
atgccccttggagccggaacacctgtgaatgttcagagacgagaggatagtgctacagagggcagtcaccggctgattctcgctgcaaaccgcgacgaattctacagtcgcccttccaaactcgccgacttttggggtaacaacaatgagatcctttctggacttgatatggaggagggaaaggaggggggaacgtggctcggaatctccaccaggggtaaactcgccgctttaacaaattacctgcagcctcaactggattggcaggccagggggagaggtgagctagtcactcacttccttaccacagatgtcgactctctgtcctatctgaaaaaagtctctatggagggtcacctctacaatggtttcaatctgatcgccgctgatctgtccaccgccaagggcgatgttatctgttattatggaaaccggggagagcctgatccaatcgtgcttacgcccggaacatatgggctgtcaaatgcacttctggaaacaccttggcgcaagctgtgctttggcaaacagctgttcctggaggccgtagaaaggtcccaggccctacctaaggacgtgttgattgctagcctgctcgacgtcctcaacaacgaggaggcccagcttcctgaccccgctatcgaagatcagggtggggagtatgtgcagcctatgctatcaaagtacgctgccgtctgcgttcgttgccccggatatggaacccggaccaataccatcattctcgtggacgcagacggccacgtgacattcacagagaggtctatgatggataaggacctgtctcactgggagactagaacctacgagttcactctgcagagctag

SEQ ID NO: 103389 - DNA, 570 bp, Artificial Sequence
  derived and/or modified sequence
ggcacccggaagtcggcggcggtggcggaggcgacctcgcgacctgtgtcagcagagccgccctgcaccaccatgtgcatcatcttctttaagtttgatcctcgccctgtttccaaaaacgcgtacaggctcatcttggcagccaacagggatgaattctacagccgaccctccaagttagctgacttctgggggaacaacaacgagatcctcagtgggctggacatggaggaaggcaaggaaggaggcacatggctgggcatcagcacacgtggcaagctggcagcactcaccaactacctgcagccgcagctggactggcaggcccgagggcgaggtgaacttgtcacccactttctgaccactgacgtggacagcttgtcctacctgaagaaggtctctatggagggccatctgtacaatggcttcaacctcatagcagccgacctgagcacagcaaagggagacgtcatttgctactatgggaaccgaggggagcctgatcctatcgttttgacgccaggcacctacgggctgagcaacgcgctgctggagactccctggaggaag

SEQ ID NO: 103390 - DNA, 498 bp, Artificial Sequence
  derived and/or modified sequence
atgtgcatcatcttcttcaagttcgaccccagacccgtgagcaagaacgcctacagactgatcctggccgccaacagagacgagttctacagcagacccagcaagctggccgacttctggggcaacaacaacgagatcctgagcggcctggacatggaggagggcaaggagggcggcacctggctgggcatcagcaccagaggcaagctggccgccctgaccaactacctgcagccccagctggactggcaggccagaggcagaggcgagctggtgacccacttcctgaccaccgacgtggacagcctgagctacctgaagaaggtgagcatggagggccacctgtacaacggcttcaacctgatcgccgccgacctgagcaccgccaagggcgacgtgatctgctactacggcaacagaggcgagcccgaccccatcgtgctgacccccggcacctacggcctgagcaacgccctgctggagaccccctggagatag

SEQ ID NO: 103391 - DNA, 498 bp, Artificial Sequence
  derived and/or modified sequence
atgtgtatcattttttttaaattcgatcctagacctgtgtcaaaaaacgcctacagattgatcttggcagctaatcgggatgagttctattccagaccatcaaagcttgctgacttttggggcaataataatgagatcctgtcaggactggatatggaagagggtaaagaagggggcacatggctgggaattagcaccaggggcaagctcgctgccctgaccaattacctacagccacaactggactggcaggcccgcggcagaggcgagctggttacccacttcctgactactgacgtcgatagcctgtcatacctgaaaaaggtatccatggagggccatttgtacaacgggttcaacctgatcgcggccgacctctctacagccaaaggtgacgtgatctgctattacgggaaccggggcgagcccgacccaattgttctaacaccaggaacctacgggctgtctaatgccctgttggagaccccttggcgctag

SEQ ID NO: 103392 - DNA, 498 bp, Artificial Sequence
  derived and/or modified sequence
atgtgcatcatcttcttcaagtttgaccccaggcctgtgtccaagaatgcctaccgcctcatcctggccgccaacagagatgagttctacagccggcccagcaagctggccgacttctggggcaacaacaatgagatcctgagcggcctggacatggaggagggcaaggagggcggcacctggctgggcatcagcacccggggcaagctggccgccctgaccaactacctgcagccccagctggactggcaggcccggggccgcggggagctggtgacccacttcctgaccacagatgtggacagcctgagctacctgaagaaggtgtccatggagggccacctgtacaacggcttcaacctgattgctgctgacctgagcacagccaagggagatgtgatctgctactacggcaacagaggagagccagaccccatcgtgctgaccccaggcacctacggcctgagcaatgccctgctggagaccccctggaggtag

SEQ ID NO: 103393 - DNA, 498 bp, Artificial Sequence
  derived and/or modified sequence
atgtgcatcatcttcttcaagttcgacccccggcccgtgagcaagaatgcataccgcctgattctggcggctaatagggatgaattttactcacgcccatcaaagctggctgatttttggggaaacaacaatgagattctctcagggctggatatggaagaaggaaaggaagggggcacatggctcggaatcagcactaggggaaaactggctgcactgaccaactacctgcaaccccagctcgactggcaggccagggggcggggagagctcgtgactcattttctcaccacagacgtggattctctgtcttacctgaaaaaagtaagtatggaagggcatctttacaacgggtttaatctcatcgccgcagacctctcaaccgctaagggggacgtgatatgttactatggaaaccgaggggaacctgatccaatagtattgacgcctgggacctatgggctctctaacgccctgctggaaacgccttggaggtag

SEQ ID NO: 103394 - DNA, 498 bp, Artificial Sequence
  derived and/or modified sequence
atgtgcatcatcttcttcaaattcgatccgagacccgtctctaagaacgcctacagactgattctcgcagcaaatcgtgatgagttttactctcgacccagtaaactagcagacttctggggaaataataatgagatactgtcaggacttgacatggaagaggggaaggaaggaggcacctggctgggaatatctacccgaggcaaactggctgcattgaccaactacttgcagccccaactggactggcaggctaggggcagaggggagctggtcacccactttctgacgactgacgtggatagtttgtcatacctgaagaaagtttccatggagggccacctatataacggttttaacctgattgccgctgatttgtcaacagccaagggcgacgtaatatgttactacggaaatcgaggggaacccgacccaatagttctgacacctggtacatacggattgtccaatgccctgcttgaaacaccctggcgctag

SEQ ID NO: 103395 - protein, 214 aa, Artificial Sequence
  derived and/or modified sequence
MCIIFFKFDPRPVSKNAYRLILAANRDEFYSRPSKLADFWGNNNEILSGLDMEEGKEGGTWLGISTRGKLAALTNYLQPQLDWQARGRGTYGLSNALLETPWRKLCFGKQLFLEAVERSQALPKDVLIASLLDVLNNEEAQLPDPAIEDQGGEYVQPMLSKYAAVCVRCPGYGTRTNTIILVDADGHVTFTERSMMDKDLSHWETRTYEFTLQS

SEQ ID NO: 103396 - DNA, 2011 bp, Artificial Sequence
  derived and/or modified sequence
actgggctggctgcggtggcgcgcgggcgcggcacccggaagtcggcggcggtggcggaggcgacctcgcgacctgtgtcagcagagccgccctgcaccaccatgtgcatcatcttctttaagtttgatcctcgccctgtttccaaaaacgcgtacaggctcatcttggcagccaacagggatgaattctacagccgaccctccaagttagctgacttctgggggaacaacaacgagatcctcagtgggctggacatggaggaaggcaaggaaggaggcacatggctgggcatcagcacacgtggcaagctggcagcactcaccaactacctgcagccgcagctggactggcaggcccgagggcgaggcacctacgggctgagcaacgcgctgctggagactccctggaggaagctgtgctttgggaagcagctcttcctggaggctgtggaacggagccaggcgctgcccaaggatgtgctcatcgccagcctcctggatgtgctcaacaatgaagaggcgcagctgccagacccggccatcgaggaccagggtggggagtacgtgcagcccatgctgagcaagtacgcggctgtgtgcgtgcgctgccctggctacggcaccagaaccaacactatcatcctggtagatgcggacggccacgtgaccttcactgagcgtagcatgatggacaaggacctctcccactgggagaccagaacctatgagttcacactgcagagctaaccccacctctgggcctggccagtgggctcctggggggccctgccttgaggggcactgtggacaggaaaccttcctttgccatactgcattgcactgcccgtggcttggccagcatcccccggatcagggccctgtggtttgcgtgttacccatctgtgtccccatgcccagttcagggtctgcctttatgccagtgaggagcagcagagtctgatactaggtctaggaccggccgaggtataccatgaacatgtggatacacctgagcccactcttgcacatgtacacaggcactcacatggcacacacatacactcctgcgtgtgcacaagcacacacatgcaagccatatacatggacaccgacacaggcacatgtacgtgcacaggtgtgctacacatgtgcacacatgcacagttgcacagacacacacacacaggtgcacacacacgatgccgaacaaggcagaagggcgactctcacctctcatgtgcttctggccagtaggtctttgttctggtccaacgacaggagtaggcttgtatttaaaagcggcccctcctctcctgtggccacagaacacaggcgtgcttggactcttgacaagcagacctgctcctgcagaggagacagccacatttggaattgggcaccgagaagacctgagaaaaacccactctctcttttttttttttttgagacggagtcttgctctgtcacccaggctggagtgcagtggcacgatctcggctcactgcaacctccgcctcccaagttcaagcaattctcctgccccagcctcctgattagctgggattacaggcgtgtgccaccatgcccagctaatttttgtgtttttagtagagacggggtttcaccatgttggtcaggctggtcttgaactcctgacgtggtgatccacctgcctcggcctcccaaagtgctgggattacaggcgtgagccaccacgcctggccgaaaaacccactctcataacagaagtgcagactcattgctagattcagtgcccttgagtgtgccagaggtcctctgtgtttgagacaatcctgtgtgtgccaggaggctccgtgtgcaccaggggctctcagaatcccgcttacccagctggagaccatgcctctggcagccccatctcagccagccctgctctctccctcttccctccaggtgaggcaaacttcataggaatctgtacctgaatgtgagctcctgataataaaactctgaggctttggtgagcgca

SEQ ID NO: 103397 - DNA, 1559 bp, Artificial Sequence
  derived and/or modified sequence
cggccccgcacctgcccgaacctctgcggcggcggtggcagggtacgcgggaccgctccctcccagccgacttacgagaacatcccccgaccatccagccccgagcagggactggcagagccggcgccccttccccggactctggccgcgtagcctccgccaccactcccagttcacagacctcgcgacctgtgtcagcagagccgccctgcaccaccatgtgcatcatcttctttaagtttgatcctcgccctgtttccaaaaacgcgtacaggctcatcttggcagccaacagggatgaattctacagccgaccctccaagttagctgacttctgggggaacaacaacgagatcctcagtgggctggacatggaggaaggcaaggaaggaggcacatggctgggcatcagcacacgtggcaagctggcagcactcaccaactacctgcagccgcagctggactggcaggcccgagggcgaggcacctacgggctgagcaacgcgctgctggagactccctggaggaagctgtgctttgggaagcagctcttcctggaggctgtggaacggagccaggcgctgcccaaggatgtgctcatcgccagcctcctggatgtgctcaacaatgaagaggcgcagctgccagacccggccatcgaggaccagggtggggagtacgtgcagcccatgctgagcaagtacgcggctgtgtgcgtgcgctgccctggctacggcaccagaaccaacactatcatcctggtagatgcggacggccacgtgaccttcactgagcgtagcatgatggacaaggacctctcccactgggagaccagaacctatgagttcacactgcagagctaaccccacctctgggcctggccagtgggctcctggggggccctgccttgaggggcactgtggacaggaaaccttcctttgccatactgcattgcactgcccgtggcttggccagcatcccccggatcagggccctgtggtttgcgtgttacccatctgtgtccccatgcccagttcagggtctgcctttatgccagtgaggagcagcagagtctgatactaggtctaggaccggccgaggtataccatgaacatgtggatacacctgagcccactcttgcacatgtacacaggcactcacatggcacacacatacactcctgcgtgtgcacaagcacacacatgcaagccatatacatggacaccgacacaggcacatgtacgtgcacaggtgtgctacacatgtgcacacatgcacagttgcacagacacacacacacaggtgcacacacacgatgccgaacaaggcagaagggcgactctcacctctcatgtgcttctggccagtaggtctttgttctggtccaacgacaggagtaggcttgtatttaaaagcggcccctcctctcctgtggccacagaacacaggcgtgcttggactcttgacaagcagacctgctcctgcagaggagacagccacatttggaattgggcaccgagaagacctgagaaaaacccactctctcttttttttttttt

SEQ ID NO: 103398 - DNA, 2085 bp, Artificial Sequence
  derived and/or modified sequence
cggaagtcggcggcggtggcggaggcggtgagtgcgcggctccggggctggccgactccgctagtggcccggccggcctgggctcgggggctccgggctctgggctctgggtgcgcggaccgggccaggctgcttgaagacctcgcgacctgtgtcagcagagccgccctgcaccaccatgtgcatcatcttctttaagtttgatcctcgccctgtttccaaaaacgcgtacaggctcatcttggcagccaacagggatgaattctacagccgaccctccaagttagctgacttctgggggaacaacaacgagatcctcagtgggctggacatggaggaaggcaaggaaggaggcacatggctgggcatcagcacacgtggcaagctggcagcactcaccaactacctgcagccgcagctggactggcaggcccgagggcgaggcacctacgggctgagcaacgcgctgctggagactccctggaggaagctgtgctttgggaagcagctcttcctggaggctgtggaacggagccaggcgctgcccaaggatgtgctcatcgccagcctcctggatgtgctcaacaatgaagaggcgcagctgccagacccggccatcgaggaccagggtggggagtacgtgcagcccatgctgagcaagtacgcggctgtgtgcgtgcgctgccctggctacggcaccagaaccaacactatcatcctggtagatgcggacggccacgtgaccttcactgagcgtagcatgatggacaaggacctctcccactgggagaccagaacctatgagttcacactgcagagctaaccccacctctgggcctggccagtgggctcctggggggccctgccttgaggggcactgtggacaggaaaccttcctttgccatactgcattgcactgcccgtggcttggccagcatcccccggatcagggccctgtggtttgcgtgttacccatctgtgtccccatgcccagttcagggtctgcctttatgccagtgaggagcagcagagtctgatactaggtctaggaccggccgaggtataccatgaacatgtggatacacctgagcccactcttgcacatgtacacaggcactcacatggcacacacatacactcctgcgtgtgcacaagcacacacatgcaagccatatacatggacaccgacacaggcacatgtacgtgcacaggtgtgctacacatgtgcacacatgcacagttgcacagacacacacacacaggtgcacacacacgatgccgaacaaggcagaagggcgactctcacctctcatgtgcttctggccagtaggtctttgttctggtccaacgacaggagtaggcttgtatttaaaagcggcccctcctctcctgtggccacagaacacaggcgtgcttggactcttgacaagcagacctgctcctgcagaggagacagccacatttggaattgggcaccgagaagacctgagaaaaacccactctctcttttttttttttttgagacggagtcttgctctgtcacccaggctggagtgcagtggcacgatctcggctcactgcaacctccgcctcccaagttcaagcaattctcctgccccagcctcctgattagctgggattacaggcgtgtgccaccatgcccagctaatttttgtgtttttagtagagacggggtttcaccatgttggtcaggctggtcttgaactcctgacgtggtgatccacctgcctcggcctcccaaagtgctgggattacaggcgtgagccaccacgcctggccgaaaaacccactctcataacagaagtgcagactcattgctagattcagtgcccttgagtgtgccagaggtcctctgtgtttgagacaatcctgtgtgtgccaggaggctccgtgtgcaccaggggctctcagaatcccgcttacccagctggagaccatgcctctggcagccccatctcagccagccctgctctctccctcttccctccaggtgaggcaaacttcataggaatctgtacctgaatgtgagctcctgataataaaactctgaggctttggtgagcg

SEQ ID NO: 103399 - DNA, 645 bp, Artificial Sequence
  derived and/or modified sequence
atgtgcatcatcttcttcaagttcgaccccagacccgtgagcaagaacgcctacagactgatcctggccgccaacagagacgagttctacagcagacccagcaagctggccgacttctggggcaacaacaacgagatcctgagcggcctggacatggaggagggcaaggagggcggcacctggctgggcatcagcaccagaggcaagctggccgccctgaccaactacctgcagccccagctggactggcaggccagaggcagaggcacctacggcctgagcaacgccctgctggagaccccctggagaaagctgtgcttcggcaagcagctgttcctggaggccgtggagagaagccaggccctgcccaaggacgtgctgatcgccagcctgctggacgtgctgaacaacgaggaggcccagctgcccgaccccgccatcgaggaccagggcggcgagtacgtgcagcccatgctgagcaagtacgccgccgtgtgcgtgagatgccccggctacggcaccagaaccaacaccatcatcctggtggacgccgacggccacgtgaccttcaccgagagaagcatgatggacaaggacctgagccactgggagaccagaacctacgagttcaccctgcagagctag

SEQ ID NO: 103400 - DNA, 645 bp, Artificial Sequence
  derived and/or modified sequence
atgtgtatcatcttcttcaaattcgacccacgcccagtgtcaaaaaacgcatatcgcctcatcttagctgccaatagggacgagttctactcacggccgtcaaagctcgcagacttttggggcaataataacgagatattgagtggactggatatggaggagggaaaggagggagggacgtggctgggaatctccacccgagggaagttggccgcactgaccaactacctgcagccccagctcgactggcaagccaggggtagaggaacttacggcttgagcaacgctttgctggagacaccctggcgcaaactgtgttttgggaaacagctgtttcttgaagctgttgaacgatcacaggccctcccgaaagacgttttgattgcatctctgctcgacgtactgaacaacgaggaagcccagttacctgaccctgccattgaggaccaggggggggaatacgttcagcccatgctgtcgaagtacgccgcagtgtgtgtgagatgcccagggtatgggacgcgaacaaacaccataatactcgtcgacgcagatgggcatgtcacattcacagagaggtccatgatggacaaagacctgagccattgggaaacccgaacatatgagtttacactccagagttag

SEQ ID NO: 103401 - DNA, 645 bp, Artificial Sequence
  derived and/or modified sequence
atgtgtatcatctttttcaaattcgacccacgcccagtgtccaaaaacgcataccgcctgatcctggccgctaatagagatgagttttactcccgacctagcaagttggctgacttttggggcaacaacaatgaaattctttctggcttggacatggaggaggggaaggaagggggcacttggctggggatcagcacccggggcaagttggcagctctgactaactacctgcaaccccaactcgactggcaggcccgggggagggggacgtatggactctctaatgctctgctggagacgccttggcgcaaactgtgtttcggaaaacagcttttcttggaggctgtggagcgctcccaggccctccctaaggacgttctcatcgcctctctgttagacgtcttgaataacgaagaggcacagctaccggaccctgctatcgaagatcaaggcggagaatacgtgcagccaatgctgagcaagtatgcagccgtctgcgtgagatgtccaggctatggcacaagaacaaatactattatactggttgacgccgatggccacgtcacgtttactgaacgcagcatgatggacaaggatctgagccattgggagacaaggacctatgaattcaccctgcaaagctag

SEQ ID NO: 103402 - DNA, 645 bp, Artificial Sequence
  derived and/or modified sequence
atgtgcatcatattctttaagtttgaccctaggcctgtgagtaagaatgcctatcggctgatcttggccgctaaccgggacgaattttattctcggcctagcaagctagctgacttttgggggaataataacgagattctgtctggtctagacatggaagagggaaaagaaggggggacatggctaggcatctctacccggggaaagctggctgcgctgactaattatctccagccgcagcttgattggcaggcccgtggaaggggtacgtacggactatccaacgcattgctcgagaccccatggcgtaagctgtgcttcggcaagcagttgttcttagaggctgtggaaagaagtcaagccctgccgaaggacgtgctgatagccagtttgctggatgtgttgaataacgaagaggcccagcttcctgaccctgctatcgaggatcagggcggcgagtacgtgcaaccaatgttgagcaaatacgctgccgtgtgcgtgcggtgcccaggatatggtacaaggactaacactatcatcctagtagatgcagatggtcacgtgacgttcaccgagagatccatgatggacaaagatctcagccattgggagactcgcacatacgagtttactctgcagagttag

SEQ ID NO: 103403 - DNA, 645 bp, Artificial Sequence
  derived and/or modified sequence
atgtgcatcatcttcttcaagtttgaccccaggcctgtgtccaagaatgcctaccgcctcatcctggccgccaacagagatgagttctacagccggcccagcaagctggccgacttctggggcaacaacaatgagatcctgagcggcctggacatggaggagggcaaggagggcggcacctggctgggcatcagcacccggggcaagctggccgccctgaccaactacctgcagccccagctggactggcaggcccggggccggggcacctacggcctgagcaatgccctgctggagaccccctggaggaagctgtgcttcggcaagcagctgttcctggaggccgtggagaggagccaggccctgcccaaggatgtgctgattgccagcctgctggatgtgctgaacaatgaggaggcccagctgcctgaccctgccatcgaggaccagggcggggagtatgtgcagcccatgctgagcaaatatgctgctgtgtgtgtgcgctgccccggctacggcaccaggaccaacaccatcatcctggtggatgctgatggccacgtgaccttcacagagaggtccatgatggacaaggacctgagccactgggagaccaggacctatgagttcaccctgcagagctag

SEQ ID NO: 103404 - DNA, 645 bp, Artificial Sequence
  derived and/or modified sequence
atgtgcatcatcttcttcaagttcgacccccggcccgtgagcaagaatgcatatcgactgattctggcggcaaatagggatgaattctactcacgaccttcgaagctcgcagatttctggggcaataataacgaaattctgtctgggctcgatatggaggaaggaaaagagggaggcacatggctgggaatttccacaagaggcaaattggccgcgcttacaaactacctgcagccacagctcgattggcaggctcgggggcgcggaacctatgggctctcgaatgctttactagagacgccgtggcgtaaactttgcttcggcaaacagctgttcctcgaggctgtcgagaggagccaggcattgcctaaagacgtactgattgcgagtttgttagacgtgctgaacaacgaagaggcacagcttcctgacccagccatagaggaccaaggcggggagtatgtacagcctatgctcagcaagtatgctgcagtctgcgtgaggtgtcctgggtacggaactaggaccaatactatcatcttggtggatgctgatggccatgtgacctttacggagcgctccatgatggacaaggacctgtcccattgggagacacggacttatgagttcaccctccaaagttag

SEQ ID NO: 103405 - DNA, 645 bp, Artificial Sequence
  derived and/or modified sequence
atgtgcatcatcttcttcaagttcgacccccggcccgtgagcaagaatgcctaccggttaattctagcagcaaaccgagacgagttctactctagaccaagcaaactcgcagatttctggggaaacaataatgagattttgtccggactggacatggaggagggtaaggaaggcggaacctggctgggaatcagcacaaggggcaaactcgcggctctaactaattaccttcagccacagctcgattggcaggctagagggcgcggcacgtatgggctgtcaaatgctcttttggaaacaccatggaggaagctgtgctttgggaagcaactctttctagaggccgtcgagcggagtcaggcccttcctaaagacgtcctgatagccagcttattggatgtcctcaataacgaggaggcgcagctgccagatcctgccatagaagaccagggtggcgaatatgtgcagcctatgctgagtaagtacgcggcagtgtgtgtcaggtgcccaggctacggcaccagaacaaacacaatcatcctggttgacgccgatgggcacgtgactttcacagaaagatctatgatggacaaggatcttagccattgggagactcggacatatgaatttactctgcaatcttag

SEQ ID NO: 103406 - DNA, 645 bp, Artificial Sequence
  derived and/or modified sequence
atgtgcatcatcttcttcaagttcgacccccggcccgtgagcaagaatgcctaccgtttaatcctggcagccaaccgcgacgaattctactcacgccctagcaaactggccgatttttgggggaataacaatgaaatcttgagcggcctcgatatggaggagggcaaggaaggcggaacctggctcggcatatccaccagagggaagttggccgccttgaccaattacctccaaccacagctggattggcaagccaggggccgagggacctacggactgtccaacgctttattagagacgccctggcgaaagctgtgctttggtaaacagctcttcctggaagccgttgagaggtcacaggccctccctaaggatgtgctcattgcttcactgctcgacgtgctcaacaatgaggaggcccagctgcctgatccagccatcgaagaccaggggggggagtatgtccaacctatgctttccaagtatgctgctgtgtgtgtccggtgtccgggctatgggacaaggacaaacacgatcattttggtagatgcggatggtcacgttacctttactgagcgttcaatgatggacaaagacttatctcactgggaaacgagaacctatgagtttaccctgcaatcttag

SEQ ID NO: 103407 - DNA, 645 bp, Artificial Sequence
  derived and/or modified sequence
atgtgtattatattctttaagtttgaccctagaccggtaagcaagaacgcatacaggctcatcctggcagccaacagagacgaattctactccagaccatccaagttggcagacttctggggtaacaacaatgagatcttaagcggtctggacatggaggaaggaaaagaggggggaacttggttggggatcagcacccgcggaaaactggccgcattgaccaattatctacaaccccagctggattggcaggccaggggccgtggtacctatggcctctccaacgccctcctcgagacaccctggaggaaactttgtttcgggaagcagctgttcctggaggcagttgagaggtcccaggcactaccgaaggacgtgttaatcgccagcctgttggacgttctgaataatgaggaggcacaactgcccgatccggctatcgaagaccagggtggtgaatacgtgcaaccgatgctgagtaagtacgccgcagtgtgtgtccgttgcccagggtacgggactcgaaccaacaccataatcttggttgatgctgacgggcatgttacatttaccgagcgcagcatgatggataaggatttaagtcactgggagacacgcacttacgaattcaccttgcagtcgtag

SEQ ID NO: 103408 - DNA, 645 bp, Artificial Sequence
  derived and/or modified sequence
atgtgcataatctttttcaagtttgatccacgacctgtgagcaaaaatgcttacagacttattctcgccgcaaatcgcgacgaattctacagcaggccatccaagctcgctgacttctgggggaataataacgagatcctgtcaggcttggacatggaagaaggaaaggaggggggtacctggctgggcatttcaacaagaggtaaactggctgcccttacgaactacttacaaccccagctggactggcaagcaagaggccgtggaacatacgggctatcgaatgccctactggagacgccctggaggaaactctgcttcggcaagcaactctttctggaggcggttgagcgcagtcaggccctgcccaaggacgtcttgatcgcatccctgctggatgttttaaataacgaagaggctcagctccctgatccggctattgaagaccagggcggagaatacgtgcagcccatgctctctaaatatgccgcagtatgtgtcagatgtcctggctatggtacgcgcaccaatacaattatcctggtagatgccgacggccacgttacattcaccgagcgttcaatgatggacaaggacctttctcattgggagacccgaacttatgaattcaccctgcagtcctag

SEQ ID NO: 103409 - DNA, 645 bp, Artificial Sequence
  derived and/or modified sequence
atgtgtattattttctttaagtttgaccccagacctgtgagtaagaatgcctaccggttgattttagccgcaaatcgcgatgaattctattctaggccttctaagctcgctgatttttggggaaacaacaatgaaatcttgtccggccttgatatggaagaagggaaggaaggaggcacctggctcggaatctctactcgagggaaactggctgcgctcacgaactacctgcagccacagctggactggcaagcgaggggaagaggaacatacggactaagtaacgctctgctggaaacaccatggcggaaactatgttttggtaagcagctgtttctggaagctgtggagcgatcacaggccctgcctaaggacgtgctgatcgcttctttgctggatgtcttgaacaacgaagaggctcaacttcctgaccccgctatcgaggatcagggcggagagtacgttcagcccatgctgagcaaatacgccgcagtgtgcgtaaggtgccccggttacggaacacgcacaaataccattattttggtcgacgctgatggccacgttacttttacggaaaggagcatgatggacaaggacctgagtcactgggagacgaggacttatgaatttacgcttcagtcctag

SEQ ID NO: 103410 - protein, 88 aa, Artificial Sequence
  derived and/or modified sequence
MCIIFFKFDPRPVSKNAYRLILAANRDEFYSRPSKLADFWGNNNEILSGLDMEEGKEGGTWLGISTRGKLAALTNYLQPQLDWQARGR

SEQ ID NO: 103411 - protein, 198 aa, Artificial Sequence
  derived and/or modified sequence
MPPKLLCAGRCVGQDGAAQAWHCPPGQGHSVWDAVRMPLGAGTPVNVQRREDSATEGSHRLILAANRDEFYSRPSKLADFWGNNNEILSGLDMEEGKEGGTWLGISTRGKLAALTNYLQPQLDWQARGRGELVTHFLTTDVDSLSYLKKVSMEGHLYNGFNLIAADLSTAKGDVICYYGNRGEPDPIVLTPEPTLSSW

SEQ ID NO: 103412 - DNA, 883 bp, Artificial Sequence
  derived and/or modified sequence
gacctcgcgacctgtgtcagcagagccgccctgcaccaccatgtgcatcatcttctttaagtttgatcctcgccctgtttccaaaaacgcgtacaggtaaccccctcgctctgcatctgctgcgccctgcagggtcctgggtgcccagccagttctcatgccacccaagctgctgtgtgcaggaaggtgtgtgggccaggacggggctgcacaggcctggcactgccctccaggacagggtcactcagtgtgggatgctgtcagaatgcctctcggggcggggactccagtcaatgtacaaagacgtgaagactcagccacagaaggcagccacaggctcatcttggcagccaacagggatgaattctacagccgaccctccaagttagctgacttctgggggaacaacaacgagatcctcagtgggctggacatggaggaaggcaaggaaggaggcacatggctgggcatcagcacacgtggcaagctggcagcactcaccaactacctgcagccgcagctggactggcaggcccgagggcgaggtgaacttgtcacccactttctgaccactgacgtggacagcttgtcctacctgaagaaggtctctatggagggccatctgtacaatggcttcaacctcatagcagccgacctgagcacagcaaagggagacgtcatttgctactatgggaaccgaggggagcctgatcctatcgttttgacgccagaaccaacactatcatcctggtagatgcggacggccacgtgaccttcactgagcgtagcatgatggacaaggacctctcccactgggagaccagaacctatgagttcacactgcagagctaaccccacctctgggcctggccagtgggctcct

SEQ ID NO: 103413 - DNA, 597 bp, Artificial Sequence
  derived and/or modified sequence
atgccccccaagctgctgtgcgccggcagatgcgtgggccaggacggcgccgcccaggcctggcactgcccccccggccagggccacagcgtgtgggacgccgtgagaatgcccctgggcgccggcacccccgtgaacgtgcagagaagagaggacagcgccaccgagggcagccacagactgatcctggccgccaacagagacgagttctacagcagacccagcaagctggccgacttctggggcaacaacaacgagatcctgagcggcctggacatggaggagggcaaggagggcggcacctggctgggcatcagcaccagaggcaagctggccgccctgaccaactacctgcagccccagctggactggcaggccagaggcagaggcgagctggtgacccacttcctgaccaccgacgtggacagcctgagctacctgaagaaggtgagcatggagggccacctgtacaacggcttcaacctgatcgccgccgacctgagcaccgccaagggcgacgtgatctgctactacggcaacagaggcgagcccgaccccatcgtgctgacccccgagcccaccctgagcagctggtag

SEQ ID NO: 103414 - DNA, 597 bp, Artificial Sequence
  derived and/or modified sequence
atgccccctaaactgctatgtgcagggcgctgcgtcggacaggatggagccgcgcaggcatggcattgccctcccggtcagggtcattctgtctgggatgctgtgcgcatgccccttggagccggaactcccgttaatgtgcagcggagagaggattcagctactgagggctcacaccggctgatcttggcggctaacagagacgagttttacagccgcccgagcaagctcgccgacttttggggcaataataacgagattctcagcggattagatatggaggagggcaaagagggtggcacttggctcggcatttcgacacgtggtaagctcgccgcactgactaattatttgcaaccacaactggactggcaggcccgaggccgcggcgagctggtcactcacttccttaccaccgacgtcgatagtctgagctaccttaaaaaagtcagcatggagggccacctatataacggcttcaacttaatagccgcggacctgtcaacggccaagggagatgttatttgttactacggtaaccgtggcgagccggaccccatcgtccttacgccggagccaactcttagcagctggtag

SEQ ID NO: 103415 - DNA, 597 bp, Artificial Sequence
  derived and/or modified sequence
atgccacccaagctgctgtgtgccggccgctgtgtgggccaggatggagctgcccaggcctggcactgccccccaggccagggccacagcgtgtgggatgctgtgaggatgcccctgggcgccggcacccctgtgaatgtgcagaggagagaagattctgccacagagggcagccacaggctcatcctggccgccaacagagatgagttctacagccggcccagcaagctggccgacttctggggcaacaacaatgagatcctgagcggcctggacatggaggagggcaaggagggcggcacctggctgggcatcagcacccggggcaagctggccgccctgaccaactacctgcagccccagctggactggcaggcccggggccgcggggagctggtgacccacttcctgaccacagatgtggacagcctgagctacctgaagaaggtgtccatggagggccacctgtacaacggcttcaacctgattgctgctgacctgagcacagccaagggagatgtgatctgctactacggcaacagaggagagccagaccccatcgtgctgaccccagagcccaccctgagctcctggtag

SEQ ID NO: 103416 - DNA, 597 bp, Artificial Sequence
  derived and/or modified sequence
atgccccccaagctgctgtgcgccggccggtgcgtgggccaggacggggccgcgcaggcttggcattgcccccccgggcaaggccactctgtgtgggatgccgtgcggatgcctctgggagccggcacacccgtaaatgtgcagaggagggaagatagcgccacggagggatcgcacagattgatcctcgcggccaatagggatgagttttattctaggccgagtaagcttgccgacttctggggcaataacaacgagatcctgtctggcctcgatatggaggagggaaaagagggcggcacgtggcttggaatcagcacccgaggtaaactagcagcattgaccaactacctacaaccacagttggactggcaagcacgaggcaggggggagctcgtgacccacttcctgaccactgacgtcgacagcctgtcctacctaaagaaagtttccatggagggtcatctctacaatgggtttaatctgatcgcggctgatcttagcaccgccaagggcgacgtgatctgctattacggcaacagaggagagcctgatcccatcgtactcactcccgaacctaccttgtcttcgtggtag

SEQ ID NO: 103417 - DNA, 597 bp, Artificial Sequence
  derived and/or modified sequence
atgcctccaaagctcctgtgtgctgggcgatgcgtgggacaggatggagccgcacaggcctggcactgtccgcctggacagggccactctgtctgggacgccgttagaatgccgctgggcgctggcactcccgtcaatgtccagcgcagagaagattcagctaccgaaggctcacatcgtttaatccttgcggcaaatcgtgacgaattctactctaggccctccaaactagcagatttctggggaaataacaacgagattctttctggactggatatggaggagggcaaggaaggcggaacttggttaggcatcagtactcggggtaagcttgctgcattgaccaattacctgcagcctcagctggactggcaggctaggggaaggggggagcttgtaacccattttttaaccactgatgtcgatagtttgtcttacctgaaaaaggtctccatggaggggcatctctataacggcttcaacttaattgccgcagacctgtctacagcaaagggggacgtgatctgctactatggcaatagaggagaacctgacccaattgttttgacgcccgagccgacactcagctcatggtag

SEQ ID NO: 103418 - protein, 178 aa, Artificial Sequence
  derived and/or modified sequence
MAGHQHTWQAGSTHQLPAAAAGLAGPRASTAKGDVICYYGNRGEPDPIVLTPGTYGLSNALLETPWRKLCFGKQLFLEAVERSQALPKDVLIASLLDVLNNEEAQLPDPAIEDQGGEYVQPMLSKYAAVCVRCPGYGTRTNTIILVDADGHVTFTERSMMDKDLSHWETRTYEFTLQS

SEQ ID NO: 103419 - DNA, 537 bp, Artificial Sequence
  derived and/or modified sequence
atggccggccaccagcacacctggcaggccggcagcacccaccagctgcccgccgccgccgccggcctggccggccccagagccagcaccgccaagggcgacgtgatctgctactacggcaacagaggcgagcccgaccccatcgtgctgacccccggcacctacggcctgagcaacgccctgctggagaccccctggagaaagctgtgcttcggcaagcagctgttcctggaggccgtggagagaagccaggccctgcccaaggacgtgctgatcgccagcctgctggacgtgctgaacaacgaggaggcccagctgcccgaccccgccatcgaggaccagggcggcgagtacgtgcagcccatgctgagcaagtacgccgccgtgtgcgtgagatgccccggctacggcaccagaaccaacaccatcatcctggtggacgccgacggccacgtgaccttcaccgagagaagcatgatggacaaggacctgagccactgggagaccagaacctacgagttcaccctgcagagctag

SEQ ID NO: 103420 - DNA, 537 bp, Artificial Sequence
  derived and/or modified sequence
atggccgggcaccagcacacatggcaggcagggtctacacaccagctaccagccgcagccgctggtctggccggacctagagcgtctactgctaagggagacgtcatttgttactacgggaatagaggcgaacccgacccaatcgtactcactcctgggacctatgggttgagcaacgccttgctcgaaactccatggagaaaactgtgtttcggcaaacagctttttttggaggctgttgagcgatcacaggccctgcccaaggatgtccttatagcgtccctcctcgatgtcctgaataatgaagaggcacaacttcccgatccggctatagaagatcagggcggggagtacgtacagcccatgttgagtaagtatgctgcggtgtgcgttcgatgtcccggatacggcacgcgtactaacacaatcatattggtggacgctgatggacacgtaacctttactgagcgctcaatgatggacaaggaccttagccactgggagacacgcacctacgaatttacacttcagtcttag

SEQ ID NO: 103421 - DNA, 537 bp, Artificial Sequence
  derived and/or modified sequence
atggccggccaccagcacacctggcaggccggcagcacccaccagctgcctgctgctgctgctggcctggccggcccccgggccagcacagccaagggagatgtgatctgctactacggcaacagaggagagccagaccccatcgtgctgaccccaggcacctacggcctgagcaatgccctgctggagaccccctggaggaagctgtgcttcggcaagcagctgttcctggaggccgtggagaggagccaggccctgcccaaggatgtgctgattgccagcctgctggatgtgctgaacaatgaggaggcccagctgcctgaccctgccatcgaggaccagggcggggagtatgtgcagcccatgctgagcaaatatgctgctgtgtgtgtgcgctgccccggctacggcaccaggaccaacaccatcatcctggtggatgctgatggccacgtgaccttcacagagaggtccatgatggacaaggacctgagccactgggagaccaggacctatgagttcaccctgcagagctag

SEQ ID NO: 103422 - DNA, 537 bp, Artificial Sequence
  derived and/or modified sequence
atggccggccaccagcacacctggcaggccggcagcacccaccagctgccagctgccgctgcagggcttgcaggcccaagggcctctaccgccaaaggggacgtgatttgctattacgggaacagaggggagccagacccaattgtactgacccccggaacttacgggctaagcaatgcactgctcgagactccttggagaaagctgtgctttggaaagcagttatttctggaagctgttgaacgttcccaggctctgccaaaggatgttctcattgcatcacttttggacgttctgaacaatgaggaggctcagctgccagaccccgcaattgaggaccaggggggcgaatacgtgcagccgatgctctctaaatatgctgcggtgtgcgtcagatgtcctggctatggcacaaggacaaacactatcatcctggtggatgctgatggacatgtgacttttactgaacgctctatgatggacaaagatctgtcccactgggagaccaggacctatgagtttacgcttcagtcctag

SEQ ID NO: 103423 - DNA, 537 bp, Artificial Sequence
  derived and/or modified sequence
atggcaggccaccagcatacatggcaggcaggatccacgcaccagctccctgccgcagccgctggacttgccggtccaagggcgtctacggctaaaggcgacgtgatttgctactatggaaatagaggtgagccagatccgatcgttctgacccccggaacatatggactatccaatgctctcctggaaacaccctggcggaaactatgtttcggcaagcagctttttttggaggcggtagaaagaagccaagccctcccaaaggatgtgctcattgcatctttgctagacgtgctgaataatgaagaagcccagctgcccgaccccgcaatcgaggaccagggaggagaatatgttcaacctatgctgtccaaatacgcggctgtgtgtgttcggtgtccaggttatgggacaaggacaaacactattattctcgtcgacgctgatggccatgtgaccttcacagagaggtctatgatggataaggacctgagtcattgggagacccgcacttacgagttcacactgcagagctag

SEQ ID NO: 103424 - DNA, 585 bp, Artificial Sequence
  derived and/or modified sequence
gaacctctgcggcggcggtggcagggtacgcgggaccgctccctcccagccgacttacgagaacatcccccgaccatccagccccgagcagggactggcagagccggcgccccttccccggactctggccgcgtagcctccgccaccactcccagttcacagctccatgcggacagctgtgaggcccccggagaaagccacagagagaaaatgctttcagctgggtgtcaagaacttttcaagagtggcagctgttgaaatcaaaagagtggccacagaagacctcgcgacctgtgtcagcagagccgccctgcaccaccatgtgcatcatcttctttaagtttgatcctcgccctgtttccaaaaacgcgtacaggctcatcttggcagccaacagggatgaattctacagccgaccctccaagttagctgacttctgggggaacaacaacgagatcctcagtgggctggacatggaggaaggcaaggaaggaggcacatggctgggcatcagcacacgtggcaagctggcagcactcaccaactacctgcagccgcagctggactggcaggcccgagggcgag

SEQ ID NO: 103425 - DNA, 267 bp, Artificial Sequence
  derived and/or modified sequence
atgtgcatcatcttcttcaagttcgaccccagacccgtgagcaagaacgcctacagactgatcctggccgccaacagagacgagttctacagcagacccagcaagctggccgacttctggggcaacaacaacgagatcctgagcggcctggacatggaggagggcaaggagggcggcacctggctgggcatcagcaccagaggcaagctggccgccctgaccaactacctgcagccccagctggactggcaggccagaggcagatag

SEQ ID NO: 103426 - DNA, 267 bp, Artificial Sequence
  derived and/or modified sequence
atgtgcatcatattcttcaagttcgatccccggcctgtgtcgaagaatgcttacaggttaatactggccgctaaccgcgatgaattttattcccgcccctctaaactggcagatttttggggcaacaataatgaaatcctgtcaggactcgatatggaagagggtaaggagggcggtacctggctgggcatttcaacccgcggcaaactggctgctcttacaaactacttacagcctcagctagattggcaggcacggggcagatag

SEQ ID NO: 103427 - DNA, 267 bp, Artificial Sequence
  derived and/or modified sequence
atgtgcatcatcttcttcaagtttgaccccaggcctgtgtccaagaatgcctaccgcctcatcctggccgccaacagagatgagttctacagccggcccagcaagctggccgacttctggggcaacaacaatgagatcctgagcggcctggacatggaggagggcaaggagggcggcacctggctgggcatcagcacccggggcaagctggccgccctgaccaactacctgcagccccagctggactggcaggcccggggccgctag

SEQ ID NO: 103428 - DNA, 267 bp, Artificial Sequence
  derived and/or modified sequence
atgtgcatcatcttcttcaagttcgacccccggcccgtgagcaagaacgcgtatagattgatcttggccgctaatcgcgatgaattctatagtcggccttctaaacttgccgatttctggggaaataataacgaaatcctctccggactggacatggaggaagggaaagagggcgggacgtggctgggcatcagcaccaggggaaaactcgcggctttaacaaattacctgcagccccaactggattggcaggcccgcggcaggtag

SEQ ID NO: 103429 - DNA, 417 bp, Artificial Sequence
  derived and/or modified sequence
ttccgggcccggggccccgacggccggggcagcggccggacccgggctggccgggcccccggccgggagccacgagctcctaggtgtcctgacggtggcggcgttgcggcgagggccgcccgactattgtcatcaaggcgctccggcagctggcccccgacccacgctttgtggcctgatcttaggagccgcgccagacgcctgctgctgttcctaagtctggctgatctgctgtcagcacgttgcccacccagtcctacacccgcccccagtagtggcccttggcctttgagaagcacatgcacctccgccagctccgctccacgtgcaggactcgctcagatagcttgttttggcccttctatgtccagtgcaggcgggtccaggtggagctcactttggcagccttccccatag

SEQ ID NO: 103430 - DNA, 267 bp, Artificial Sequence
  derived and/or modified sequence
atgtgcattatttttttcaagttcgatcccagaccagtgagcaagaatgcctatcgactgatcttggctgcgaacagagatgagttctacagtagaccctcaaaactcgcagatttctggggaaacaacaacgagatattgtctggactggatatggaggaggggaaagaaggtggtacctggctgggcatctcaacacggggtaagctggcagctctgaccaattaccttcagccacagctcgattggcaagcaaggggcagatag

SEQ ID NO: 103431 - protein, 476 aa, Artificial Sequence
  derived and/or modified sequence
MAAGPIRVVLVLLGVLSVCAASGHGSVAEREAGGEAEWAEPWDGAVFRPPSALGAVGVTRSSGTPRPGREEAGDLPVLLWWSPGLFPHFPGDSERIECARGACVASRNRRALRDSRTRALLFYGTDFRASAAPLPRLAHQSWALLHEESPLNNFLLSHGPGIRLFNLTSTFSRHSDYPLSLQWLPGTAYLRRPVPPPMERAEWRRRGYAPLLYLQSHCDVPADRDRYVRELMRHIPVDSYGKCLQNRELPTARLQDTATATTEDPELLAFLSRYKFHLALENAICNDYMTEKLWRPMHLGAVPVYRGSPSVRDWMPNNHSVILIDDFESPQKLAEFIDFLDKNDEEYMKYLAYKQPGGITNQFLLDSLKHREWGVNDPLLPNYLNGFECFVCDYELARLDAEKAHAASPGDSPVFEPHIAQPSHMDCPVPTPGFGNVEEIPENDSSLVQVRDHCICLRFLWPHSEKGRTHNYAAVP

SEQ ID NO: 103432 - DNA, 1431 bp, Artificial Sequence
  derived and/or modified sequence
atggccgccggccccatcagagtggtgctggtgctgctgggcgtgctgagcgtgtgcgccgccagcggccacggcagcgtggccgagagagaggccggcggcgaggccgagtgggccgagccctgggacggcgccgtgttcagaccccccagcgccctgggcgccgtgggcgtgaccagaagcagcggcacccccagacccggcagagaggaggccggcgacctgcccgtgctgctgtggtggagccccggcctgttcccccacttccccggcgacagcgagagaatcgagtgcgccagaggcgcctgcgtggccagcagaaacagaagagccctgagagacagcagaaccagagccctgctgttctacggcaccgacttcagagccagcgccgcccccctgcccagactggcccaccagagctgggccctgctgcacgaggagagccccctgaacaacttcctgctgagccacggccccggcatcagactgttcaacctgaccagcaccttcagcagacacagcgactaccccctgagcctgcagtggctgcccggcaccgcctacctgagaagacccgtgcccccccccatggagagagccgagtggagaagaagaggctacgcccccctgctgtacctgcagagccactgcgacgtgcccgccgacagagacagatacgtgagagagctgatgagacacatccccgtggacagctacggcaagtgcctgcagaacagagagctgcccaccgccagactgcaggacaccgccaccgccaccaccgaggaccccgagctgctggccttcctgagcagatacaagttccacctggccctggagaacgccatctgcaacgactacatgaccgagaagctgtggagacccatgcacctgggcgccgtgcccgtgtacagaggcagccccagcgtgagagactggatgcccaacaaccacagcgtgatcctgatcgacgacttcgagagcccccagaagctggccgagttcatcgacttcctggacaagaacgacgaggagtacatgaagtacctggcctacaagcagcccggcggcatcaccaaccagttcctgctggacagcctgaagcacagagagtggggcgtgaacgaccccctgctgcccaactacctgaacggcttcgagtgcttcgtgtgcgactacgagctggccagactggacgccgagaaggcccacgccgccagccccggcgacagccccgtgttcgagccccacatcgcccagcccagccacatggactgccccgtgcccacccccggcttcggcaacgtggaggagatccccgagaacgacagcagcctggtgcaggtgagagaccactgcatctgcctgagattcctgtggccccacagcgagaagggcagaacccacaactacgccgccgtgccctag

SEQ ID NO: 103433 - DNA, 1474 bp, Artificial Sequence
  derived and/or modified sequence
ggggtcggtgctggccgagggggcgccggctgccggagtggacatggcggccggccccattagggtggtgttggtccttctaggggtgctcagtgtctgtgcagccagcggccatgggtccgtagcggagagggaggccggcggggaggcggagtgggcggaaccgtgggatggcgcggttttccggccgccctcggcgctgggcgcagtgggggtgacgcgcagctctgggacgccgcggccagggagggaggaggcgggggacttgccggtactgctgtggtggagcccagggctattcccccacttcccgggagactcggagcgcatcgagtgtgcgcgcggcgcgtgcgtggcgtcccggaaccgccgagcgctgagggactcgcggacgcgcgcgctgctcttctacggcacagacttccgcgcgtcggccgccccgctgccgcgcctggcgcaccagagctgggcgctcctccacgaggagtcgcccctcaacaacttcttgctgagccacggcccgggcatccgcctcttcaatcttacctccaccttcagtcgccactcggattacccgctgtcgctgcagtggctgcccgggaccgcctatctgcgccgcccggtgcctccgcccatggaacgcgcggagtggcgccgccgcggctacgcgccgctgctctatctgcagtcacactgcgacgtgccagcggaccgggaccgctacgtgcgcgagctcatgcgccacatcccggtagactcctacgggaaatgcctgcagaatcgggagctgcctaccgcgcggctacaggacacagccacggccaccaccgaggatccagagctcttggctttcttgtcccgctataagttccacttggccctggaaaatgccatctgtaacgactacatgacagaaaaactgtggcgtcccatgcacctgggcgctgtgcccgtgtaccgcggttctccctctgtgagggactggatgccgaacaatcactccgtcatcctgattgatgattttgagtctcctcagaagctggcagagtttattgactttctggacaagaatgatgaggagtatatgaaatacctggcatacaagcaacctgggggcatcaccaaccaatttcttctggatagtctgaagcatcgggagtggggagtgaatgatcctttgctgcctaactacctcaacggcttcgagtgtttcgtctgtgactacgaactggctcggctggatgccgagaaagcccacgcggcctctcccggggacagccccgtctttgagccccacattgcccagccctcacacatggactgcccagtgcccacacctggctttggcaatgtggaagagattcctgagaatgacagcagtcttgtccaagttagagaccactgtatctgcttaagatttctttggccccactcggaaaaaggcaggactcataactatgctgcagttccataa

SEQ ID NO: 103434 - DNA, 1431 bp, Artificial Sequence
  derived and/or modified sequence
atggctgctggccctattagagtagtgcttgttctgcttggcgtgttgagcgtttgtgctgcctccggccatgggagtgttgcggagcgcgaagccggtggcgaagccgagtgggcagaaccttgggatggcgccgtatttcgacccccaagtgctctgggggccgtgggagttacccgctcttcagggacacctcggcctggccgtgaagaagcaggtgacctccctgtgttactttggtggtctccagggctgtttccacactttcccggagattctgagcgcatcgaatgcgccaggggagcatgtgtcgcttctagaaacagaagagccctgcgggatagtaggactcgcgccctgttgttctatggtactgactttcgcgccagcgctgcacctttaccaaggcttgctcatcagtcatgggccttgctgcacgaggaaagcccactgaataattttctgttatctcatgggccaggaattcggctgttcaacctcacatctactttttcgcggcactcagactatcccttgagcctgcagtggctgcccggcactgcttacctccgaagaccagtgcccccaccaatggaacgagcggaatggcgaaggcggggttatgcccccctcctctatttgcagtcacactgcgatgtgccagctgacagagaccgatatgtccgcgaactcatgagacatattcccgtggatagttatgggaagtgtctccagaaccgtgaattgcctacagcgcgcctgcaggataccgccactgccactacagaggatcctgagctgctcgctttcctgtctcgctacaagttccacctcgcacttgaaaatgccatctgcaatgactatatgactgaaaagctgtggcggcccatgcatctgggcgcagtccctgtctatcgaggcagtccaagcgtgcgagattggatgcctaacaatcacagtgtcatcctcattgacgattttgagagccctcagaaactggcggaattcattgatttcctcgataaaaatgatgaagaatacatgaaatatttggcctataagcagccaggcgggatcactaaccagtttttgttagatagcctgaagcatcgggagtggggcgtgaacgaccccctgttgcccaactacctcaacggctttgagtgttttgtgtgtgactatgagctggccaggctggatgcggaaaaagcacacgccgcctcccccggggattcccctgtgttcgagccccacatcgctcaaccttctcacatggattgccctgtgcccacccccggatttgggaacgtggaagaaatcccagagaatgattcctcactggtgcaagtacgagatcattgcatctgcttacggttcctctggcctcattccgaaaaaggccgaacccataactatgccgccgttccatag

SEQ ID NO: 103435 - DNA, 1431 bp, Artificial Sequence
  derived and/or modified sequence
atggctgctggccccatccgggtggtgctggtgctgctgggcgtgctgtctgtgtgtgccgccagcggccacggctctgtggccgagcgggaggccggcggggaggccgagtgggccgagccctgggatggagctgtgttccggcccccatctgccctgggcgctgtgggcgtgaccaggagcagcggcacccccaggcctggccgggaggaggccggggacctgcctgtgctgctgtggtggagccctggcctcttcccccacttccctggggacagcgagagaattgaatgtgcccggggggcctgtgtggccagcaggaacagaagagccctgcgggacagcaggacccgggccctgctcttctatggaacagacttccgggccagcgctgcccccctgccccggctggcccaccagagctgggccctgctgcacgaggagagccccctgaacaacttcctgctgagccacggccctggcatccgcctcttcaacctgaccagcaccttcagccgccacagcgactaccccctgagcctgcagtggctgcctggaacagcctacctgcggcggcctgtgcccccacccatggagagagctgagtggaggagaagaggctacgcccccctgctgtacctgcagagccactgtgatgtgcctgctgaccgggacagatatgtgcgggagctgatgaggcacatccctgtggacagctatggcaagtgcctgcagaaccgggagctgcccacagcccggctgcaggacacagccacagccaccacagaagatcctgagctgctggccttcctgagccgctacaagttccacctggccctggagaatgccatctgcaatgactacatgacagagaagctgtggaggcccatgcacctgggcgctgtgcctgtgtaccggggcagccccagcgtgcgggactggatgcccaacaaccacagcgtcatcctgattgatgactttgagagcccccagaagctggccgagttcatcgacttcctggacaagaatgatgaggagtacatgaagtacctggcctacaagcagcccggcggcatcaccaaccagttcctgctggacagcctgaagcaccgggagtggggcgtgaatgaccccctgctgcccaactacctgaatggatttgagtgctttgtgtgtgactatgagctggcccggctggatgctgagaaggcccacgccgccagccctggggacagccctgtgtttgagccccacatcgcccagcccagccacatggactgccctgtgcccaccccaggctttggaaatgtggaggagatcccagaaaatgacagcagcctggtgcaggtgcgggaccactgcatctgcctgcgcttcctgtggccccacagcgagaagggccgcacccacaactatgctgctgtgccctag

SEQ ID NO: 103436 - DNA, 1431 bp, Artificial Sequence
  derived and/or modified sequence
atggccgccggccccatccgggtggtgctggtgctgctgggcgtgctgtcggtctgcgctgcaagtggccacgggtcagtggccgagagagaagcagggggcgaagctgagtgggcggagccatgggatggggccgtgttcaggccccccagcgcccttggagccgtgggcgtcacacgctcctcagggactccccgacccggccgcgaggaagctggcgatctccctgtgttgctgtggtggagcccaggcctgtttcctcattttcccggtgacagcgagagaatcgagtgtgctaggggcgcgtgtgtcgccagccgaaatagaagagcgctccgggactccaggactagggctctgcttttctacgggactgacttcagagcgtccgccgcccctctgccgagactggcccaccaaagctgggctctgttgcatgaggaatcccctctgaacaacttccttctgagccatgggcccgggattcgactcttcaatctaacatccaccttttcccgtcatagcgattatcccctgagcttgcaatggctgccaggcacagcctacctgagacggcctgtgcccccccccatggaacgggctgagtggcgaaggcgtggttacgctcctctgctttatttacagtctcattgtgatgtgcctgccgatagagacaggtatgtcagagagcttatgcggcacatccccgtagactcctatggcaagtgcctgcaaaacagagaactccccacagcccggctgcaggacactgcaactgccaccacagaagatccggagctgttggcattcctaagtagatacaagtttcacctggctctggagaatgccatctgtaatgactacatgactgagaagctttggaggccaatgcacctgggagctgttcccgtttacaggggcagtccaagcgtgcgtgactggatgccaaacaatcatagcgtcatcctgatcgacgatttcgagagcccccaaaaactcgcagagtttatcgacttcctggataagaacgatgaagaatacatgaaatatctggcttataagcagcctggtgggatcaccaatcagtttctgctggattctttaaagcaccgtgaatggggcgtgaatgaccccctcctccctaattatctcaacgggtttgagtgtttcgtctgcgactacgaactggctcgactcgatgcagagaaagcccatgcggcctcacctggggactcccctgtgttcgagccacatattgctcagccgagccacatggattgcccagtgcctacccccgggtttggtaatgtggaagaaattcctgagaacgactcctctctggtgcaggttagagaccactgtatatgcttgagattcctgtggcctcactccgaaaagggtcgcacccataattatgctgccgtgccgtag

SEQ ID NO: 103437 - DNA, 1431 bp, Artificial Sequence
  derived and/or modified sequence
atggccgctggcccaattcgagtggtccttgtgctcctgggcgtcctatccgtttgtgccgcttccggtcacgggtctgtagctgaacgcgaggcgggtggggaagccgaatgggctgagccgtgggatggagccgtgttccgcccaccttccgctcttggcgcagtgggggtcacaagatcttccggtaccccccgacccggtagagaggaagccggtgatcttcccgttctgctctggtggtctcctggcctgtttccccatttcccaggcgactccgaacggattgaatgcgccagaggcgcttgcgtagccagcaggaataggagggctctaagagacagtcggacaagagctctgctgttttacgggactgacttccgagctagcgccgcacccctgcccagactggctcatcagtcttgggctcttctccacgaggagtctcccttgaacaatttcctgctgtcccacgggccaggaattaggctattcaacttgactagcacctttagtcggcactctgactaccccctatcgctgcagtggctgcctggcactgcgtatctcaggagacccgttcctcccccaatggagcgcgcagagtggcgtagacggggatacgcacccctcctgtacttacaatcccactgcgacgtgccagctgacagggatagatatgtgcgcgagttaatgcggcacattccagtggattcctacggtaaatgcctgcagaatagggagctccctacggcccgacttcaggacacagcaaccgctactaccgaagatcctgagctactggcctttctctcgcgatataagtttcacctcgctttggagaacgcaatctgtaacgactacatgacagagaagctctggagacccatgcacctgggcgcagtgcccgtttaccgcggatctcctagtgttagagactggatgccaaataatcattcagtgatacttatcgatgacttcgaatccccacaaaagctcgcagagttcatcgacttcctggacaaaaacgacgaggaatatatgaagtacctggcctataaacagccaggcggaatcacaaaccagtttctactggatagtctgaagcatagagaatggggggttaatgatccactgctgcccaattacctcaatggcttcgaatgctttgtatgtgactatgaactggcccgacttgacgccgagaaagcccatgccgctagccctggggactcccctgtcttcgagccacacatcgctcaaccgtctcatatggactgccctgttccaacacctgggtttgggaacgtcgaggagatcccagagaacgactcctctctggtgcaggttcgagaccattgtatctgtttgaggttcctgtggcctcactctgaaaaagggagaacacataattacgctgccgtcccgtag

SEQ ID NO: 103438 - protein, 860 aa, Artificial Sequence
  derived and/or modified sequence
MEQAIHSRVKPIQLKGEHHSNIFCLAFNSGNTKVFSGGNDEQVILHDVESSETLDVFAHEDAVYGLSVSPVNDNIFASSSDDGRVLIWDIRESPHGEPFCLANYPSAFHSVMFNPVEPRLLATANSKEGVGLWDIRKPQSSLLRYGGNLSLQSAMSVRFNSNGTQLLALRRRLPPVLYDIHSRLPVFQFDNQGYFNSCTMKSCCFAGDRDQYILSGSDDFNLYMWRIPADPEAGGIGRVVNGAFMVLKGHRSIVNQVRFNPHTYMICSSGVEKIIKIWSPYKQPGCTGDLDGRIEDDSRCLYTHEEYISLVLNSGSGLSHDYANQSVQEDPRMMAFFDSLVRREIEGWSSDSDSDLSESTILQLHAGVSERSGYTDSESSASLPRSPPPTVDESADNAFHLGPLRVTTTNTVASTPPTPTCEDAASRQQRLSALRRYQDKRLLALSNESDSEENVCEVELDTDLFPRPRSPSPEDESSSSSSSSSSEDEEELNERRASTWQRNAMRRRQKTTREDKPSAPIKPTNTYIGEDNYDYPQIKVDDLSSSPTSSPERSTSTLEIQPSRASPTSDIESVERKIYKAYKWLRYSYISYSNNKDGETSLVTGEADEGRAGTSHKDNPAPSSSKEACLNIAMAQRNQDLPPEGCSKDTFKEETPRTPSNGPGHEHSSHAWAEVPEGTSQDTGNSGSVEHPFETKKLNGKALSSRAEEPPSPPVPKASGSTLNSGSGNCPRTQSDDSEERSLETICANHNNGRLHPRPPHPHNNGQNLGELEVVAYSSPGHSDTDRDNSSLTGTLLHKDCCGSEMACETPNAGTREDPTDTPATDSSRAVHGHSGLKRQRIELEDTDSENSSSEKKLKT

SEQ ID NO: 103439 - DNA, 2583 bp, Artificial Sequence
  derived and/or modified sequence
atggaacaagccatccactcgagggtgaagccaatccaacttaaaggtgagcaccacagcaatatattttgtttggcctttaacagcgggaacaccaaggtctttagcggaggcaacgacgagcaagtaattctccacgacgttgaaagctccgaaacactcgacgttttcgcccacgaagacgccgtgtatgggctgtccgtgtctccagtgaacgacaacatctttgccagctctagcgacgatggtagggtcctcatttgggacatccgcgaatctccacacggcgaacctttttgtcttgcaaattacccgtccgccttccattccgtaatgttcaaccccgtggaacctcgtctgctggccaccgctaacagcaaggaaggagttggcctctgggacatcagaaaaccccaaagttcattattgcgctatggtggtaatctctcactccagtctgccatgtcagtgcgctttaacagtaacggcacgcagctgctggcattaaggaggaggcttcccccagttctttacgacattcattcacgtctccccgtctttcagtttgacaaccaagggtacttcaattcttgtaccatgaagagctgctgtttcgccggcgaccgggatcaatacattctttccggctctgatgattttaatctgtacatgtggcgaatcccagctgaccctgaggcaggcggaatcggaagagttgtcaacggggcttttatggtgcttaagggtcacaggagcatcgtgaatcaggtgcgatttaaccctcatacctatatgatttgcagttcaggtgtggaaaagatcattaaaatatggtccccctacaaacagccaggctgcaccggagatcttgatggcagaattgaggatgattcacggtgcctctatacccacgaagagtacatatcattagtgctaaacagtggtagtggcctgagtcacgactatgccaaccagtctgtgcaagaagacccccggatgatggcattttttgattctttggtaagacgggaaatagagggatggtcaagcgacagcgactctgacctgtctgagagtacaattctccagctgcatgccggcgtcagtgagagaagcggctataccgattcagaatcatcggcctcactgccaaggagcccaccgccaactgtggacgaatctgccgacaacgccttccatctgggccctctccgtgtgaccaccaccaatacagtggcgtccacaccccccactccaacgtgtgaggatgctgcgtctcggcagcagcgcctgtcggccttgcgccggtatcaggataaaagattgcttgcactgagcaatgaaagcgatagtgaggagaacgtgtgcgaggttgagctagacactgacctgtttcctcgcccacggtctccttcaccagaagacgagtcttcctccagctcttcttccagctctagcgaggacgaggaggagcttaacgaacggagggccagcacttggcagcgtaacgccatgaggaggcgccagaagacgacccgggaagacaagcccagtgcacctataaagccaacaaacacatatattggcgaagacaactacgactatcctcagattaaagtggacgatctttccagctcaccaacgtccagccccgagagatcgacatctactcttgagattcaaccctcacgtgcatcaccgaccagtgacatcgagagcgttgagagaaaaatatacaaggcctataagtggctgaggtattcctacatctcgtacagtaacaataaagacggcgagacctccctagtcaccggagaggccgacgagggtagagccggtaccagtcataaagacaaccccgctccctcttcctccaaggaggcctgcctaaatatagcgatggcccaacgtaaccaagacttacctcctgaggggtgttccaaggacacgttcaaagaggagacaccacgaaccccttctaacggtccaggccacgaacatagctctcacgcatgggcagaagttcccgaaggcaccagccaggacaccgggaatagcggcagcgtggagcatccgtttgaaaccaagaagttgaatggtaaagcactctcttcccgagccgaggaacccccttccccgcccgtgccaaaggcaagcggatcaaccttgaattctggtagcggaaactgcccacgaacccagtcagacgactctgaagaacgctccctagagacaatttgcgctaaccataataatggcaggctgcatcctagacccccccacccacacaataatggccaaaatttaggagagctcgaggttgttgcgtattcatctccggggcactctgatacagaccgcgataacagcagcctcaccggcactttgctgcataaggactgttgcggatcagaaatggcatgcgagacccccaacgcaggcacccgggaagaccctaccgataccccggctacagatagttctcgcgccgtacacggtcatagcggtctgaagcgccagcgcatagaactggaggatactgacagcgagaatagttcgagcgaaaaaaagctgaagacatag

SEQ ID NO: 103440 - DNA, 2583 bp, Artificial Sequence
  derived and/or modified sequence
atggagcaggcaattcactcacgtgtcaagcctattcagttaaagggcgagcaccactctaacattttttgtcttgcattcaattcaggtaacactaaagtgttttcgggcggaaacgacgaacaggtaattctgcatgacgtggagtctagcgaaactctggacgtcttcgcccacgaagatgccgtttatggtctgtctgtgagtcctgtgaatgataacattttcgctagctcttcagatgatgggcgcgtgctaatttgggatattagggagagccctcatggggagccattctgcctggccaactacccgtctgccttccactccgtgatgttcaaccctgtggagccaagactgttggccactgccaactcaaaggagggtgttgggctatgggacataaggaagccccagtcgagtctcctcaggtatggcggaaacctgtctctgcaatccgccatgtccgtgaggttcaactcaaacggcactcagctcctcgcccttaggcgcaggctcccgcccgtgctgtacgatatccattcaaggctcccagttttccagtttgataatcaaggctatttcaattcatgtaccatgaagtcctgttgttttgccggagaccgtgaccagtacattctctccgggagtgacgacttcaatctgtatatgtggagaattccagctgatcccgaggccgggggaattggccgggttgtaaatggcgcgtttatggttctgaaagggcacagaagcatcgtaaatcaggtgcgatttaatcctcacacctacatgatctgttccagcggcgttgaaaaaatcatcaagatttggtccccctacaaacaacccggctgcaccggagacctggacggccgcatcgaggatgattctcgctgtctgtacacccacgaagagtatattagcttagttcttaactctggaagtggcctgtcccacgattacgcaaaccagtcagtgcaagaagatccgcgcatgatggccttttttgattcccttgttcggagagagattgaaggatggagctctgactctgacagcgacctctccgagtcaaccatactgcagcttcacgcaggcgtgagtgagcggtccggctacactgacagtgaatctagtgctagcttaccgcgaagtcccccaccaacagttgacgagtccgctgacaacgcatttcatctgggacccctacgcgtcaccacgactaatactgtggcatcaacaccgcccacacctacctgtgaggatgccgcttcaaggcagcagcgcctgtcagctcttcgcagataccaagataagagacttctggcccttagtaatgaatcagattccgaagaaaacgtgtgcgaggtcgagcttgacacagacctgttcccacgccccagatctcctagccctgaagatgagagctcaagcagttcttcatcaagctcctctgaggatgaggaggaactgaatgaaaggagggccagcacatggcaaagaaacgccatgaggcgtaggcagaaaacaactcgtgaggataagcccagtgcccccataaagcccaccaacacctacatcggcgaggacaactatgattatcctcaaataaaggtggacgacctcagttcgtcgcctacatcaagcccagagcggtctacgagcactttagaaatccagccaagcagagctagtccaacctccgatattgaatcagtagagcgaaagatttataaagcctataaatggcttcggtatagctacatcagctacagcaacaacaaggacggagagacttcactggtgaccggggaagctgacgagggtcgagcagggacttcacataaagacaaccccgccccgtcctctagtaaagaggcctgtctgaacattgcaatggcccaaaggaaccaggacctaccgcccgagggatgcagcaaagacacattcaaggaggagacccccaggacaccatcaaacggaccaggccatgaacattcctcacacgcctgggcagaggtgcccgaaggcacgagccaggacacaggaaattctgggtccgtggaacatccgttcgaaacaaagaaattaaatggcaaagcactaagcagtagggccgaggagcccccttccccacccgtccccaaggccagtggctcaaccttgaattcaggcagcggcaattgtccacgtacacagtctgacgacagcgaagagcgaagcctggagactatttgcgccaaccacaataatgggaggctccatccgagacctccccaccctcataacaatggacagaatctcggcgagctggaggtagtagcgtatagtagccctggtcacagtgacacagaccgggacaactccagccttactggcactctgctccacaaagattgctgcggctcggagatggcatgtgaaacacctaacgccggaaccagggaggaccccacagacacacccgctactgattcatccagggcagtgcatggtcattctgggttgaagcgtcagcggattgagctggaggataccgacagtgagaactctagcagcgagaaaaaactgaaaacgtag

SEQ ID NO: 103441 - DNA, 2583 bp, Artificial Sequence
  derived and/or modified sequence
atggagcaggccatccacagccgggtgaagcccatccagctgaagggggagcaccacagcaacatcttctgcctggccttcaacagcggcaacaccaaggtgttcagcggcggcaatgatgagcaggtgatcctgcatgatgtggagagcagcgagaccctggatgtgtttgcccatgaagatgctgtgtatggcctgtctgtgtcccctgtgaatgacaacatctttgccagcagcagtgatgatggccgggtgctgatctgggacatccgggagagcccccatggagagcccttctgcctggccaactaccccagcgccttccacagcgtgatgttcaaccctgtggagccccggctgctggccacagccaacagcaaggagggcgtgggcctgtgggacatcaggaagccccagagcagcctgctgcgctatggaggcaacctgagcctgcagagcgccatgtctgtgcgcttcaacagcaatggcacccagctgctggccctgcggcggcggctgccccctgtgctgtatgacatccacagccggctgcctgtgttccagtttgacaaccagggctacttcaacagctgcaccatgaagagctgctgctttgctggggaccgggaccagtacatcctgagcggcagtgatgacttcaacctgtacatgtggaggatcccagctgaccctgaggccggcggcatcggccgggtggtgaatggagccttcatggtgctgaagggccacaggagcatcgtgaaccaggtgcgcttcaacccccacacctacatgatctgcagcagtggagtggagaagatcatcaagatctggagcccctacaagcagcccggctgcacaggagacctggatggaagaattgaagatgacagccgctgcctgtacacccatgaggagtacatcagcctggtgctgaacagcggcagcggcctgagccatgactatgccaaccagagcgtgcaggaggaccccaggatgatggccttctttgacagcctggtgcggcgggagattgagggctggagcagtgacagcgacagcgacctgtctgagagcaccatcctgcagctgcacgccggcgtgtctgagaggagcggctacacagattctgagagcagcgccagcctgcccaggagccccccacccaccgtggatgagagcgctgacaatgccttccacctgggccccctgcgggtgaccaccaccaacacagtggccagcaccccacccacccccacctgtgaagatgctgccagccggcagcagaggctgagcgccctgcggcgctaccaggacaagaggctgctggccctgagcaatgaaagtgacagtgaagaaaatgtgtgtgaggtggagctggacacagacctcttcccccggcccaggagccccagcccagaagatgagagcagcagcagcagcagcagcagcagcagtgaagatgaggaggagctgaatgaaagaagagccagcacctggcagagaaatgccatgagaagacggcagaagaccacccgggaggacaagcccagcgcccccatcaagcccaccaacacctacatcggggaggacaactatgactacccccagatcaaggtggatgacctgagcagcagccccaccagcagccctgagaggagcaccagcaccctggagatccagcccagccgggccagccccaccagtgacattgaatctgtggagaggaagatctacaaggcctacaagtggctgcgctacagctacatctcctacagcaacaacaaggatggagagaccagcctggtgactggagaggctgatgagggccgggccggcaccagccacaaggacaacccagcccccagcagcagcaaggaggcctgcctgaacatcgccatggcccagaggaaccaggacctgcccccagagggctgcagcaaggacaccttcaaggaggagacccccaggacccccagcaatggacctggccacgagcacagcagccacgcctgggccgaggtgcctgagggcaccagccaggacaccggcaacagcggctctgtggagcacccctttgagaccaagaagctgaatggcaaggccctgagcagcagagctgaggagccccccagcccccctgtgcccaaggccagcggcagcaccctgaacagcggcagcggcaactgccccaggacccagagtgatgacagcgaggagaggagcctggagaccatctgtgccaaccacaacaacggccgcctgcaccccaggcctccccacccccacaacaacggccagaacctgggggagctggaggtggtggcctacagcagccctggccacagcgacacagaccgggacaacagcagcctgaccggcaccctgctgcacaaggactgctgcggcagcgagatggcctgtgagaccccaaatgccggcacccgggaggaccccacagacaccccagccacagacagcagcagagctgtgcacggccacagcggcctgaagaggcagagaattgagctggaggacacagattctgagaacagcagcagcgagaagaagctgaagacctag

SEQ ID NO: 103442 - DNA, 2583 bp, Artificial Sequence
  derived and/or modified sequence
atggagcaggccatccacagccgggtgaagcccatccagctgaagggcgagcaccattcaaatatcttctgtctcgccttcaattccggcaacacaaaggtgttcagcggggggaatgacgagcaggtcattctccacgacgttgaatctagtgagacactcgacgtgtttgcacatgaggacgctgtgtacggcctctctgtttctccagtgaatgataacatattcgccagtagttcagatgacggtagagtgctgatttgggatattagagaatccccccacggggaacctttttgtctggcaaactacccttctgccttccacagtgtgatgtttaatcctgtggagccaagactactggcaaccgcaaattcgaaggaaggtgtcggactgtgggacatcagaaaaccgcagtcttccctcctgcggtacggagggaacctttcactgcagtctgctatgtccgtgcgtttcaacagcaatggcacccagctgctggccctccgaagaagactaccgcccgtgttatacgatatacacagccgcctgcccgtgtttcagttcgataatcagggttattttaacagttgtactatgaaatcttgctgctttgcaggtgacagggaccagtacatcttgtctggtagcgatgactttaacctgtacatgtggcgcatccccgccgaccctgaagctggtggtattggtagggtcgtgaacggagcattcatggtcttaaaggggcataggagtattgttaaccaggtccggtttaatccacacacgtacatgatttgcagcagtggggttgaaaagattatcaaaatttggagcccttataaacaacccggctgtacgggagacctggatggacgcatagaagatgattcgcgttgtctatatactcacgaggaatacattagtctagtgctcaacagcggctcgggactgagccacgactatgcgaaccagagcgtccaggaggaccctaggatgatggcattttttgattctctggtgcggagagagatcgagggttggtcctctgactcggatagcgatctgtccgagagcactattctgcagctccatgccggggtttcggaaagatcagggtatacggatagtgagtccagcgccagtcttccgagaagccctccccccactgtggatgagagcgccgacaacgctttccacctgggacctctgcgagtaaccaccaccaacacagttgcatctacgccccccacccctacatgcgaagatgctgcaagccgccagcagcgactgtccgccctgaggcgctatcaggataagagattgctcgccctaagcaatgagtctgacagcgaggagaacgtctgtgaagtcgagctcgacacggatctttttccgcggccacggtctccgtcccccgaagacgaatcctccagttctagctcctccagttctagtgaggacgaagaggagttgaatgaacggagggcgtccacatggcagagaaacgccatgcgacgtaggcaaaaaaccactagagaagataagccgtctgcaccgataaagcctacaaacacttatattggggaggacaactacgattaccctcagatcaaggttgacgacctgtcttcaagtccgacatctagtcctgaaaggagcacatcaacccttgagatccagccatcacgggccagtcccacgagtgatattgaatccgttgagcggaaaatctataaagcctacaaatggttgcgatacagttacatctcttattctaacaacaaggacggggagacctctctggtgacaggggaggcagacgagggtcgagcgggcacttcccataaagacaatcccgcaccttcctcctctaaggaggcgtgtctgaatatagccatggcccaaaggaatcaggacctgccacccgaaggatgtagtaaagacacctttaaggaggaaaccccaagaacccccagcaacggtcctgggcacgagcattcctcccacgcctgggccgaggtccccgagggaaccagtcaagacactggcaactccgggagcgtggaacacccatttgagaccaagaagctgaacggcaaggccctgtcctcacgagccgaagaacccccctcaccacccgtgccaaaggcctctggaagtaccctaaacagcggaagtggcaactgtccccggacccaaagcgatgattccgaagagcggagcttagagacaatttgtgccaatcataacaacggcagactgcaccctagacccccacacccacacaataatggacagaatcttggagaactggaggttgttgcctatagtagtcccgggcattcggacaccgatcgagacaacagtagtctcactgggaccctcttgcataaagattgctgtggcagcgagatggcctgcgagacacccaatgctggaaccagagaagacccaacggacacaccagccaccgactcctcccgggctgtgcacggccactcaggactgaaacggcagcgcatcgagctcgaggacacagactcggaaaactcctccagcgagaagaaactgaagacctag

SEQ ID NO: 103443 - DNA, 2583 bp, Artificial Sequence
  derived and/or modified sequence
atggagcaggccatccacagccgggtgaagcccatccagctgaagggggagcaccactccaacatattctgcctggccttcaattccggcaataccaaggtgttttctggcggcaatgatgagcaggtgatactgcacgatgtagaaagctccgagacactggatgtattcgcccatgaggatgccgtgtacggactgtctgtatccccagtcaacgataacatcttcgcatctagcagcgatgacgggagggtgctgatctgggatatcagagagtcaccccatggagagcccttttgcttagcaaactacccatctgctttccattctgtaatgtttaaccctgtcgaacctcgattactggcgacagcgaatagcaaggaaggagtgggactctgggacatcagaaaacctcagtcgagtctactgagatacggaggcaacctctctctgcagtccgctatgtcagtacgctttaattcaaatggcacacaactcctcgcgctgaggagacgtcttccaccagtgctttacgacatccactctcgattacccgtgttccagtttgacaaccaagggtacttcaattcatgtactatgaagtcatgctgctttgcaggagatcgtgatcaatatatcctttcggggtctgatgacttcaatctgtatatgtggcgaatacctgccgatcctgaggccggcggaatcgggcgtgtcgtgaatggagcctttatggttctcaagggacaccggtccattgtgaaccaggttcgctttaacccacacacttacatgatttgcagcagcggagttgagaaaattatcaaaatttggtctccttataagcagccaggctgcactggagatctggacggtagaatagaggacgatagccggtgcctttatacacacgaggaatatattagtttagtgctaaacagcggatccggcctgtcacacgactacgccaaccagtctgtccaggaagaccccagaatgatggcattcttcgactcactggttagacgagaaatcgaaggctggtctagcgactccgatagtgatttgtcagagagcacaatactgcagctgcacgccggggtgtctgagcgttccggctacacagatagcgaaagttcagcctccctgccgaggagccctcctcccacggtggacgaatctgccgacaatgcatttcaccttggccccctgagagtgacgaccactaatacagtggcaagcacaccccctactcccacttgcgaggatgctgcctcacggcagcagcgtttaagtgcgttgcggcgctaccaagacaaacgattgcttgcgctcagtaatgaatccgactctgaggagaacgtgtgcgaggtggaacttgatacggacctcttccctaggccgagatccccgagtccggaggacgagtcctcgtcatcttcatcgtcatcatctagcgaagatgaggaggaactcaatgagcgtcgggcctcgacttggcagcgcaatgctatgaggaggcggcagaaaacaacgagggaagataagccctctgcccctatcaaacctacaaacacctatatcggggaagacaactatgactaccctcaaataaaggtggatgatctgtcatcaagcccaacaagtagtcccgaaagaagtacttcaaccctggaaatccagccatctagggcaagtccaacctcagacattgagtcagtcgagagaaagatctacaaggcgtataagtggctacgctatagttatataagctattccaacaacaaagatggagagacttccttggtaacgggagaagccgacgaggggcgcgctggcacctctcacaaagacaatccagcaccatcctccagcaaagaagcctgcctgaacatcgcgatggcacagaggaaccaggaccttcctccagagggctgttctaaagatacttttaaagaggaaactccgaggacacccagcaatggccctgggcacgaacattctagccatgcatgggccgaagttccagaaggaacctctcaggatacggggaattcagggagtgtggagcacccttttgagactaagaagttgaatggcaaagctctgagctctcgcgctgaagaacctccttcacctcccgtgcccaaggcatccggtagcacactgaacagcggtagtgggaattgtcctcgcacacagtcagatgactccgaggaacgcagcctcgagacaatttgcgctaaccacaacaacgggcggttgcatccacggcctcctcaccctcataataatggccaaaatctgggcgagctcgaggtcgtggcctactcctcacccggtcactctgacaccgaccgggataattcaagcctgacagggacattattgcacaaggactgctgcggaagcgagatggcgtgtgagacccctaacgctggtacaagagaagacccaaccgatacaccagcaacagactcctctcgcgcggtgcacggacacagcgggctaaaaaggcaaagaattgagctggaggataccgactcagagaattccagttcagaaaagaagctgaagacctag

SEQ ID NO: 103444 - DNA, 2583 bp, Artificial Sequence
  derived and/or modified sequence
atggaacaggccatccattcccgtgtgaagcctatccagcttaagggtgagcaccactccaacatattctgcctcgctttcaattccgggaatacgaaggtcttctctgggggtaatgatgaacaggttatcctccacgatgtcgagagctcagagacgctggatgtctttgcccatgaggatgcggtgtacggtctttcagtgtcacccgttaacgacaatatttttgcctccagttcagacgacggaagagtactgatctgggacatacgggaatcaccgcacggtgaacctttctgcctggccaattatcctagtgctttccactcagtgatgttcaatccagttgaaccgaggctgcttgccacagccaattctaaggagggtgtcggactgtgggacatccgaaagcctcagagctcacttctgcggtatgggggaaacctatctttgcagtctgccatgtccgtgcgattcaactccaacggcactcagctcctggccctgcgtcgtagattacctcctgtactttatgatatccattctcgcctccctgtatttcagttcgacaaccagggatatttcaactcatgcacaatgaagagctgctgtttcgccggagatcgagatcaatatattttgagtggtagtgacgacttcaacctgtatatgtggcgaatccccgctgacccagaggccggaggcattggcagagtggtgaacggagcgttcatggtgttaaaaggccacaggtctatagttaaccaggttcgatttaacccccatacctacatgatctgttcctctggagtggaaaagatcattaaaatctggagcccctacaagcaacctggttgcaccggagatctggacggtcggatcgaagacgattcccggtgcctgtacacacacgaggagtatattagcctggtgctgaattccgggtccggcctcagccatgattatgcgaatcagtccgttcaggaagaccccagaatgatggcattctttgattctcttgttcgtcgcgagatcgaaggctggtcatctgattccgactctgatctttcggagtccaccatactccaactgcatgcaggagtaagtgagcggtcaggttatactgacagtgagagttccgcctctctccctaggtcaccacccccaacagtcgatgagagcgctgataatgcatttcacctgggtcctcttcgtgttactacgaccaatactgtggctagtacccctcctaccccaacttgcgaggacgcggcaagccggcaacagcgtctatctgctttgagaaggtaccaggacaaacgccttctcgccctgagtaacgagagcgacagtgaggagaatgtttgtgaggtcgagctggatacggacctgttcccaagacctagaagcccgtcacctgaggacgagtcttcctcatcttcaagctcctcttcgtccgaggacgaggaagaactgaacgagcgccgagcaagcacatggcaacggaatgccatgaggaggaggcagaagactacccgtgaagataagccttcagcaccgataaaacctacaaacacttacatcggtgaggataactatgactaccctcagatcaaagtcgacgacctgagcagctccccaacaagtagccctgagcggagcacttcaactctcgagattcagccctctcgagcctcaccgacgagcgacattgagagcgtcgagagaaaaatctataaggcttacaaatggttgagatactcctacatttcctacagcaataacaaggacggcgagacaagccttgtgaccggcgaagcagacgaagggcgtgccggtactagtcacaaagataaccctgcgccatcctccagcaaagaggcatgtttgaacattgcgatggcccagagaaaccaggatctccctcccgagggttgttctaaggacactttcaaagaggaaactcccagaactcctagcaacggtccaggacatgagcacagctcccatgcatgggctgaggttcccgaagggacctcacaagatacggggaacagcggctctgtggagcatccttttgagaccaagaagcttaacggtaaggcgctctcaagcagagctgaggagccaccttctccgccagtccccaaggccagcggatcgacgctcaattcaggcagtggcaattgtccacgaactcagagcgatgactccgaggagcgcagcctcgaaacaatctgcgctaatcacaacaacggtcgcctccacccaagaccacctcatcctcataataatggtcaaaatctgggtgagctcgaagtggtcgcctactcgtccccaggccactcagacaccgacagggataattcctcactgacgggcaccctgctccacaaggactgttgcggatctgaaatggcctgcgaaactcctaatgctgggacacgagaggacccaaccgatacacctgcgaccgacagcagccgggcagtgcacggacactccggactgaagcggcaacgcatcgagcttgaggatacggattcagaaaacagctcctcagaaaaaaagcttaagacgtag

SEQ ID NO: 103445 - DNA, 2583 bp, Artificial Sequence
  derived and/or modified sequence
atggaacaggctattcattccagagtgaagccaattcaacttaaaggcgaacatcattctaatatattttgcctcgccttcaactcgggaaacacaaaggtgttcagtggcggaaatgacgaacaagtcattttgcacgatgtggagtctagtgaaaccttagacgtcttcgcccatgaggatgctgtttacggactgtcagttagcccggtgaacgataatatcttcgcttcctcttctgatgatgggcgtgtgctgatttgggacataagagagtccccacacggtgaacccttctgcctggccaattacccctcagctttccactctgttatgtttaaccctgtcgagccccgactcctggctacagctaacagcaaagaaggcgtcggactgtgggatattaggaaaccacagagctcactcctccggtatggcggtaacctttcattgcaatcagcgatgtccgttcgctttaacagcaacggtacccagctgttggccctgaggaggcgcctgccacctgtgctgtatgacatccatagtcgcttgccagtgttccagttcgacaaccagggctattttaatagctgtactatgaaaagttgttgcttcgctggcgatagagatcaatacatcctgtccggatcagacgacttcaacctttatatgtggcgaattccagccgatcccgaagctggagggataggcagggtcgtcaacggcgcattcatggtgttgaagggccatagaagcatagttaatcaagtgagattcaacccacatacatacatgatttgttcatcgggggtcgagaaaatcatcaagatctggagtccatacaagcaacccggatgtaccggcgacctggatggcagaatcgaagatgattctcgctgcctgtatacacacgaggaatacattagtctcgtccttaactccggatcagggctgtctcacgattatgctaatcagagcgtccaggaagatcctcggatgatggcttttttcgatagtctggtacgacgcgagattgagggctggtccagtgatagcgactctgatctgagcgaaagtacaatcctgcagctccatgcaggggtcagcgagagatctggatacacggatagtgagtcctctgcctccctacccaggtcccccccacccacggtggacgaatcagccgataatgcatttcacctgggtccccttcgggtgaccactactaataccgtggctagcactcctccaacccccacgtgtgaagacgctgccagccggcagcaaaggctgtctgccctgcggagatatcaagacaaaagactgctcgctttgtccaatgaaagtgattctgaggaaaatgtgtgtgaagtcgagctggacacagatctgttccctagacctcgctctccaagcccggaggacgaatccagctcaagcagcagctctagtagttcagaggacgaagaggagcttaatgagcggcgagcgtccacctggcaacgcaatgccatgcggagacggcagaaaaccaccagggaggataagcctagtgccccaattaagcccacaaatacatatatcggagaagacaattacgactacccacagataaaggtcgacgatttatcctcctcacctacatcctctccggaacggagtacatcaacgttggagatacaaccatcacgcgcttctccaacatctgacattgaatccgtggaaagaaaaatctacaaggcttacaaatggctgcgatactcctacattagctacagtaataacaaagacggagagacaagtctggtcactggggaagcagatgagggacgtgcaggaacaagtcacaaggacaacccagccccaagctcgtcgaaagaagcatgtcttaatatcgccatggctcagcggaaccaggacctcccccctgagggttgcagtaaggacacgttcaaggaggaaacgcccaggacgcccagcaacggccctgggcatgaacattcttcgcatgcctgggctgaggtccccgaaggtactagccaggacaccggcaattctggcagtgttgaacacccctttgaaacgaagaaacttaacgggaaggccctctctagtagggccgaagaacctcctagtcctcctgttcctaaagccagcggcagtaccctgaatagcggatccggcaactgcccacgaactcagagtgacgacagcgaggagaggtccttggagacgatctgtgcgaatcataataacggacgactccaccctcggccaccccaccctcacaacaacggacagaacctaggagagttggaggttgtggcctactccagtccaggccactctgacacggaccgagacaattccagtctcacaggcactctgctgcataaggattgctgtgggagcgaaatggcctgcgagacgcctaatgcgggaacgagagaggaccccaccgatacaccagccacagactcttcaagggcagtgcacggccacagcggactcaagcgtcagaggatagaattagaggacacggactccgagaatagtagcagcgagaaaaagctgaaaacctag

SEQ ID NO: 103446 - DNA, 2583 bp, Artificial Sequence
  derived and/or modified sequence
atggagcaggccatccacagcagagtgaagcccatccagctgaagggcgagcaccacagcaacatcttctgcctggccttcaacagcggcaacaccaaggtgttcagcggcggcaacgacgagcaggtgatcctgcacgacgtggagagcagcgagaccctggacgtgttcgcccacgaggacgccgtgtacggcctgagcgtgagccccgtgaacgacaacatcttcgccagcagcagcgacgacggcagagtgctgatctgggacatcagagagagcccccacggcgagcccttctgcctggccaactaccccagcgccttccacagcgtgatgttcaaccccgtggagcccagactgctggccaccgccaacagcaaggagggcgtgggcctgtgggacatcagaaagccccagagcagcctgctgagatacggcggcaacctgagcctgcagagcgccatgagcgtgagattcaacagcaacggcacccagctgctggccctgagaagaagactgccccccgtgctgtacgacatccacagcagactgcccgtgttccagttcgacaaccagggctacttcaacagctgcaccatgaagagctgctgcttcgccggcgacagagaccagtacatcctgagcggcagcgacgacttcaacctgtacatgtggagaatccccgccgaccccgaggccggcggcatcggcagagtggtgaacggcgccttcatggtgctgaagggccacagaagcatcgtgaaccaggtgagattcaacccccacacctacatgatctgcagcagcggcgtggagaagatcatcaagatctggagcccctacaagcagcccggctgcaccggcgacctggacggcagaatcgaggacgacagcagatgcctgtacacccacgaggagtacatcagcctggtgctgaacagcggcagcggcctgagccacgactacgccaaccagagcgtgcaggaggaccccagaatgatggccttcttcgacagcctggtgagaagagagatcgagggctggagcagcgacagcgacagcgacctgagcgagagcaccatcctgcagctgcacgccggcgtgagcgagagaagcggctacaccgacagcgagagcagcgccagcctgcccagaagccccccccccaccgtggacgagagcgccgacaacgccttccacctgggccccctgagagtgaccaccaccaacaccgtggccagcaccccccccacccccacctgcgaggacgccgccagcagacagcagagactgagcgccctgagaagataccaggacaagagactgctggccctgagcaacgagagcgacagcgaggagaacgtgtgcgaggtggagctggacaccgacctgttccccagacccagaagccccagccccgaggacgagagcagcagcagcagcagcagcagcagcagcgaggacgaggaggagctgaacgagagaagagccagcacctggcagagaaacgccatgagaagaagacagaagaccaccagagaggacaagcccagcgcccccatcaagcccaccaacacctacatcggcgaggacaactacgactacccccagatcaaggtggacgacctgagcagcagccccaccagcagccccgagagaagcaccagcaccctggagatccagcccagcagagccagccccaccagcgacatcgagagcgtggagagaaagatctacaaggcctacaagtggctgagatacagctacatcagctacagcaacaacaaggacggcgagaccagcctggtgaccggcgaggccgacgagggcagagccggcaccagccacaaggacaaccccgcccccagcagcagcaaggaggcctgcctgaacatcgccatggcccagagaaaccaggacctgccccccgagggctgcagcaaggacaccttcaaggaggagacccccagaacccccagcaacggccccggccacgagcacagcagccacgcctgggccgaggtgcccgagggcaccagccaggacaccggcaacagcggcagcgtggagcaccccttcgagaccaagaagctgaacggcaaggccctgagcagcagagccgaggagccccccagcccccccgtgcccaaggccagcggcagcaccctgaacagcggcagcggcaactgccccagaacccagagcgacgacagcgaggagagaagcctggagaccatctgcgccaaccacaacaacggcagactgcaccccagacccccccacccccacaacaacggccagaacctgggcgagctggaggtggtggcctacagcagccccggccacagcgacaccgacagagacaacagcagcctgaccggcaccctgctgcacaaggactgctgcggcagcgagatggcctgcgagacccccaacgccggcaccagagaggaccccaccgacacccccgccaccgacagcagcagagccgtgcacggccacagcggcctgaagagacagagaatcgagctggaggacaccgacagcgagaacagcagcagcgagaagaagctgaagacctag

SEQ ID NO: 103447 - DNA, 633 bp, Artificial Sequence
  derived and/or modified sequence
atggagcaagcaatccatagcagagtgaagccaatccagctgaaaggcgagcatcactctaatattttttgcctcgcgtttaatagcggcaacaccaaggtgttctccggggggaatgatgagcaggtcatcctgcatgacgtggagtcggaaacgctggacgtatttgctcatgaagatgcagtgtatggcctgtccgtgtctcccgttaacgataacatattcgcctcttcatccgacgacggtcgggtactaatctgggatatccgcgagtctcctcacggcgagcctttttgccttgcaaactacccctctgctttccactcggtgatgtttaacccagtggagccgcggctcctagccactgctaattccaaagaaggagtcggactgtgggatatacgaaaaccccagtcttctctcttgaggtacggcggcaatttgtccctccagagtgcaatgagcgtgcggttcaattctaacggcacccagctcctggccttgcggcggcggctgcccccagtgctgtacgacattcactctcgcctccctgtgttccaattcgacaaccagggatacttcaacagttgtaccatgaaatcatgttgcttcgctggcgatcgagaccagtag

SEQ ID NO: 103448 - DNA, 633 bp, Artificial Sequence
  derived and/or modified sequence
atggagcaggccatccacagccgggtgaagcccatccagctgaagggggagcaccacagcaacatcttctgcctggccttcaacagcggcaacaccaaggtgttcagcggcggcaatgatgagcaggtgatcctgcatgatgtggagagcgagaccctggatgtgtttgcccatgaagatgctgtgtatggcctgtctgtgtcccctgtgaatgacaacatctttgccagcagcagtgatgatggccgggtgctgatctgggacatccgggagagcccccacggggagcccttctgcctggccaactaccccagcgccttccacagcgtgatgttcaaccctgtggagccccggctgctggccacagccaacagcaaggagggcgtgggcctgtgggacatcaggaagccccagagcagcctgctgcgctatggaggcaacctgagcctgcagagcgccatgtctgtgcgcttcaacagcaatggcacccagctgctggccctgcggcggcggctgccccctgtgctgtatgacatccacagccggctgcccgtcttccagtttgacaaccagggctacttcaacagctgcaccatgaagagctgctgctttgctggggaccgggaccagtag

SEQ ID NO: 103449 - DNA, 633 bp, Artificial Sequence
  derived and/or modified sequence
atggagcaggccatccacagccgggtgaagcccatccagctgaagggagaacatcatagtaatattttctgtctggccttcaactcaggaaacaccaaagtcttctctggaggtaacgacgagcaagtcattctacacgatgtggaatctgaaacacttgacgtattcgcacatgaggacgcagtgtacgggctgagcgtttcccctgttaatgataacattttcgcctctagttcagacgacggacgagtcttgatctgggacattagagaatcacctcatggcgaacccttttgtttggccaattaccccagcgcgttccacagcgtcatgttcaatcccgtggaaccaagacttctcgccaccgccaattcgaaagagggtgtggggctgtgggatattaggaagccgcagagttctctgctcagatatggcggcaacctgagcctgcaaagtgcaatgtcagtgaggtttaacagtaatggaacgcagctcttggccctgaggagacgtttacctccagtcctctatgatattcatagcaggttaccagtgttccagtttgacaatcaggggtacttcaatagctgtaccatgaaaagctgttgctttgcaggggaccgggaccagtag

SEQ ID NO: 103450 - DNA, 633 bp, Artificial Sequence
  derived and/or modified sequence
atggagcaggcaatccactcaagagtgaaacctatccagctgaaaggggagcaccacagtaatatcttctgcttagctttcaatagcggcaacactaaagtgttcagcggcggtaatgatgaacaggtgatcttacatgatgtggagagcgagaccttagatgtattcgcgcacgaagacgccgtttatggccttagtgtctctccagttaacgataacattttcgcctccagctccgatgatggcagagtacttatttgggacatccgagagtcaccccacggggagccattctgtcttgccaattacccgagtgcttttcattctgtcatgttcaaccctgtcgaaccccgactgttggccacagctaacagcaaggagggtgtcggcctgtgggacatccggaagccgcagagctcacttctgagatatggcggaaacctttcactccagagtgcgatgtccgttcgcttcaactccaacggaacgcaactcctggccctgaggcggaggctccccccagtgctctatgatatccactcccgcttacccgtgtttcagttcgacaaccaagggtattttaatagttgtacaatgaagtcgtgctgttttgccggtgaccgtgaccaatag

SEQ ID NO: 103451 - DNA, 759 bp, Artificial Sequence
  derived and/or modified sequence
gcggccgcgcgtgaggccgagggaggggcggcggcgcgagcggcggcggcggcggttccagcatgaagaggagagctggcctggggggcagcatgaggaggagatgaccgccgggttctgctatggcacatggaacaagccatccactccagggtcaagcccatacagctgaaaggagagcaccattccaacattttttgcctggctttcaacagtgggaacactaaagtgttctctggaggcaatgatgagcaagttatcctccatgatgttgaaagtgagacattggacgtgtttgctcatgaagatgcagtatatggcttgtctgtgagcccagtgaatgacaacatttttgccagttcctcagatgatggccgggttctcatttgggacattcgggaatccccccatggagagcccttctgcctggcaaactatccatcagcctttcatagtgtcatgtttaaccctgtggagcccaggttgttggccacagccaattcaaaggaaggagtgggactctgggacattcgaaaacctcagagttctctcctgcgctatggtggaaacctgtccctccaaagtgccatgagtgtacgattcaacagcaacgggacccagctcctggccctgaggcgacgcctgccccctgtgctctatgacatccattcccgcctgcctgtgtttcagtttgacaatcagggttacttcaactcatgcaccatgaaaagctgctgttttgcaggagatcgtgaccag

SEQ ID NO: 103452 - DNA, 633 bp, Artificial Sequence
  derived and/or modified sequence
atggagcaggccatccacagcagagtgaagcccatccagctgaagggcgagcaccacagcaacatcttctgcctggccttcaacagcggcaacaccaaggtgttcagcggcggcaacgacgagcaggtgatcctgcacgacgtggagagcgagaccctggacgtgttcgcccacgaggacgccgtgtacggcctgagcgtgagccccgtgaacgacaacatcttcgccagcagcagcgacgacggcagagtgctgatctgggacatcagagagagcccccacggcgagcccttctgcctggccaactaccccagcgccttccacagcgtgatgttcaaccccgtggagcccagactgctggccaccgccaacagcaaggagggcgtgggcctgtgggacatcagaaagccccagagcagcctgctgagatacggcggcaacctgagcctgcagagcgccatgagcgtgagattcaacagcaacggcacccagctgctggccctgagaagaagactgccccccgtgctgtacgacatccacagcagactgcccgtgttccagttcgacaaccagggctacttcaacagctgcaccatgaagagctgctgcttcgccggcgacagagaccagtag

SEQ ID NO: 103453 - protein, 253 aa, Artificial Sequence
  derived and/or modified sequence
MAAVDIRDNLLGISWVDSSWIPILNSGSVLDYFSERSNPFYDRTCNNEVVKMQRLTLEHLNQMVGIEYILLHAQEPILFIIRKQQRQSPAQVIPLADYYIIAGVIYQAPDLGSVINSRVSLFSFYKLTAVHGIQSAFDEAMSYCRYHPSKGYWWHFKDHEEQDKVRPKAKRKEEPSSIFQRQRVDALLLDLRQKFPPKFVQLKPGEKPVPVDQTKKEAEPIPETVKPEEKETTKNVQQTVSAKGPPEKRMRLQ

SEQ ID NO: 103454 - DNA, 762 bp, Artificial Sequence
  derived and/or modified sequence
atggccgcagtggacatccgagacaacctgttggggatcagctgggttgattcctcttggatacctatactgaatagtggttcagtgctggactacttttcagagcgcagcaacccattttacgatcgcacttgcaacaacgaagtggtgaagatgcagcgactgaccctcgagcacctgaaccagatggtgggcatcgaatacatcctccttcatgcgcaggagccgatcctgtttatcattcggaaacagcagcggcagagcccagctcaggttattcctctggccgattattacattatcgccggcgtaatctaccaggcaccagacctcggcagcgttatcaatagcagagtgtctctgttctccttctataaacttaccgccgtgcatggaattcaaagtgcctttgatgaggccatgtcttactgtaggtatcacccatcaaaaggctattggtggcattttaaggatcatgaggagcaagacaaagtcaggccgaaggcgaaacgcaaagaagagccatccagcatcttccagcgccagcgtgtagacgccctgctgctggacctgcgtcagaaatttccaccgaaatttgtccagctgaagccaggcgagaagccggttcctgttgaccaaacaaaaaaagaggccgagcccatccctgagaccgtgaaaccagaggaaaaagagactaccaagaatgtgcaacagactgtgagcgcaaaaggccctcctgagaaacggatgcgcttgcagtag

SEQ ID NO: 103455 - DNA, 1507 bp, Artificial Sequence
  derived and/or modified sequence
gtaaacgctctcggaattatggcggcggtggatatccgagacaatctgctgggaatttcttgggttgacagctcttggatccctattttgaacagtggtagtgtcctggattacttttcagaaagaagtaatcctttttatgacagaacatgtaataatgaagtggtcaaaatgcagaggctaacattagaacacttgaatcagatggttggaatcgagtacatccttttgcatgctcaagagcccattcttttcatcattcggaagcaacagcggcagtcccctgcccaagttatcccactagctgattactatatcattgctggagtgatctatcaggcaccagacttgggatcagttataaactctagagtgagtttattttccttttacaagcttactgcagtgcatggtattcagtcagcttttgatgaagctatgtcatactgtcgatatcatccttccaaagggtattggtggcacttcaaagatcatgaagagcaagataaagtcagacctaaagccaaaaggaaagaagaaccaagctctatttttcagagacaacgtgtggatgctttacttttagacctcagacaaaaatttccacccaaatttgtgcagctaaagcctggagaaaagcctgttccagtggatcaaacaaagaaagaggcagaacctataccagaaactgtaaaacctgaggagaaggagaccacaaagaatgtacaacagacagtgagtgctaaaggcccccctgaaaaacggatgagacttcagtgagtactggacaaaagagaagcctggaagactcctcatgctagttatcatacctcagtactgtggctcttgagctttgaagtactttattgtaaccttcttatttgtatggaatgcgcttattttttgaaaggatattaggccggatgtggtggctcacgcctgtaatcccagcactttgggaggccatggcgggtggatcacttgaggtcagaagttcaagaccagcctgaccaatatggtgaaaccccgtctctactaaaaatacaaaaattagccgggcgtggtggcgggcgcccatagtcccagctactcgggaggctgagacaggagacttgcttgaacccgggaggtggaggttgccctgagctgattatcatgctgttgcactccagcttgggcgacagagcgagactttgtctcaaaaaagaagaaaagatattattcccatcatgatttcttgtgaatatttgttatatgtcttctgtaacctttcctctcccggacttgagcaacctacacactcacatgtttactggtagatatgtttaaaagcaaaataaaggtatttgtatatattgcttcatcatgacttttttcttcatcataactgatatttttcagatgcactttgaagacataaaggatgttaaagtagtaactaagcatatttctttttgttcagttacataatcctcagtattaaaataaacagttgctgacattttgg

SEQ ID NO: 103456 - DNA, 762 bp, Artificial Sequence
  derived and/or modified sequence
atggctgctgtggacatccgggacaacctgctgggcatctcctgggtggacagctcctggatccccatcctgaacagcggctctgtgctggactacttcagcgagaggagcaaccccttctatgacaggacctgcaacaatgaggtggtgaagatgcagaggctgaccctggagcacctgaaccagatggtgggcatcgagtacatcctgctgcacgcccaggagcccatcctcttcatcatcaggaagcagcagaggcagagccctgcccaggtgatccccctggccgactactacatcatcgccggggtcatctaccaggccccagacctgggcagcgtcatcaacagccgggtgtccctcttctccttctacaagctgacagctgtgcacggcatccagagcgcctttgatgaggccatgagctactgccgctaccaccccagcaagggctactggtggcacttcaaggaccacgaggagcaggacaaggtgcggcccaaggccaagaggaaggaggagcccagcagcatcttccagaggcagagggtggatgccctgctgctggacctgcggcagaagttcccccccaagtttgtgcagctgaagccaggagagaagcctgtgcctgtggaccagaccaagaaggaggccgagcccatccctgagaccgtgaagccagaggagaaggagaccaccaagaatgtgcagcagacagtgtctgccaagggccccccagagaagaggatgaggctgcagtag

SEQ ID NO: 103457 - DNA, 762 bp, Artificial Sequence
  derived and/or modified sequence
atggccgccgtggacatccgggacaacctgctgggcatcagctgggtggacagctcttggatccccattctgaactctggctccgtattggactatttctcggagcggtctaatcctttctacgatcgtacttgtaataacgaagtcgtaaaaatgcagcgcctgaccctggagcatctcaatcagatggtcggtatagaatacatactgctccatgctcaagaaccgatcctattcataataaggaaacagcagcgccagtctcccgcccaggtgattccgctggccgactactatatcattgcaggggtaatttatcaggcaccggacctgggctctgtgataaactctagagtgtcccttttctctttctataaactgaccgctgtccacggcattcagagcgcatttgacgaagcaatgtcatattgtaggtaccacccatctaaaggctattggtggcattttaaagaccatgaggaacaggacaaagtaagacctaaagcaaaaaggaaagaggaaccttcctccatcttccaacgtcaacgggtggatgcactgctgctggacctacgccagaagttccctcctaagttcgtgcagctgaagcccggagagaaacccgttccggtggaccaaacaaaaaaggaggccgagcctatacctgaaacagtgaaacccgaagagaaggagacaactaaaaatgtgcagcagacagtatcagctaaggggcccccggagaagcggatgcgcctccagtag

SEQ ID NO: 103458 - DNA, 762 bp, Artificial Sequence
  derived and/or modified sequence
atggctgctgtggatattagagacaacctccttggcatctcttgggtcgacagcagttggatacctatcctgaatagtgggtccgttctggattacttcagcgagagatccaatccattctatgaccggacatgtaataacgaggtggtgaagatgcagagattgacactcgagcacctgaaccagatggtcggtatagagtacatcctgctgcacgcgcaggaaccaattctttttatcatcagaaaacagcaaaggcagtcacccgcacaggttatccccctcgcagattactacatcatcgctggtgtgatatatcaggcaccggacctaggaagcgtgatcaactcacgggtgagcttgttttccttttacaagctcaccgctgtacacggcatccagtccgccttcgatgaggcgatgtcatattgtcgctatcaccccagtaagggatactggtggcattttaaagaccatgaggaacaggacaaagtgagacctaaggctaaacggaaagaagagccctctagcatcttccaacggcagcgcgtcgatgcccttctattggatctcaggcagaagtttcctccgaaatttgtgcagcttaaacccggtgagaaaccagtgccagtcgatcagactaagaaggaagctgagccgatcccagaaacggtgaagccagaagagaaagaaacaacgaaaaacgtgcagcagacagtctccgcgaaagggcctcccgagaaacggatgcgtctccagtag

SEQ ID NO: 103459 - DNA, 762 bp, Artificial Sequence
  derived and/or modified sequence
atggccgccgtggacatcagagacaacctgctgggcatcagctgggtggacagcagctggatccccatcctgaacagcggcagcgtgctggactacttcagcgagagaagcaaccccttctacgacagaacctgcaacaacgaggtggtgaagatgcagagactgaccctggagcacctgaaccagatggtgggcatcgagtacatcctgctgcacgcccaggagcccatcctgttcatcatcagaaagcagcagagacagagccccgcccaggtgatccccctggccgactactacatcatcgccggcgtgatctaccaggcccccgacctgggcagcgtgatcaacagcagagtgagcctgttcagcttctacaagctgaccgccgtgcacggcatccagagcgccttcgacgaggccatgagctactgcagataccaccccagcaagggctactggtggcacttcaaggaccacgaggagcaggacaaggtgagacccaaggccaagagaaaggaggagcccagcagcatcttccagagacagagagtggacgccctgctgctggacctgagacagaagttcccccccaagttcgtgcagctgaagcccggcgagaagcccgtgcccgtggaccagaccaagaaggaggccgagcccatccccgagaccgtgaagcccgaggagaaggagaccaccaagaacgtgcagcagaccgtgagcgccaagggcccccccgagaagagaatgagactgcagtag

SEQ ID NO: 103460 - protein, 181 aa, Artificial Sequence
  derived and/or modified sequence
MAAVDIRDNLLGISWVDSSWIPILNSGSVLDYFSERSNPFYDRTCNNEVVKMQRLTLEHLNQMVGIEYILLHAQEPILFIIRKQQRQSPAQVIPLADYYIIAGVIYQAPDLGSVINSRVLTAVHGIQSAFDEAMSYCRYHPSKGYWWHFKDHEEQAKAWRKACSSGSNKERGRTYTRNCKT

SEQ ID NO: 103461 - DNA, 546 bp, Artificial Sequence
  derived and/or modified sequence
atggctgcagtggacatccgcgacaacttgctgggaattagctgggtcgactcatcctggatcccaatcctcaattctggaagcgtgctcgactacttctctgagcgctctaacccattctacgataggacctgtaataacgaggtcgtgaagatgcaacgccttactttagagcacctgaaccagatggtcggcattgagtatattcttctgcacgcacaggaaccgattctctttatcattcggaagcaacagcgacagtcccccgctcaggtcattccattggctgattattacattattgctggggtgatctaccaggcccctgatcttggctcggttataaattcccgggtactcacggcagtgcatggcatccaaagtgccttcgatgaggcaatgtcttattgccggtaccatccgtcgaagggctattggtggcactttaaggaccatgaggagcaggctaaggcctggaggaaggcttgttccagtggcagcaataaagagaggggcagaacgtacacaagaaactgtaagacttag

SEQ ID NO: 103462 - DNA, 931 bp, Artificial Sequence
  derived and/or modified sequence
gtaaacgctctcggaattatggcggcggtggatatccgagacaatctgctgggaatttcttgggttgacagctcttggatccctattttgaacagtggtagtgtcctggattacttttcagaaagaagtaatcctttttatgacagaacatgtaataatgaagtggtcaaaatgcagaggctaacattagaacacttgaatcagatggttggaatcgagtacatccttttgcatgctcaagagcccattcttttcatcattcggaagcaacagcggcagtcccctgcccaagttatcccactagctgattactatatcattgctggagtgatctatcaggcaccagacttgggatcagttataaactctagagtgcttactgcagtgcatggtattcagtcagcttttgatgaagctatgtcatactgtcgatatcatccttccaaagggtattggtggcacttcaaagatcatgaagagcaagctaaagcctggagaaaagcctgttccagtggatcaaacaaagaaagaggcagaacctataccagaaactgtaaaacctgaggagaaggagaccacaaagaatgtacaacagacagtgagtgctaaaggcccccctgaaaaacggatgagacttcagtgagtactggacaaaagagaagcctggaagactcctcatgctagttatcatacctcagtactgtggctcttgagctttgaagtactttattgtaaccttcttatttgtatggaatgcgcttattttttgaaaggatattaggccggatgtggtggctcacgcctgtaatcccagcactttgggaggccatggcgggtggatcacttgaggtcagaagttcaagaccagcctgaccaatatggtgaaaccccgtctctactaaaaatacaaaaattagccgggcgtggtggc

SEQ ID NO: 103463 - DNA, 546 bp, Artificial Sequence
  derived and/or modified sequence
atggctgctgtggacatccgggacaacctgctgggcatctcctgggtggacagctcctggatccccatcctgaacagcggctctgtgctggactacttcagcgagaggagcaaccccttctatgacaggacctgcaacaatgaggtggtgaagatgcagaggctgaccctggagcacctgaaccagatggtgggcatcgagtacatcctgctgcacgcccaggagcccatcctcttcatcatcaggaagcagcagaggcagagccctgcccaggtgatccccctggccgactactacatcatcgccggggtcatctaccaggccccagacctgggcagcgtcatcaacagccgggtgctgacagctgtgcacggcatccagagcgcctttgatgaggccatgagctactgccgctaccaccccagcaagggctactggtggcacttcaaggaccacgaggagcaggccaaggcctggaggaaggcctgcagcagcggcagcaacaaggagcggggccgcacctacaccaggaactgcaagacctag

SEQ ID NO: 103464 - DNA, 546 bp, Artificial Sequence
  derived and/or modified sequence
atggccgccgtggacatccgggacaacctgctgggcatcagctgggtcgattccagttggatacccatccttaatagtggatccgttttagactacttcagcgaaaggtctaaccccttctacgatcggacttgcaacaacgaggtggttaaaatgcagaggctcaccctagagcacctaaaccagatggtaggtatagagtacatcctgctgcatgcacaagagcctattctttttattatcaggaaacaacaaagacagtccccggcacaggtcattccgctggcagactattatatcatcgcaggagtaatttatcaggcaccggacttgggctctgtgattaacagtagagtcctgaccgcagtacacggtattcagtcagcttttgatgaggccatgtcttactgccggtaccacccttccaagggttattggtggcattttaaggaccacgaagagcaggctaaagcttggaggaaggcctgctcctctggatcgaacaaagagcgcggcaggacatatactcggaactgtaaaacatag

SEQ ID NO: 103465 - DNA, 546 bp, Artificial Sequence
  derived and/or modified sequence
atggcagctgtagacattcgcgacaatctcctgggaattagttgggtcgattcctcatggattcccatattaaacagcggctccgtgctcgactacttcagcgagaggtctaatccattctacgacaggacttgcaataacgaggtcgtgaagatgcagcgcctcactctagaacatcttaatcagatggtagggatcgagtatatactactacacgcccaggagcccatactgtttattatccgcaagcagcagagacaatcccctgcacaggtgattcctctcgcagactattatatcatcgccggagttatctatcaagccccagacctaggctctgtcataaacagccgggtgctgaccgcagtgcacggcatacagtcagcatttgatgaggccatgagctactgtcgctatcacccgtctaagggctactggtggcactttaaggaccacgaggagcaggccaaggcttggcggaaagcgtgttcctctggatctaacaaagaacgcggacgcacatacacccgaaactgcaagacttag

SEQ ID NO: 103466 - DNA, 546 bp, Artificial Sequence
  derived and/or modified sequence
atggccgccgtggacatcagagacaacctgctgggcatcagctgggtggacagcagctggatccccatcctgaacagcggcagcgtgctggactacttcagcgagagaagcaaccccttctacgacagaacctgcaacaacgaggtggtgaagatgcagagactgaccctggagcacctgaaccagatggtgggcatcgagtacatcctgctgcacgcccaggagcccatcctgttcatcatcagaaagcagcagagacagagccccgcccaggtgatccccctggccgactactacatcatcgccggcgtgatctaccaggcccccgacctgggcagcgtgatcaacagcagagtgctgaccgccgtgcacggcatccagagcgccttcgacgaggccatgagctactgcagataccaccccagcaagggctactggtggcacttcaaggaccacgaggagcaggccaaggcctggagaaaggcctgcagcagcggcagcaacaaggagagaggcagaacctacaccagaaactgcaagacctag

SEQ ID NO: 103467 - DNA, 936 bp, Artificial Sequence
  derived and/or modified sequence
atgctgctgtggaccgccgtgctgctgttcgtgccctgcgtgggcaagaccgtgtggctgtacctgcaggcctggcccaaccccgtgttcgagggcgacgccctgaccctgagatgccagggctggaagaacacccccctgagccaggtgaagttctacagagacggcaagttcctgcacttcagcaaggagaaccagaccctgagcatgggcgccgccaccgtgcagagcagaggccagtacagctgcagcggccaggtgatgtacatcccccagaccttcacccagaccagcgagaccgccatggtgcaggtgcaggcccccgtgagcagacccgtgctgaccctgcaccacggccccgccgaccccgccgtgggcgacatggtgcagctgctgtgcgaggcccagagaggcagcccccccatcctgtacagcttctacctggacgagaagatcgtgggcaaccacagcgccccctgcggcggcaccaccagcctgctgttccccgtgaagagcgagcaggacgccggcaactacagctgcgaggccgagaacagcgtgagcagagagagaagcgagcccaagaagctgagcctgaagggcagccaggtgctgttcacccccgccagcaactggctggtgccctggctgcccgccagcctgctgggcctgatggtgatcgccgccgccctgctggtgtacgtgagaagctggagaaaggccggccccctgcccagccagatcccccccaccgcccccggcggcgagcagtgccccctgtacgccaacgtgcaccaccagaagggcaaggacgagggcgtggtgtacagcgtggtgcacagaaccagcaagagaagcgaggccagaagcgccgagttcaccgtgggcagaaagttctaccacctgtgcggcggcgagatgcccgccgcccagtag

SEQ ID NO: 103468 - DNA, 947 bp, Artificial Sequence
  derived and/or modified sequence
catgctgctctggacggctgtgctgctctttgttccctgtgttgggaaaactgtctggctgtacctccaagcctggccaaaccctgtgtttgaaggagatgccctgactctgcgatgtcagggatggaagaatacaccactgtctcaggtgaagttctacagagatggaaaattccttcatttctctaaggaaaaccagactctgtccatgggagcagcaacagtgcagagccgtggccagtacagctgctctgggcaggtgatgtatattccacagacattcacacaaacttcagagactgccatggttcaagtccaagctcctgtatcccgtcctgtgctcactctgcaccacgggcctgctgaccctgctgtgggggacatggtgcagctcctctgtgaggcacagaggggctcccctccgatcctgtattccttctaccttgatgagaagattgtggggaaccactcagctccctgtggtggaaccacctccctcctcttcccagtgaagtcagaacaggatgctgggaactactcctgcgaggctgagaacagtgtctccagagagaggagtgagcccaagaagctgtctctgaagggttctcaagtcttgttcactcccgccagcaactggctggttccttggcttcctgcgagcctgcttggcctgatggttattgctgctgcacttctggtttatgtgagatcctggagaaaagctgggccccttccatcccagataccacccacagctccaggtggagagcagtgcccactatatgccaacgtgcatcaccagaaagggaaagatgaaggtgttgtctactctgtggtgcatagaacctcaaagaggagtgaagccaggtctgctgagttcaccgtggggagaaagttctatcatctgtgcggaggtgagatgcctgcagcccagtgaggtttcatcc

SEQ ID NO: 103469 - DNA, 936 bp, Artificial Sequence
  derived and/or modified sequence
atgttgctttggacagctgtgcttctgtttgtgccttgcgtagggaaaactgtatggctgtatctgcaggcttggcccaatcccgttttcgagggcgacgccctgactctgcgctgtcagggctggaagaacacacctctctcgcaggttaagttctacagggacggaaaattcctgcacttcagcaaagagaatcagaccctctccatgggcgccgcaacggttcagtctcgtggccagtactcctgttctggacaagtaatgtatatcccacagacgttcacacagacgtcagagacggccatggtacaggttcaggcccccgtctcccggcctgtcctcacactgcatcacgggccagctgaccctgcagtcggagatatggtgcagttgctgtgcgaggcccagagagggagcccacctatcctctatagtttctaccttgatgaaaagatcgtggggaatcactccgccccctgtggcggcaccacgagcttactgtttccagtgaagtccgagcaggatgccggcaactatagttgtgaagccgagaattctgtctcccgggagcgatctgaacctaagaaactgtctttgaaagggagccaggtcctgtttacacccgcctctaattggctagtgccctggctcccagcatcacttctcggattgatggtcattgccgccgcactgctcgtgtatgtgaggtcttggagaaaggcgggtccattgccatcccagattccaccgacggctccgggaggagagcaatgtcctctttacgccaacgtccaccatcagaagggtaaggacgaaggtgtggtatattccgtagtccaccgcacttctaagaggtcagaagcaagaagcgccgagttcacagtaggcaggaagttttaccatttgtgcggaggcgaaatgccagccgctcagtag

SEQ ID NO: 103470 - DNA, 936 bp, Artificial Sequence
  derived and/or modified sequence
atgctgctgtggacagctgtgctgctgtttgtgccctgtgtgggcaagacagtgtggctgtacctgcaggcctggcccaaccctgtgtttgaaggagatgccctgaccctgcgctgccagggctggaagaacacccccctgagccaggtgaagttctacagagatggcaagttcctgcacttcagcaaggagaaccagaccctgtccatgggcgccgccaccgtgcagagccggggccagtacagctgcagcggccaggtgatgtacatcccccagaccttcacccagaccagcgagacagccatggtgcaggtgcaggcccctgtgtccaggcctgtgctgaccctgcaccacggccctgctgaccctgctgtgggggacatggtgcagctgctgtgtgaggcccagaggggcagcccccccatcctgtacagcttctacctggatgagaagatcgtgggcaaccacagcgccccctgtggcggcaccaccagcctgctcttccctgtgaagtctgagcaggatgctggcaactacagctgtgaggccgagaacagcgtgtcccgggagaggtctgagcccaagaagctgagcctgaagggcagccaggtgctcttcaccccagccagcaactggctggtgccctggctgcctgccagcctgctgggcctgatggtgattgctgctgccctgctggtgtatgtgcgctcctggaggaaggccggccccctgcccagccagatccccccaacagcccctggaggagagcagtgccccctgtatgccaacgtgcaccaccagaagggcaaggatgaaggagtggtgtacagcgtggtgcacaggaccagcaagaggtctgaggcccggtctgctgagttcaccgtgggcaggaagttctaccacctgtgtggcggggagatgcctgctgcccagtag

SEQ ID NO: 103471 - DNA, 936 bp, Artificial Sequence
  derived and/or modified sequence
atgctgctgtggaccgccgtgctgctgttcgtgccctgcgtgggcaaaacagtgtggctgtatctgcaggcctggcccaatcctgtgttcgaaggagatgccctcacgctgaggtgccagggctggaagaacacacccctctcccaggtcaaattttacagagatggaaagttcttgcatttttcaaaggagaatcaaactctttccatgggcgcagcaactgtccaaagtagaggccaatactcctgctcaggccaggttatgtacatacctcagacatttacacagacatcagagacagccatggttcaggttcaggcccctgtgtcacgacccgtactgacactacatcatggacccgcggacccggcagtcggcgacatggtgcagctgctatgtgaggcacaaagggggagtccacccatcctgtacagcttctaccttgacgagaaaatcgtgggtaaccacagcgccccctgtggcggaactaccagcctactcttccccgtgaagagcgagcaagacgccggcaactactcctgcgaggcggagaatagcgttagccgcgaacgaagcgaacccaagaagctgtcattgaagggcagccaggtactgtttacgccggctagcaactggctggtaccgtggttgcccgcctccttactgggcctgatggtgatagcagccgccctgttggtgtatgttaggtcttggagaaaggctggtccgttgccaagccagattcccccgaccgctccaggcggcgagcaatgtccgctgtacgcaaacgtgcatcatcagaagggaaaagacgagggcgtggtatactccgtcgtgcacaggactagtaagcggtcagaagcaaggagcgctgaatttacagttgggcggaagttctaccacctgtgcggtggggagatgcccgcggctcagtag

SEQ ID NO: 103472 - DNA, 936 bp, Artificial Sequence
  derived and/or modified sequence
atgctcctctggacagctgtattgcttttcgtgccctgcgtcgggaagacagtgtggctgtatctgcaagcctggcctaacccggtctttgaaggcgacgcattgacactgcgttgccaagggtggaaaaatacccccctcagccaggtgaaattctaccgggacggcaaattccttcactttagcaaagagaaccaaacactatccatgggcgctgccacagtgcaaagcaggggccaatacagttgcagtggtcaggtgatgtatatccctcagacattcacacagacatctgagactgcgatggttcaggtgcaggccccagtttctagaccagtactgaccttacatcatggtcccgcagacccagccgtgggcgatatggttcaactgctttgtgaggcacagaggggatcgcctccaatcctgtacagtttttacctggatgagaagatcgtcgggaaccattcagccccatgcgggggtaccacctcattgctgttcccagtaaaatcggagcaagacgctggaaattacagctgcgaggcggagaatagtgtgtctcgtgaaagatcagaacccaaaaagctgtcactgaaaggaagccaggtcctttttacacctgcctccaactggttagtcccatggctccctgcctccctgcttggcctgatggtgattgcggctgccctcctggtctacgttagaagttggaggaaggcaggacctttgccctcccaaattcctcctactgctcctgggggagaacaatgtcctctttacgctaacgtacaccaccagaagggcaaggatgaaggtgtggtgtactcagtggtccataggacaagtaagcggtccgaggcacggtccgctgagttcacagtcggcaggaaattctatcacctgtgcggcggtgaaatgcccgctgctcagtag

SEQ ID NO: 103473 - protein, 113 aa, Artificial Sequence
  derived and/or modified sequence
MMLTIGDVIKQLIEAHEQGKDIDLNKVKTKTAAKYGLSAQPRLVDIIAAVPPQYRKVLMPKLKAKPIRTASGIAVVAVMCKPHRCPHISFTGNICVYCPGGPDSDFEYSTQSY

SEQ ID NO: 103474 - protein, 191 aa, Artificial Sequence
  derived and/or modified sequence
MMLTIGDVIKQLIEAHEQGKDIDLNKVKTKTAAKYGLSAQPRLVDIIAAVPPQYRKVLMPKLKAKPIRTASGIAVVAVMCKPHRCPHISFTGNICVYCPGGPDSDFEYSTQSYTGYEPTSMRAIRARYDPFLQTRHRIEQLKQLGHSVDKVEFIVMGGTFMALPEEYRDYFIRNLHDALSGHTSNNIYEAV

SEQ ID NO: 103475 - DNA, 342 bp, Artificial Sequence
  derived and/or modified sequence
atgatgctgaccatcggagacgtgataaagcaactgatcgaggctcatgagcagggtaaagatattgacctcaacaaggttaaaacgaagaccgccgccaagtatggcttgagcgcacagccaaggctggtcgatatcattgcggcagtcccccctcagtaccgcaaagtcctcatgcctaagttaaaagccaagccaatacgcaccgcatcagggatcgccgtcgtggccgtgatgtgtaagcctcacagatgcccccacatatcctttacaggaaacatttgcgtgtactgccctggcggaccagattctgatttcgaatattccacacagagctactag

SEQ ID NO: 103476 - DNA, 1602 bp, Artificial Sequence
  derived and/or modified sequence
atgatgctgacaattggagacgtgatcaagcagctaattgaagcccatgaacagggaaaagacatagacctcaataaagtaaaaaccaaaacggccgccaagtatggcctgtccgcccaaccccggctggtcgacattatagccgccgtccctccacagtatagaaaggtgctcatgcctaagctcaaggccaagccgatccgtacagcgagtggcatcgcagtggtcgctgtcatgtgtaaaccgcacaggtgtccacacattagctttaccggtaacatttgcgtgtactgccccggcgggcctgatagtgatttcgagtacagcacgcaaagctatacaggatacgaacctacaagcatgcgggccatccgcgctaggtacgatcccttcttacagaccagacacagaattgagcagctcaagcagctgggtcattctgttgacaaagtggaatttatagtaatgggcgggacatttatggccttgcctgaagaataccgcgactacttcatccgaaatctgcatgatgccctttcgggacatactagtaataacatatatgaggctgtaaagtactctgagcggtctcttactaagtgtattggcatcaccattgagacacggcccgattattgcatgaagcgccacctgtcagatatgcttacctacggatgcacacgcctggagattggggtccagagcgtatacgaagatgttgcccgagatactaacaggggccatacagtgaaggcagtatgtgagagcttccatcttgccaaggatagtgggttcaaggtggtggcccacatgatgccagacttgccgaacgtggggctggaacgcgacatcgaacaatttacagagttcttcgaaaatcctgccttcaggcccgacggactcaagctatacccgactctcgtgatacggggaacagggctgtatgaactgtggaagagtggcaggtataaaagttatagccccagcgatctggtggagttggtggcacgtatcctagcactcgtccccccctggacgcgtgtttacagggtacaaagggatatacctatgcccctggttagtagtggtgttgaacatgggaatctcagagaactcgctctggcccgcatgaaggacctaggaatccaatgtcgggatgtgcggaccagggaggtcggcatccaggagattcaccataaagttcgcccttaccaggtggagctggtgagacgcgattatgtggccaatggcggctgggaaaccttcttgagttatgaagatcctgatcaagatatactgatcggcctgctgagactgcggaaatgcagtgaagaaaccttccgctttgaactgggaggtggagtgagcattgtgcgggaactccacgtatacggcagcgtcgtacccgtgtctagccgcgatccgacgaaatttcagcatcagggatttggcatgctgctgatggaagaggctgagagaatcgcgagggaggagcacgggtccggaaagatcgccgtcatctctggagtcggtactcgaaactactatcgaaaaattgggtacagattgcagggaccatacatggtcaaaatgctcaaatag

SEQ ID NO: 103477 - DNA, 576 bp, Artificial Sequence
  derived and/or modified sequence
atgatgctcaccatcggggatgtgataaagcagctcatcgaggctcatgagcaggggaaggatatagacttgaacaaagtgaaaacgaaaaccgctgctaaatacggcttgagcgcgcagccgagactggtggatatcatagcagcagtcccacctcagtacaggaaggtccttatgcccaaactcaaagctaagcccattaggaccgccagcggcatagcggtcgtggcagtaatgtgcaagccccaccgttgcccacacatctcattcacagggaacatctgcgtgtactgtccaggcggccctgactctgactttgaatactccacacagtcatacaccggatatgagccaacaagcatgagagccattagggcgcgctatgatcctttcctgcagaccaggcaccgcattgagcaactgaaacagctgggccattccgtagacaaggtagagtttatcgtgatgggcgggacctttatggcgcttcccgaggagtatagggattatttcatccgtaacttgcacgatgcgctgagtgggcacactagcaataatatctatgaagcggtttag

SEQ ID NO: 103478 - DNA, 342 bp, Artificial Sequence
  derived and/or modified sequence
atgatgctgaccatcggagatgtgatcaagcagctgattgaggcccacgagcagggcaaggacatcgacctgaacaaggtgaagaccaagacagctgccaagtatggcctgagcgcccagccccggctggtggacatcatcgctgctgtgcccccccagtacaggaaggtgctgatgcccaagctgaaggccaagcccatcagaacagccagcggcattgctgtggtggccgtgatgtgcaagccccaccgctgcccccacatctccttcaccggcaacatctgtgtgtactgccctgggggccctgacagcgactttgagtacagcacccagagctactag

SEQ ID NO: 103479 - DNA, 1602 bp, Artificial Sequence
  derived and/or modified sequence
atgatgctgaccatcggagatgtgatcaagcagctgattgaggcccacgagcagggcaaggacatcgacctgaacaaggtgaagaccaagacagctgccaagtatggcctgagcgcccagccccggctggtggacatcatcgctgctgtgcccccccagtacaggaaggtgctgatgcccaagctgaaggccaagcccatcagaacagccagcggcattgctgtggtggccgtgatgtgcaagccccaccgctgcccccacatctccttcaccggcaacatctgtgtgtactgccctgggggccctgacagcgactttgagtacagcacccagagctacacaggctatgagcccacctccatgagggccatccgggcccgctatgaccccttcctgcagaccaggcaccgcatcgagcagctgaagcagctgggccacagcgtggacaaggtggagttcatcgtgatgggcggcaccttcatggccctgcctgaggagtacagagactacttcatccggaacctgcatgatgccctgagcggccacaccagcaacaacatctatgaggccgtgaagtacagcgagaggagcctgaccaagtgcatcggcatcaccatcgagaccaggccagactactgcatgaagaggcacctgagtgacatgctgacctacggctgcacccggctggagattggagtgcagagcgtgtatgaagatgtggcccgggacaccaacagaggccacacagtgaaggctgtgtgtgagagcttccacctggccaaggacagcggcttcaaggtggtggcccacatgatgccagacctgcccaacgtgggcctggagcgggacatcgagcagttcacagagttctttgagaacccagccttccggccagatggcctgaagctgtaccccaccctggtgatccggggcaccggcctgtatgagctgtggaagagcggccgctacaagagctacagccccagcgacctggtggagctggtggcccgcatcctggccctggtgcccccctggaccagggtgtacagagtgcagagggacatccccatgcccctggtgagcagcggcgtggagcacggcaacctgcgggagctggccctggccaggatgaaggacctgggcatccagtgcagagatgtgaggacccgggaggtgggcatccaggagatccaccacaaggtgcggccctaccaggtggagctggtgcggcgggactatgtggccaacggcggctgggagaccttcctgtcctatgaggaccctgaccaggacatcctgattggcctgctgcggctgaggaaatgttctgaggagaccttccgctttgagctgggcggcggcgtgtccatcgtgcgggagctgcacgtgtatggctctgtggtgcctgtgagcagccgggaccccaccaagttccagcaccagggcttcggcatgctgctgatggaggaggccgagcgcatcgcccgggaggagcacggcagcggcaagattgctgtgatcagcggcgtgggcaccaggaactactacaggaagattggctaccgcctgcagggcccctacatggtgaagatgctgaagtag

SEQ ID NO: 103480 - DNA, 576 bp, Artificial Sequence
  derived and/or modified sequence
atgatgctgaccatcggagatgtgatcaagcagctgattgaggcccacgagcagggcaaggacatcgacctgaacaaggtgaagaccaagacagctgccaagtatggcctgagcgcccagccccggctggtggacatcatcgctgctgtgcccccccagtacaggaaggtgctgatgcccaagctgaaggccaagcccatcagaacagccagcggcattgctgtggtggccgtgatgtgcaagccccaccgctgcccccacatctccttcaccggcaacatctgtgtgtactgccctgggggccctgacagcgactttgagtacagcacccagagctacacaggctatgagcccacctccatgagggccatccgggcccgctatgaccccttcctgcagaccaggcaccgcatcgagcagctgaagcagctgggccacagcgtggacaaggtggagttcatcgtgatgggcggcaccttcatggccctgcctgaggagtacagagactacttcatccggaacctgcatgatgccctgagcggccacaccagcaacaacatctatgaggccgtgtag

SEQ ID NO: 103481 - DNA, 342 bp, Artificial Sequence
  derived and/or modified sequence
atgatgctgaccatcggcgacgtgatcaagcagctgatcgaggcccacgagcagggcaaagacatcgacctgaataaggtgaagacaaagactgcggccaaatatggtttatcagcccagcctcggctagtggacataatagccgctgttccacctcaatatcgaaaggtcctgatgcctaagttgaaggctaagccgatcagaacggcttcagggatcgccgtagtagcggtgatgtgtaagccgcatcgctgtcctcacatctctttcaccggcaatatttgcgtgtactgcccgggcggcccagatagtgattttgaatactctacccagtcctattag

SEQ ID NO: 103482 - DNA, 1602 bp, Artificial Sequence
  derived and/or modified sequence
atgatgctgaccatcggcgacgtgatcaagcagctgatcgaggcccacgagcagggaaaagatattgacctcaataaggtcaagacaaagactgctgcaaagtacggactttccgcacagccaagactggtagacatcatcgccgcagttcctcctcagtacagaaaggtgctcatgcccaaactcaaggcaaaacctatccgcacagcatcggggattgcagttgtggccgtgatgtgcaagcctcatcgctgccctcatatctctttcacaggcaacatttgcgtgtactgcccaggagggccagattccgacttcgaatactcaacccagtcttacacagggtacgaacctaccagcatgagagcgattagagcacgctacgaccccttcctgcaaacccggcatcggattgaacagctgaagcagctgggccactcagtggacaaggtcgagtttattgtgatgggtggaacgtttatggccttaccggaagaatacagagattacttcattaggaatctgcatgacgcactgtcgggccatacctcaaacaacatttacgaggctgtaaaatactctgagcgatcacttacaaaatgtatcggaataacgattgagacaagacctgactactgtatgaaaaggcacctgtccgatatgcttacctatgggtgcactcggctggagatcggtgtgcagtctgtttatgaagacgtcgctcgcgatactaaccgcggccacactgtgaaggccgtgtgcgagagcttccatctagcaaaggactccggcttcaaagtggtagcccacatgatgcctgatctgcccaacgtgggcttggaacgtgacatcgaacagttcacggaattcttcgagaacccagcctttcgccctgatggtctgaagttatatcccactttagtgatccggggaactggactgtatgagctgtggaagtcaggaagatataaatcctactccccctctgatctagtggagttagttgcgaggattcttgctttagtgcccccgtggacaagggtctacagagtgcaacgcgatatacctatgcctcttgtcagttctggcgttgagcacggcaaccttcgggaactcgcactggctcgaatgaaggatctggggatacagtgccgggacgtgcgaaccagagaggtgggtatccaggagatccaccacaaggtgaggccttatcaggtggaattggtcagacgcgattatgtagccaatggtgggtgggaaactttccttagctacgaggacccagaccaggacattctcattggcctcctacgactacgaaaatgctctgaagagactttcagatttgagctgggtggcggggtgtcaatagttcgtgagctacacgtctacggcagcgtggttcctgtctcctccagggaccccactaaattccagcaccagggttttggcatgctgcttatggaggaagcagaacggatcgccagggaggagcatggaagcggcaagatcgcagtcatttcaggagtaggcacccgcaactactaccgtaaaatcggctatagactgcaggggccttacatggtgaagatgctgaaatag

SEQ ID NO: 103483 - DNA, 576 bp, Artificial Sequence
  derived and/or modified sequence
atgatgctgaccatcggcgacgtgatcaagcagctgatcgaggcccacgagcagggcaaagacattgacctcaataaggtgaaaactaaaaccgctgccaagtatggtctgtccgcccagccgcgccttgtcgatatcattgctgctgtgccgccccaatatcggaaggtgctgatgcctaaattgaaggcaaagccaatcagaaccgcatcggggatcgcagttgtagccgtgatgtgtaaaccgcacaggtgtccccatattagctttacgggtaatatttgtgtttattgtccgggcggacccgacagcgactttgaatattcaacacagtcgtacactgggtatgaacctacttctatgcgggccattagagccaggtatgaccccttcctccagacccgacatcgtattgagcagctaaagcaactcggccactcagtggataaagtggagtttatagtcatgggcggaactttcatggccctgcctgaggaatatcgcgattactttattcgtaacttacacgatgccctgtctggacacacaagtaataacatctatgaggccgtgtag

SEQ ID NO: 103484 - DNA, 342 bp, Artificial Sequence
  derived and/or modified sequence
atgatgctgaccattggggacgtgatcaaacaattaatagaagcccacgaacaaggaaaagatatcgatctgaacaaagtgaagacaaaaacggcagccaagtatgggctgtcggcccagccaagacttgttgacattatcgccgctgtcccaccccagtaccgtaaagttctgatgccaaagctgaaggccaagcccataaggaccgcttccggaatcgcagtggttgccgtaatgtgcaagccccaccgctgtcctcacatttcttttaccggaaatatttgtgtctactgtccagggggacccgattctgactttgagtacagcacgcagtcatattag

SEQ ID NO: 103485 - DNA, 1602 bp, Artificial Sequence
  derived and/or modified sequence
atgatgttaacaatcggcgacgtgatcaaacagcttattgaagcacatgaacaggggaaggacattgatctgaacaaagtgaagacgaagacggccgctaaatacggcctctctgctcagcccagacttgtggatattatcgcggcagttccaccccagtacaggaaggttttgatgcctaagttgaaggccaaacctatcagaaccgccagcggaattgccgtggtggcagtgatgtgcaaaccacataggtgtcctcatattagttttacaggcaatatttgcgtgtactgtccgggtggccctgatagcgatttcgagtattctacacagtcttatactggatatgagcctacatctatgcgggctataagagcacgttacgacccatttctgcagacacgtcacaggatcgaacagctcaagcaacttggacactccgtcgacaaagtggagttcatcgtgatggggggaacgtttatggctctgcctgaggagtatcgagactattttattagaaatttacacgatgccttaagcggtcacacgtctaacaatatctacgaagctgtaaagtatagtgaacgcagcctgaccaagtgtattgggatcaccattgagacaaggccagactattgcatgaaaaggcatctgagtgatatgcttacttacgggtgtacccgtctggaaatcggagtccagtccgtgtatgaagatgtggcccgagacaccaaccgcggacataccgtgaaggccgtctgtgagagtttccacttagcaaaggattcaggatttaaggtagtggcccacatgatgcctgacttgcctaatgtggggcttgagcgggatatcgagcagtttacggaattctttgagaaccccgcatttcgaccagatgggctgaaactctaccctacactggtgatccggggtacaggcctatacgaactgtggaagagcggcaggtataagtcatacagtcctagcgaccttgtcgagctggtcgcccgaatactggctttagtacctccttggactagagtgtaccgcgtgcagagggacataccgatgcccctggtaagctcaggcgttgaacacggcaatttgcgcgagctggcactggcgaggatgaaggacttaggcatacaatgtcgcgacgtgcggacacgcgaggtgggcatacaagagattcatcacaaagtcagaccgtaccaagtcgagcttgtgcgcagggattatgtggccaatgggggttgggagacgtttctgtcatatgaggacccagaccaggatatcctgataggtctattacggttaagaaaatgctctgaagagacatttaggttcgaattaggcggaggggtgagcattgtccgggagctgcacgtgtatggcagcgtcgtccctgtcagttcaagagaccccacaaaattccagcatcagggcttcggaatgttactcatggaggaggcagaacgaattgcacgtgaggaacacggcagcgggaaaatagccgtgatctccggagttggaacgaggaattactaccgcaagattggttaccgcctccaggggccttacatggtaaagatgctgaaatag

SEQ ID NO: 103486 - DNA, 576 bp, Artificial Sequence
  derived and/or modified sequence
atgatgctgaccatcggcgacgtcatcaagcagctgattgaggctcatgaacaaggcaaagatatcgatttgaataaggtaaaaacaaaaactgcagccaagtacgggctttccgcccagccacggttggtggatatcattgcagctgtgcccccacagtataggaaggtgctgatgccaaaacttaaggctaagccgattcgcactgctagcgggattgccgtcgtggcggttatgtgcaagccgcacaggtgcccacatatttcttttacaggaaacatttgcgtgtattgtcctgggggaccggactctgacttcgagtattcaacacagtcctacacaggatatgagcccacgtcgatgagagccattagggccaggtacgaccctttccttcagaccagacacaggatagaacagcttaagcagcttggtcattcagtcgacaaagtggagtttatcgtcatgggaggaacattcatggcccttcctgaggaatacagggactattttatccgaaatctgcacgacgcactttccggccacactagcaataacatttatgaggccgtatag

SEQ ID NO: 103487 - DNA, 342 bp, Artificial Sequence
  derived and/or modified sequence
atgatgctgaccatcggcgacgtgatcaagcagctgatcgaggcccacgagcagggcaaggacatcgacctgaacaaggtgaagaccaagaccgccgccaagtacggcctgagcgcccagcccagactggtggacatcatcgccgccgtgcccccccagtacagaaaggtgctgatgcccaagctgaaggccaagcccatcagaaccgccagcggcatcgccgtggtggccgtgatgtgcaagccccacagatgcccccacatcagcttcaccggcaacatctgcgtgtactgccccggcggccccgacagcgacttcgagtacagcacccagagctactag

SEQ ID NO: 103488 - DNA, 1602 bp, Artificial Sequence
  derived and/or modified sequence
atgatgctgaccatcggcgacgtgatcaagcagctgatcgaggcccacgagcagggcaaggacatcgacctgaacaaggtgaagaccaagaccgccgccaagtacggcctgagcgcccagcccagactggtggacatcatcgccgccgtgcccccccagtacagaaaggtgctgatgcccaagctgaaggccaagcccatcagaaccgccagcggcatcgccgtggtggccgtgatgtgcaagccccacagatgcccccacatcagcttcaccggcaacatctgcgtgtactgccccggcggccccgacagcgacttcgagtacagcacccagagctacaccggctacgagcccaccagcatgagagccatcagagccagatacgaccccttcctgcagaccagacacagaatcgagcagctgaagcagctgggccacagcgtggacaaggtggagttcatcgtgatgggcggcaccttcatggccctgcccgaggagtacagagactacttcatcagaaacctgcacgacgccctgagcggccacaccagcaacaacatctacgaggccgtgaagtacagcgagagaagcctgaccaagtgcatcggcatcaccatcgagaccagacccgactactgcatgaagagacacctgagcgacatgctgacctacggctgcaccagactggagatcggcgtgcagagcgtgtacgaggacgtggccagagacaccaacagaggccacaccgtgaaggccgtgtgcgagagcttccacctggccaaggacagcggcttcaaggtggtggcccacatgatgcccgacctgcccaacgtgggcctggagagagacatcgagcagttcaccgagttcttcgagaaccccgccttcagacccgacggcctgaagctgtaccccaccctggtgatcagaggcaccggcctgtacgagctgtggaagagcggcagatacaagagctacagccccagcgacctggtggagctggtggccagaatcctggccctggtgcccccctggaccagagtgtacagagtgcagagagacatccccatgcccctggtgagcagcggcgtggagcacggcaacctgagagagctggccctggccagaatgaaggacctgggcatccagtgcagagacgtgagaaccagagaggtgggcatccaggagatccaccacaaggtgagaccctaccaggtggagctggtgagaagagactacgtggccaacggcggctgggagaccttcctgagctacgaggaccccgaccaggacatcctgatcggcctgctgagactgagaaagtgcagcgaggagaccttcagattcgagctgggcggcggcgtgagcatcgtgagagagctgcacgtgtacggcagcgtggtgcccgtgagcagcagagaccccaccaagttccagcaccagggcttcggcatgctgctgatggaggaggccgagagaatcgccagagaggagcacggcagcggcaagatcgccgtgatcagcggcgtgggcaccagaaactactacagaaagatcggctacagactgcagggcccctacatggtgaagatgctgaagtag

SEQ ID NO: 103489 - DNA, 576 bp, Artificial Sequence
  derived and/or modified sequence
atgatgctgaccatcggcgacgtgatcaagcagctgatcgaggcccacgagcagggcaaggacatcgacctgaacaaggtgaagaccaagaccgccgccaagtacggcctgagcgcccagcccagactggtggacatcatcgccgccgtgcccccccagtacagaaaggtgctgatgcccaagctgaaggccaagcccatcagaaccgccagcggcatcgccgtggtggccgtgatgtgcaagccccacagatgcccccacatcagcttcaccggcaacatctgcgtgtactgccccggcggccccgacagcgacttcgagtacagcacccagagctacaccggctacgagcccaccagcatgagagccatcagagccagatacgaccccttcctgcagaccagacacagaatcgagcagctgaagcagctgggccacagcgtggacaaggtggagttcatcgtgatgggcggcaccttcatggccctgcccgaggagtacagagactacttcatcagaaacctgcacgacgccctgagcggccacaccagcaacaacatctacgaggccgtgtag

SEQ ID NO: 103490 - DNA, 2019 bp, Artificial Sequence
  derived and/or modified sequence
ctctggtggctctgctacggcggcgcagaaatgaggcagaagcggaaaggagatctcagccctgctgagctgatgatgctgactataggagatgttattaaacaactgattgaagcccacgagcaggggaaagacatcgatctaaataaattgctgtcgtggctgtgatgtgcaaaccccacagatgtccacacatcagttttacaggaaatatatgtgtatactgccctggtggacctgattctgattttgagtattccacccagtcttacactggctatgagccaacctccatgagagctatccgtgccagatatgaccctttcctacagacaagacaccgaatagaacagttaaaacaacttggtcatagtgtggataaagtggagtttattgtgatgggtggaacgtttatggcccttccagaagaatacagagattattttattcgaaatttacatgatgccttatcaggacatacttccaacaatatttacgaggcagtcaagtattctgagagaagcctcacaaagtgtattggaattactattgaaaccagaccagattactgcatgaagcgacatttaagtgacatgttgacctatggctgcacaaggctggagattggggtgcagagtgtttatgaagatgtggctagagacaccaacaggggccacactgtgaaggcagtgtgtgagtcatttcacctggccaaagattccggttttaaagtggtggcccatatgatgcctgacctgccaaacgtgggactagaaagagacattgaacagttcacagagttttttgagaaccctgcttttcgtcccgatgggctgaaactctatcctaccctggtgattcgtgggaccgggctttatgagctttggaaatcaggaagatataagagttactctcctagtgacctggttgaattggtggctcggatcctagccctcgtgcctccatggactcgagtgtaccgagtacagagggatattccaatgcctttagttagctcaggagtagagcatggtaacctgagagagctggcacttgcaagaatgaaagacctcggaatacagtgtcgagatgtgagaaccagagaagttggaatccaagaaattcatcacaaagtacggccataccaggttgaattggtaaggagagattatgttgcaaatggtggctgggaaacattcttgtcatacgaagacccagatcaagacattttgattggcctcctacgattacgcaagtgttcagaagaaactttccgtttcgaattgggtggaggtgtctccatagtacgagagctgcatgtgtatgggagtgtggtccctgtgagcagccgggatcctactaaatttcagcatcagggatttggcatgctgctgatggaggaagcagaaagaatagctagagaagaacatgggtctgggaaaatcgctgtgatatcaggggtcggcaccaggaattattatagaaagatcggctacagattacaaggcccgtacatggtgaagatgctgaaataatggccacaccagtccactcttctgcagtatcctccctggcagaacacggagaatcaggatttcttaaatactcaacagagaggctgagcagagcaaatggggggcttcaccctcatcccgcagctgcagagactggaaactgccttcaaggccacggctggtcatctgctgaccacaccccagatccgccctctcctgcgtgcaccccaaaaaatcacttgcgtttttgaggcttaaatcatctatccagtttctacattttgcatgaggcctgcaggtggcctattttgactcagacggtgaaaaaagcaaattaactcatttggacaccataactcatgcaataaaactgattgtcattcgaggagcaaacttaagagtagtttatttatataccctggggacagaaagtcaggttgaaacaggaaaaccaccagactctaatctcagccctttaacgacatacgcattggagcgcaagtta

SEQ ID NO: 103491 - DNA, 1368 bp, Artificial Sequence
  derived and/or modified sequence
atgtgcaagccccacaggtgcccccacatatccttcactgggaatatttgtgtgtattgtcctggcggacccgattctgatttcgagtacagtacgcaaagctacactggatacgagccaacaagcatgcgcgcaattcgcgccagatacgacccctttctgcaaaccagacatcgcatagaacagctgaagcagttgggccactctgtcgataaggtggagtttattgtgatgggaggtacatttatggccctgccagaggagtacagggattacttcatcaggaacttgcacgatgctctgagcggacatacatcaaacaacatatacgaggctgtgaaatacagcgagcggagcctgactaaatgtatcggcattactatcgaaactcgcccagattactgcatgaagaggcatctgtccgatatgctcacctacgggtgcacaagactcgaaataggcgttcagagtgtctacgaggacgttgcccgggacacaaaccgagggcacacagtcaaagccgtctgtgaaagtttccatctggcaaaagattctggttttaaggttgtggcccatatgatgccagatctaccaaacgtggggctggaaagagatattgagcaattcaccgagtttttcgagaacccagcttttcggccggatgggctgaagctgtatccaacactagttatcagaggtaccgggttgtacgagctctggaagtcgggtcggtataaaagctattcccccagcgatctggtggagttagtagcgagaattctggcactggtgccaccctggaccagagtttacagagtacaacgcgatatcccgatgcccctggtctctagcggcgtggagcacggaaacctgcgtgaactggcactggcccgaatgaaggatctgggaattcagtgccgcgatgtcaggacgcgagaagttggcattcaggagattcaccataaggtgagaccttatcaggtagaactcgtgcgacgggactatgtggcaaatggcggatgggaaacgttccttagctatgaagaccccgaccaggacatcctcattggacttctccggctgcgaaaatgtagcgaagaaacttttcgtttcgaactggggggcggagttagtattgtgcgggagctgcacgtctacggttccgtcgtaccagtctcttcaagagacccgacaaaatttcagcaccagggctttgggatgctgctgatggaagaggccgagcggatcgcccgtgaggaacacggttcaggaaagatcgctgtgatctccggggtgggcacacggaactactatcgcaaaattggctatcggctgcagggcccatatatggtgaaaatgctaaagtag

SEQ ID NO: 103492 - DNA, 1368 bp, Artificial Sequence
  derived and/or modified sequence
atgtgcaagccccaccgctgcccccacatctccttcaccggcaacatctgtgtgtactgccctgggggccctgacagcgactttgagtacagcacccagagctacacaggctatgagcccacctccatgagggccatccgggcccgctatgaccccttcctgcagaccaggcaccgcatcgagcagctgaagcagctgggccacagcgtggacaaggtggagttcatcgtgatgggcggcaccttcatggccctgcctgaggagtacagagactacttcatccggaacctgcatgatgccctgagcggccacaccagcaacaacatctatgaggccgtgaagtacagcgagaggagcctgaccaagtgcatcggcatcaccatcgagaccaggccagactactgcatgaagaggcacctgagtgacatgctgacctacggctgcacccggctggagattggagtgcagagcgtgtatgaagatgtggcccgggacaccaacagaggccacacagtgaaggctgtgtgtgagagcttccacctggccaaggacagcggcttcaaggtggtggcccacatgatgccagacctgcccaacgtgggcctggagcgggacatcgagcagttcacagagttctttgagaacccagccttccggccagatggcctgaagctgtaccccaccctggtgatccggggcaccggcctgtatgagctgtggaagagcggccgctacaagagctacagccccagcgacctggtggagctggtggcccgcatcctggccctggtgcccccctggaccagggtgtacagagtgcagagggacatccccatgcccctggtgagcagcggcgtggagcacggcaacctgcgggagctggccctggccaggatgaaggacctgggcatccagtgcagagatgtgaggacccgggaggtgggcatccaggagatccaccacaaggtgcggccctaccaggtggagctggtgcggcgggactatgtggccaacggcggctgggagaccttcctgtcctatgaggaccctgaccaggacatcctgattggcctgctgcggctgaggaaatgttctgaggagaccttccgctttgagctgggcggcggcgtgtccatcgtgcgggagctgcacgtgtatggctctgtggtgcctgtgagcagccgggaccccaccaagttccagcaccagggcttcggcatgctgctgatggaggaggccgagcgcatcgcccgggaggagcacggcagcggcaagattgctgtgatcagcggcgtgggcaccaggaactactacaggaagattggctaccgcctgcagggcccctacatggtgaagatgctgaagtag

SEQ ID NO: 103493 - DNA, 1368 bp, Artificial Sequence
  derived and/or modified sequence
atgtgcaagccccaccggtgcccccacatcagcttcaccggcaacatttgcgtctactgcccaggaggcccagatagcgactttgagtatagcacacagtcttacaccggctatgagccgaccagtatgagggctatcagagcacggtacgacccttttctgcagacacgccacaggattgagcagttaaagcagctgggccactctgtagacaaagttgagtttattgttatggggggaacctttatggctctccccgaagagtatcgggattacttcataagaaatctgcacgatgccctgtctggccacaccagcaacaacatctacgaggcagttaaatattcagaaaggtctctgactaaatgtattggcatcacaatcgaaacccggcccgactactgcatgaagcggcatctttcagacatgcttacatatggctgtactagattagaaattggcgtacaatcagtgtatgaggacgtcgcacgggatacgaatcgcggacacacagtgaaggccgtatgtgaaagttttcatctcgctaaagactctggatttaaggtcgtcgcccacatgatgccagacctgccaaacgtgggtctggaacgtgacatcgaacagtttaccgagttctttgagaaccccgcttttcgccccgatggactcaagctctaccctaccctcgttatcagaggcaccggactttatgaactctggaaaagtggtcgttacaaaagctatagtccatctgatttggtggaactggtggcaaggattttggctctggtgcctccatggacgagggtgtacagggtccagagagacatccccatgccacttgtcagctccggagtggaacacggtaaccttagagagctggcactagctcggatgaaggacttaggcattcaatgccgagatgtgcgcaccagggaggtggggatacaggagatccatcacaaagttcgcccatatcaggttgagctggtgaggagagattacgtagccaatggcggttgggagacctttttgtcgtatgaggaccccgatcaggacatcctgatagggcttctgaggctgcgtaagtgcagtgaggagaccttccgtttcgagctgggcgggggggtgtccatcgtgcgagaattacatgtgtacggttccgtcgttcctgtgtcatcgcgggatcctacaaaatttcaacatcaaggcttcgggatgttgttaatggaggaggccgagcgcatcgcgagagaagagcacggttccggaaaaatcgctgtgatcagcggcgttgggacccgtaattactatagaaagattggctatcgccttcagggtccttatatggtcaagatgctgaagtag

SEQ ID NO: 103494 - DNA, 1368 bp, Artificial Sequence
  derived and/or modified sequence
atgtgtaaacctcacaggtgtccacacatcagctttaccggaaatatttgcgtctattgtcctgggggtcccgactcggatttcgagtactctacccagtcttatactgggtatgaacccacttcaatgagggcaattcgggcaaggtatgatccattcctccagacacggcaccgcatcgagcaacttaagcagctcggccactctgtggacaaagtcgagtttatagtcatgggcggaacattcatggcactgcccgaggaatatcgcgattacttcattcgtaatctccatgacgccctctcgggccacacatccaataatatctatgaagcagttaagtactcggagaggtcattaactaagtgcatcggtatcaccattgaaacccgccctgattactgcatgaagcggcatctttccgatatgctgacctacggatgcaccagattggagatcggtgtccagtcggtgtatgaagatgtcgcccgagatacaaatagaggacataccgtcaaggcagtgtgtgagtctttccatctggcaaaagactcgggttttaaggtggtcgcacatatgatgcctgacctccctaacgtgggtctcgagagagatattgaacagttcactgaattcttcgaaaaccccgcatttcggccagacgggttaaagctgtaccccacgctggtgatccgcggaaccgggctttacgagctctggaagtctggccgatacaagagctactctccatcagacctggtcgagctggtggccaggatcctggccctcgtgcccccttggactagggtgtatagagtgcagcgcgacattccaatgcctcttgtctcctcaggcgtggagcacggaaatttgagggaactcgctcttgcaagaatgaaagacttgggcatacagtgcagggatgtgcggacaagggaggttggaattcaggaaatacaccataaagtcaggccctatcaagtggagctggtacgaagagactatgttgccaatggcggttgggaaacatttctgagctacgaagatcctgaccaggacattttgataggcttacttcgactgcgcaagtgttccgaggagacatttcgattcgagctcgggggaggagtatcaatcgtgagggaattgcacgtttacgggtccgttgtgccagtctctagtcgcgaccctactaagttccaacaccagggtttcggtatgttgctcatggaagaagctgagcggattgcgagagaagagcacgggtcgggaaagatcgctgtcatcagtggcgtggggactcgcaactactacagaaaaatcggctaccggctgcagggtccatacatggtgaaaatgcttaagtag

SEQ ID NO: 103495 - DNA, 1368 bp, Artificial Sequence
  derived and/or modified sequence
atgtgcaagccccacagatgcccccacatcagcttcaccggcaacatctgcgtgtactgccccggcggccccgacagcgacttcgagtacagcacccagagctacaccggctacgagcccaccagcatgagagccatcagagccagatacgaccccttcctgcagaccagacacagaatcgagcagctgaagcagctgggccacagcgtggacaaggtggagttcatcgtgatgggcggcaccttcatggccctgcccgaggagtacagagactacttcatcagaaacctgcacgacgccctgagcggccacaccagcaacaacatctacgaggccgtgaagtacagcgagagaagcctgaccaagtgcatcggcatcaccatcgagaccagacccgactactgcatgaagagacacctgagcgacatgctgacctacggctgcaccagactggagatcggcgtgcagagcgtgtacgaggacgtggccagagacaccaacagaggccacaccgtgaaggccgtgtgcgagagcttccacctggccaaggacagcggcttcaaggtggtggcccacatgatgcccgacctgcccaacgtgggcctggagagagacatcgagcagttcaccgagttcttcgagaaccccgccttcagacccgacggcctgaagctgtaccccaccctggtgatcagaggcaccggcctgtacgagctgtggaagagcggcagatacaagagctacagccccagcgacctggtggagctggtggccagaatcctggccctggtgcccccctggaccagagtgtacagagtgcagagagacatccccatgcccctggtgagcagcggcgtggagcacggcaacctgagagagctggccctggccagaatgaaggacctgggcatccagtgcagagacgtgagaaccagagaggtgggcatccaggagatccaccacaaggtgagaccctaccaggtggagctggtgagaagagactacgtggccaacggcggctgggagaccttcctgagctacgaggaccccgaccaggacatcctgatcggcctgctgagactgagaaagtgcagcgaggagaccttcagattcgagctgggcggcggcgtgagcatcgtgagagagctgcacgtgtacggcagcgtggtgcccgtgagcagcagagaccccaccaagttccagcaccagggcttcggcatgctgctgatggaggaggccgagagaatcgccagagaggagcacggcagcggcaagatcgccgtgatcagcggcgtgggcaccagaaactactacagaaagatcggctacagactgcagggcccctacatggtgaagatgctgaagtag

SEQ ID NO: 103496 - protein, 1104 aa, Artificial Sequence
  derived and/or modified sequence
MEPSRALLGCLASAAAAAPPGEDGAGAGAEEEEEEEEEAAAAVGPGELGCDAPLPYWTAVFEYEAAGEDELTLRLGDVVEVLSKDSQVSGDEGWWTGQLNQRVGIFPSNYVTPRSAFSSRCQPGGEDPSCYPPIQLLEIDFAELTLEEIIGIGGFGKVYRAFWIGDEVAVKAARHDPDEDISQTIENVRQEAKLFAMLKHPNIIALRGVCLKEPNLCLVMEFARGGPLNRVLSGKRIPPDILVNWAVQIARGMNYLHDEAIVPIIHRDLKSSNILILQKVENGDLSNKILKITDFGLAREWHRTTKMSAAGTYAWMAPEVIRASMFSKGSDVWSYGVLLWELLTGEVPFRGIDGLAVAYGVAMNKLALPIPSTCPEPFAKLMEDCWNPDPHSRPSFTNILDQLTTIEESGFFEMPKDSFHCLQDNWKHEIQEMFDQLRAKEKELRTWEEELTRAALQQKNQEELLRRREQELAEREIDILERELNIIIHQLCQEKPRVKKRKGKFRKSRLKLKDGNRISLPSDFQHKFTVQASPTMDKRKSLINSRSSPPASPTIIPRLRAIQLTPGESSKTWGRSSVVPKEEGEEEEKRAPKKKGRTWGPGTLGQKELASGDEGSPQRREKANGLSTPSESPHFHLGLKSLVDGYKQWSSSAPNLVKGPRSSPALPGFTSLMEMEDEDSEGPGSGESRLQHSPSQSYLCIPFPRGEDGDGPSSDGIHEEPTPVNSATSTPQLTPTNSLKRGGAHHRRCEVALLGCGAVLAATGLGFDLLEAGKCQLLPLEEPEPPAREEKKRREGLFQRSSRPRRSTSPPSRKLFKKEEPMLLLGDPSASLTLLSLSSISECNSTRSLLRSDSDEIVVYEMPVSPVEAPPLSPCTHNPLVNVRVERFKRDPNQSLTPTHVTLTTPSQPSSHRRTPSDGALKPETLLASRSPSSNGLSPSPGAGMLKTPSPSRDPGEFPRLPDPNVVFPPTPRRWNTQQDSTLERPKTLEFLPRPRPSANRQRLDPWWFVSPSHARSTSPANSSSTETPSNLDSCFASSSSTVEERPGLPALLPFQAGPLPPTERTLLDLDAEGQSQDSTVPLCRAELNTHRPAPYEIQQEFWS

SEQ ID NO: 103497 - DNA, 3315 bp, Artificial Sequence
  derived and/or modified sequence
atggagccgtccagagcacttctgggatgcctggcctctgcagccgccgctgctccaccaggggaagacggtgcgggggctggcgccgaggaagaagaagaggaagaagaagaagcggcggctgctgtaggacccggggagctgggatgcgatgccccacttccatactggacagctgtattcgagtatgaggctgccggggaagatgaattgaccttgaggttgggggatgtcgttgaagtgctgagcaaggacagccaagtgtcgggcgacgaggggtggtggacaggtcaactgaatcagagagtggggattttccccagtaactatgttaccccccgctcagctttcagcagcagatgccagccaggcggggaagatccaagctgttatccaccgattcaactcttggagatcgactttgctgaactcacactcgaggaaatcatcgggataggcgggtttggcaaagtgtatagggcgttttggatcggagacgaagtcgccgtcaaagctgcacgccacgaccctgatgaagacatctcccagacgattgagaatgtccggcaagaggcgaagttgtttgctatgctaaaacaccccaacattattgccctccggggagtctgtcttaaagaacccaacctgtgtctcgttatggagtttgctcggggtggccctctcaaccgagttctatctggaaagcgaatccccccagacatcctggtaaattgggcagtacaaatagccaggggcatgaattatcttcatgacgaggctatcgtacccatcatccatcgggaccttaagtctagtaatattctgatcctgcagaaagtcgaaaacggagacctgtcaaataagattctgaaaatcacagatttcggactggccagggaatggcatcgtaccacaaaaatgagcgccgccggaacatatgcctggatggcccctgaagtaatcagagcaagcatgttttctaagggctccgacgtctggtcttacggcgtgctcctatgggagcttctgaccggggaggttcccttcaggggcatagatggcttggcggtggcctatggcgtcgccatgaataagcttgcgctgcccatcccgagcacctgccccgagcctttcgccaagttgatggaagactgctggaaccccgatcctcactctagaccatcatttaccaacatcctggaccaacttacaacaatcgaggaatccggcttctttgaaatgcctaaggattctttccattgccttcaggacaactggaaacacgaaattcaagagatgttcgatcagctgcgcgcaaaggagaaggagctaaggacttgggaagaggaactgactcgcgccgccctacagcagaagaatcaggaagaattgctgagaaggcgggagcaggaactggctgaaagagaaatagacattctcgaaagggagctgaatatcattatccatcaattgtgccaggagaaaccgcgggtaaaaaagcgcaagggcaagtttagaaaatctagactgaagttgaaggacggcaacagaatcagtctgccgtctgactttcaacataaattcactgtccaggcctcaccgaccatggacaagcggaagtctctcatcaattcacgcagctccccacccgctagcccaacgatcattcctcgtttgagagcgatccaactgaccccaggcgagagtagcaagacatggggtagaagttcggtagtccccaaagaggaaggagaggaggaggagaagagggcccctaagaaaaaggggcgcacttgggggccaggaacgctgggtcagaaggagctggcctcaggagacgagggcagcccgcagagacgagagaaagccaacggactgtccacgccaagtgaatccccacactttcatttggggctcaaatccctggttgatggatacaaacaatggtctagtagcgcaccaaacctggtgaaagggccaaggtcaagcccagccctccccggttttacatcactgatggaaatggaggatgaggacagtgagggcccaggttcaggcgaatccaggctccagcattcacccagccagtcctatttatgtattcccttcccccggggggaagacggcgatggacccagctcagacgggatccatgaagaaccgacgccagtgaactctgccacttcaactccgcagctgacccccacgaactccctcaaacgcggcggggcgcaccaccgccggtgcgaggtggcactgcttggctgtggcgccgtgcttgcggcaactggtttgggcttcgacctgctagaggcagggaagtgccagcttctccctttggaggaacccgagcctccagctcgcgaggaaaagaaacggagagagggcctatttcagcgtagtagccgaccccgcagaagcacaagccccccaagtcgtaagctttttaagaaggaagagcccatgctcctgctaggcgatcccagtgcatctttaactctgctctctctgtctagcatctcggagtgcaactcaacacggtcccttctccgttccgactctgatgaaatcgtggtctatgagatgcctgtgagtccagttgaagctccacctctttctccatgcacacacaatccactggtgaatgtgcgcgtggaacgcttcaagcgagatccgaaccagagtttaactccgactcacgtgacgctgaccaccccgagccagccaagctctcaccggcgaactccaagtgacggtgctcttaagccagagacactcctggcttctcgttctcccagtagtaacgggctgagtcctagtcctggcgcaggcatgctgaaaacaccgtcccctagccgagatccaggagaattcccccgactacccgaccctaacgttgtgttccctcccaccccccgccgctggaatactcagcaagattccaccctggagaggccaaagacattggaattcctgcccagaccgcggcctagtgcaaacagacagcgattggacccttggtggttcgtgagcccgtctcatgcaaggtccacgagcccagctaattctagtagcacagaaacccccagcaacttggactcctgttttgcgtcctcttcctccacagtcgaggaaaggcctggcttaccggccctccttccctttcaagctggcccccttccccctaccgagcgtacccttttggacctcgatgctgaaggtcagtctcaagactcaacagttccactgtgcagggctgagcttaatacccatcggccagctccctacgaaattcagcaagaattctggtcctag

SEQ ID NO: 103498 - DNA, 3315 bp, Artificial Sequence
  derived and/or modified sequence
atggagcccagccgggccctgctgggctgcctggccagcgctgctgctgctgcccctcctggagaagatggagctggagctggagctgaggaggaggaggaggaggaggaggaggccgctgctgctgtgggccctggagagctgggctgtgatgcccccctgccctactggacagctgtgtttgaatatgaagctgctggggaggatgagctgaccctgcggctgggagatgtggtggaggtgctgagcaaggacagccaggtgtctggagatgagggctggtggacaggccagctgaaccagagggtgggcatcttccccagcaactacgtgacccccaggtctgccttcagcagccgctgccagcctggaggagaggaccccagctgctacccacccatccagctgctggagattgactttgctgagctgaccctggaggagatcatcggcatcggcggctttgggaaggtgtaccgggccttctggattggagatgaggtggccgtgaaggccgcccggcatgaccctgatgaggacatcagccagaccattgaaaatgtgcggcaggaggccaagctgtttgccatgctgaagcaccccaacatcatcgccctgcggggcgtgtgcctgaaggagcccaacctgtgcctggtgatggagtttgcccggggcggccccctgaacagagtgctgagcggcaagaggatccccccagacatcctggtgaactgggccgtgcagatcgcccggggcatgaactacctgcatgatgaggccatcgtgcccatcatccaccgggacctgaagagcagcaacatcctgatcctgcagaaggtggagaatggagacctgagcaacaagatcctgaagatcacagactttggcctggcccgggagtggcacaggaccaccaagatgtctgctgctggcacctacgcctggatggcccctgaggtgatccgggcctccatgttcagcaagggcagtgatgtgtggagctatggagtgctgctgtgggagctgctgaccggggaggtgcccttccggggcattgatggcctggccgtggcctatggagtggccatgaacaagctggccctgcccatccccagcacctgcccagagccctttgccaagctgatggaggactgctggaacccagacccccacagccggcccagcttcaccaacatcctggaccagctgaccaccatcgaggagagcggcttctttgagatgcccaaggacagcttccactgcctgcaggacaactggaagcatgagatccaggagatgtttgaccagctgcgggccaaggagaaggagctgcggacctgggaggaggagctgacccgggccgccctgcagcagaagaaccaggaggagctgctgcggcggcgggagcaggagctggccgagcgggagattgacatcctggagcgggagctgaacatcatcatccaccagctgtgccaggagaagccccgggtgaagaagaggaagggcaagttcaggaagagccggctgaagctgaaggatggcaaccgcatcagcctgcccagcgacttccagcacaagttcaccgtgcaggccagccccaccatggacaagaggaagagcctcatcaacagccgcagcagccccccagccagccccaccatcatcccccggctgcgggccatccagctgaccccaggagagagcagcaagacctggggccgcagctctgtggtgcccaaggaggagggggaggaggaggagaagagggcccccaagaagaagggccgcacctggggccctggcaccctgggccagaaggagctggccagcggagatgagggcagcccccagaggcgggagaaggccaacggcctgagcacccccagcgagagcccccacttccacctgggcctgaagagcctggtggatggctacaagcagtggagcagcagcgcccccaacctggtgaagggccccaggagcagccctgccctgcccggcttcaccagcctgatggagatggaggatgaggacagcgagggccctggcagcggggagagccggctgcagcacagccccagccagagctacctgtgcatccccttccccagaggagaagatggagatggccccagcagtgatggcatccacgaggagcccacccctgtgaacagcgccaccagcaccccccagctgacccccaccaacagcctgaagaggggcggggcccaccacagaagatgtgaggtggccctgctgggctgtggggctgtgctggccgccaccggcctgggctttgacctgctggaggccggcaagtgccagctgctgcccctggaggagcctgagcccccagcccgggaggagaagaagagaagagagggcctcttccagaggagcagccggcccaggaggagcaccagcccccccagcaggaagctgttcaagaaggaggagcccatgctgctgctgggggaccccagcgccagcctgaccctgctgagcctgagcagcatcagcgagtgcaacagcaccaggagcctgctgcggagtgacagtgatgaaattgtggtgtatgagatgcctgtgtcccctgtggaggccccacccctgagcccctgcacccacaaccccctggtgaatgtgcgggtggagcgcttcaagagggaccccaaccagagcctgacccccacccacgtgaccctgaccacccccagccagcccagcagccacaggaggacccccagtgatggagccctgaagccagagaccctgctggccagccgcagccccagcagcaatggcctgagccccagccctggagctggcatgctgaagacccccagccccagccgggaccctggagagttcccccggctgcctgaccccaacgtggtgtttcctcccaccccccggcgctggaacacccagcaggacagcaccctggagcggcccaagaccctggagttcctgccccggccccggcccagcgccaaccggcagaggctggacccctggtggtttgtgagccccagccacgcccggagcaccagccctgccaacagcagcagcacagagacccccagcaacctggacagctgctttgccagcagcagcagcacagtggaggagaggcctggcctgcctgccctgctgcccttccaggccggccccctgcccccaacagagaggaccctgctggacctggatgctgagggccagagccaggacagcacagtgcccctgtgcagagctgagctgaacacccacaggcctgccccctatgagatccagcaggagttctggagctag

SEQ ID NO: 103499 - DNA, 5581 bp, Artificial Sequence
  derived and/or modified sequence
atggagccctccagagcgcttctcggctgcctagcgagcgccgccgctgccgccccgccgggggaggatggagcaggggccggggccgaggaggaggaggaggaggaggaggaggcggcggcggcggtgggccccggggagctgggctgcgacgcgccgctgccctactggacggccgtgttcgagtacgaggcggcgggcgaggacgagctgaccctgcggctgggcgacgtggtggaggtgctgtccaaggactcgcaggtgtccggcgacgagggctggtggaccgggcagctgaaccagcgggtgggcatcttccccagcaactacgtgaccccgcgcagcgccttctccagccgctgccagcccggcggcgaggaccccagttgctacccgcccattcagttgttagaaattgattttgcggagctcaccttggaagagattattggcatcgggggctttgggaaggtctatcgtgctttctggataggggatgaggttgctgtgaaagcagctcgccacgaccctgatgaggacatcagccagaccatagagaatgttcgccaagaggccaagctcttcgccatgctgaagcaccccaacatcattgccctaagaggggtatgtctgaaggagcccaacctctgcttggtcatggagtttgctcgtggaggacctttgaatagagtgttatctgggaaaaggattcccccagacatcctggtgaattgggctgtgcagattgccagagggatgaactacttacatgatgaggcaattgttcccatcatccaccgcgaccttaagtccagcaacatattgatcctccagaaggtggagaatggagacctgagcaacaagattctgaagatcactgattttggcctggctcgggaatggcaccgaaccaccaagatgagtgcggcagggacgtatgcttggatggcacccgaagtcatccgggcctccatgttttccaaaggcagtgatgtgtggagctatggggtgctactttgggagttgctgactggtgaggtgccctttcgaggcattgatggcttagcagtcgcttatggagtggccatgaacaaactcgcccttcctattccttctacgtgcccagaaccttttgccaaactcatggaagactgctggaatcctgatccccactcacgaccatctttcacgaatatcctggaccagctaaccaccatagaggagtctggtttctttgaaatgcccaaggactccttccactgcctgcaggacaactggaaacacgagattcaggagatgtttgaccaactcagggccaaagaaaaggaacttcgcacctgggaggaggagctgacgcgggctgcactgcagcagaagaaccaggaggaactgctgcggcgtcgggagcaggagctggccgagcgggagattgacatcctggaacgggagctcaacatcatcatccaccagctgtgccaggagaagccccgggtgaagaaacgcaagggcaagttcaggaagagccggctgaagctcaaggatggcaaccgcatcagcctcccttctgatttccagcacaagttcacggtgcaggcctcccctaccatggataaaaggaagagtcttatcaacagccgctccagtcctcctgcaagccccaccatcattcctcgccttcgagccatccagttgacaccaggtgaaagcagcaaaacctggggcaggagctcagtcgtcccaaaggaggaaggggaggaggaggagaagagggccccaaagaagaagggacggacgtgggggccagggacgcttggtcagaaggagcttgcctcgggagatgaaggatcccctcagagacgtgagaaagctaatggtttaagtaccccatcagaatctccacatttccacttgggcctcaagtccctggtagatggatataagcagtggtcgtccagtgcccccaacctggtgaagggcccaaggagtagcccggccctgccagggttcaccagccttatggagatggaggatgaggacagtgaaggcccagggagtggagagagtcgcctacagcattcacccagccagtcctacctctgtatcccattccctcgtggagaggatggcgatggcccctccagtgatggaatccatgaggagcccaccccagtcaactcggccacgagtacccctcagctgacgccaaccaacagcctcaagcggggcggtgcccaccaccgccgctgcgaggtggctctgctcggctgtggggctgttctggcagccacaggcctagggtttgacttgctggaagctggcaagtgccagctgcttcccctggaggagcctgagccaccagcccgggaggagaagaaaagacgggagggtctttttcagaggtccagccgtcctcgtcggagcaccagccccccatcccgaaagcttttcaagaaggaggagcccatgctgttgctaggagacccctctgcctccctgacgctgctctccctctcctccatctccgagtgcaactccacacgctccctgctgcgctccgacagcgatgaaattgtcgtgtatgagatgccagtcagcccagtcgaggcccctcccctgagtccatgtacccacaaccccctggtcaatgtccgagtagagcgcttcaaacgagatcctaaccaatctctgactcccacccatgtcaccctcaccaccccctcgcagcccagcagtcaccggcggactccttctgatggggcccttaagccagagactctcctagccagcaggagcccctccagcaatgggttgagccccagtcctggagcaggaatgttgaaaacccccagtcccagccgagacccaggtgaattcccccgtctccctgaccccaatgtggtcttccccccaaccccaaggcgctggaacactcagcaggactctaccttggagagacccaagactctggagtttctgcctcggccgcgtccttctgccaaccggcaacggctggacccttggtggtttgtgtcccccagccatgcccgcagcacctccccagccaacagctccagcacagagacgcccagcaacctggactcctgctttgctagcagtagcagcactgtagaggagcggcctggacttccagccctgctcccgttccaggcagggccgctgcccccgactgagcggacgctcctggacctggatgcagaggggcagagtcaggacagcaccgtgccgctgtgcagagcggaactgaacacacacaggcctgccccttatgagatccagcaggagttctggtcttagcacgaaaaggattggggcgggcaagggggacagccagcggagatgaggggagctggcgggcacagccctttctcagggttggaccccctgagatccagccctacttcttgcactgataatgcactttgaagatggaagggatggaaacagggccacttcagagggtctcctgccctgcagggcctttctacccgtgtccactggaggggctgtggccatcagctctggctgtgtaggggaggaaggggtgcatgcatgtcccccaccctccacagtcttccttgcctttagagtgaccctgcagagtcactcagccaaatctgtctgctgctccctctcctcagccagttgggtgtgcgcagagctgtcatagggtccctttgtcagccccgagttcagcttcccaaacaccagtgttggatattctgtgattgattttggtcctcctccgctgtcccccaacacccaggaatgggaatctggcttggttcgagataggagcttttctgtgtcctaagccctttcatgctagcaggaagactgaaagcaaggtggcccagtgtggggtcatagggcttgatagacctggcactgcctatctgcacttccaggtgccccacctatttatctgagcccacaggtggaaaggggaactgcctcagtgagaacggggggacggggatgttaggaaaaatacagtaaagttgcaatgaagaggttcatgaagtatgtccttgttctttttggaaactctcggcaaagggcaaaccagcaagtattgagggtacccatctagctacttggggtcaggacctcgtcagaccaggttcggatacaatcatctgctcatcccaggaatagtttcttgggggactcactcactggtgccagttctaagtcagagacaaaattccactgtctgttccttttgctgtctgaactttatgtgttactcccttcctttggtcttcactctaatccctggagtttgtgggcttttggttatgtttggttagtagatatcaccgcaatgccctagaacagctatgaagcagaataccatatggccacctggacattgggacttgggaattcactctcaactgggccatccatgttgtgatgcccttgaagtaaaatggagccagcaggagtaccttctgtaaatgcatgtggcaaagtgctatttatagggtgcccagggagccgctgatgtacaataaccttgaggtcccccatactgaaaactgaccaaggcctgtgcacaggtagcccctcatgctgggctctggaccatgagctgagtaggaaggatagcagaggccaaccctgaccttcctggaagttgtttccttaacttgaatgttgagcttcctctaaagctttctcgtgtatgtcttctccatgccactactctgaggcctcctgtgttatgtgtgaacagttgtctttatgtgggaatgacgacttgattgggagtagagtctcaaggtcattcccctcttccctcaagactctctgaatgctgctccactgtcttttgtcttggaggtcactcagcaggttccttgcatttgctgcctggatgtgcagctggcaacagtgatgaattggtcactgctctttctctataactgggatagatgtcctgccttggggtcactaaaggggtgaccttgttccttgctttatgagcccattagcactttggttcaaggggcccaccaagtcttggacgggaaggcgctactggttttattgcccaaggttttgttattgcttctcttctgtgtccttctctttgttcagtgaagccaatatgtaagatactgtttttgtccccattcccctactcctgagctaggaggaaaaaatgtgaatcttaccagcagttccagccaaccaagtgattcttcttcattcttgatggggagaagtacatacaaagtttgttctgacagggcgcggtggctcacgcctgtaatcccagcgctttgggaggcagaggcaggtggatcacctgaggtcgggagttcgagaccagcctgaccaacatggagatatcctgtctctactaaaaatacaaaaaaattagccaggcatggtggcacgtgcctgtaatcccagctactcgcaaggctgaggcaggagaatcgcttgaacctgggaggcggaggttgcagtgagccaagattgcgccattgcactccagcctgggcaacaagagagaaactctgtctcaaaaaaaaaaaaaaaaaaaaaaaaa

SEQ ID NO: 103500 - DNA, 3315 bp, Artificial Sequence
  derived and/or modified sequence
atggagcccagccgggccctgctgggctgcctggccagcgccgccgctgcggcacctcctggagaagacggggccggcgccggcgccgaagaagaagaggaagaagaagaagaagctgccgctgccgttggccctggcgagctgggctgcgatgcacccctaccttactggactgcagtgttcgagtatgaagcagcaggtgaggatgagttaaccctgcgcttgggagacgtcgtcgaggtcctcagcaaggacagtcaggtctccggcgatgagggatggtggactgggcagctgaaccagcgggtggggatcttcccatcgaattacgttacaccccgtagtgcctttagttcacgttgccaacccggaggagaggatccttcttgttatccgccaattcagcttctggaaatagactttgccgaactcaccttagaggaaatcattggaatcggtggttttggcaaagtttacagagctttttggataggcgatgaagtggccgtgaaggccgcccggcacgatccagacgaagacatctcgcagacaatcgagaacgtaagacaggaggcgaagctttttgcaatgcttaaacacccgaacatcattgccctgcgtggagtctgcctgaaagaacctaacctctgcctggttatggaattcgcacgtggcggacctctgaatagagtgctgagtggcaagcgcatcccaccagatattctagtcaattgggcagtgcagattgccagagggatgaattacctccacgatgaggccattgtgcccattatccaccgcgatctgaaatcttccaatattctgatcctgcagaaggtagaaaacggcgacctgtccaacaaaatattgaagataaccgattttgggctggcccgcgagtggcacaggacaacaaaaatgagcgcagcagggacgtacgcatggatggctcctgaagtcatccgggcatctatgtttagcaaggggagcgatgtctggagctatggtgttctcctgtgggaactactcacaggggaggtgccttttcgcggcatcgacggcctagccgtggcctatggggtcgccatgaacaagttggccttgcctatcccctccacctgtccggagccgttcgcaaaactgatggaagactgttggaatcccgacccccattcacggccgtccttcaccaatattctcgatcagctgacaactatcgaagagtccgggttctttgagatgccgaaggattcattccattgcctacaggataattggaaacacgagattcaggaaatgtttgaccagctgagggcaaaagagaaggagctgaggacgtgggaggaagaactgactagggcagcccttcagcagaagaaccaggaagagctgctcaggagacgtgagcaagaattagccgagcgtgagattgatatcctggaacgcgaactgaacatcattatacatcagttgtgtcaagagaagccaagggtaaaaaaacgaaaaggcaagttccgcaagtccagactgaaactcaaggatgggaacagaatcagcttgccatcggatttccaacataagtttactgtccaggcgagccctacaatggacaagaggaagagcctgatcaactcacgaagctcgcctccggcctcccccaccatcataccacggctgagggcgatccagctgactccaggcgagtcaagtaagacgtggggtagatctagcgtggtgcccaaggaggaaggcgaagaggaagaaaagagggcacctaaaaagaaggggcgcacttggggccccggaaccctcggccagaaggagctagcctcaggggatgaaggctccccccagcggagagagaaagccaatggtctctcaaccccctcagagtcgccacattttcatctgggactgaaatcccttgtggacggatacaagcagtggtccagctctgccccgaatcttgtgaaggggccaagaagctctcccgctttgcccggcttcaccagccttatggaaatggaggatgaggacagcgagggtcccgggtctggcgaatcccgcctgcagcactccccctcacagagctacctgtgtataccttttcctcggggagaagacggcgatggcccttcatcagacggcatccacgaagaacccacccctgttaactcggccaccagtaccccacaacttacccctactaactcattgaagaggggaggcgcacaccaccgaagatgcgaggtcgctctgcttggatgtggtgcggtgttggccgcaacaggactggggttcgatcttttagaggctgggaagtgccagcttctcccactggaggagcctgagccaccagcacgcgaggagaaaaagcgccgagagggcctgttccagcgtagctcacgacccaggagaagtacctctcccccttcccgaaagctctttaagaaagaggagcctatgctgctgctcggcgatcccagcgcaagcctcacgctgttgtctctgagctccatcagcgaatgcaacagtacacgctctctgttgagaagtgacagcgacgagattgtcgtgtacgagatgcccgtatccccagtagaggcccctcccctgagcccatgtacacataaccccctggttaatgttcgggtggaaaggttcaagcgagatccaaatcaatcactgacccctactcacgtcacactgacaacgcctagtcaacctagcagccaccgcaggacaccctcagatggggccctcaagccggaaacacttctggcatctcgcagcccttcgtccaatggcctatctcccagtccaggagcagggatgctcaaaacacctagcccctcaagggacccgggcgagttccctaggcttcccgaccccaacgtggtctttcctcctacccctagaagatggaacacccaacaagactcaaccttagagcgtccaaaaaccctcgagtttctccccagacccaggccttcagcaaatcggcagagattggacccatggtggttcgtgagcccaagccatgctaggtctaccagtcctgccaactcatcaagcacagagaccccatccaacctggactcatgttttgcctcttcctctagcactgttgaagagaggccgggcttgccagccctgctgccgtttcaagccggccctctccccccaaccgagaggaccctgcttgaccttgatgccgagggtcagagccaggactctaccgtacctctttgtcgggcagagttgaatacccatcgacccgccccctatgaaatccagcaggagttctggtcctag

SEQ ID NO: 103501 - DNA, 3315 bp, Artificial Sequence
  derived and/or modified sequence
atggagccctcaagagcactgctgggatgcctggctagcgctgctgccgctgctcctcctggggaggacggtgcaggggcaggggctgaggaggaggaagaggaagaagaagaagccgctgcagctgtaggacctggtgaattgggatgtgacgctccactgccgtactggaccgcagtgtttgaatacgaggccgcaggagaggacgagctgacactgaggctgggcgatgttgtagaggtgctgtctaaggattcacaagtgtcaggagatgagggctggtggacaggacaactgaaccagcgggttggcatcttcccttcgaattatgtgactcctaggagcgctttttctagtaggtgtcaacctggaggcgaggacccgagctgctatccccctatccagctgctggaaattgattttgcagagttgacgctggaagagataattggaataggtggcttcggtaaagtgtatcgtgccttttggataggggacgaagtggcagttaaggccgctcgccacgatcccgatgaagacatctcgcaaaccatagagaatgtcaggcaagaagccaagttgttcgcgatgctgaagcatcctaacattatagccctacggggagtgtgtttgaaggagcctaacttatgcctggtgatggaatttgcccgaggcggacccctgaatcgcgtactgagtggaaaacgcatcccgcctgacattctcgtaaactgggcagtgcagatcgcacgcggaatgaattaccttcatgacgaggctatcgtgccaatcatccacagagatctgaagtcaagtaatattctcattttgcagaaggtcgagaatggagatttgtccaacaagattcttaagatcactgacttcggactcgccagagaatggcaccgcaccacaaaaatgtcagcggcaggcacctatgcctggatggccccagaggtcattcgtgcgagtatgttttctaaaggctctgacgtttggtcttacggcgtccttctttgggagctgctcacaggcgaggtgccctttcgcggaatcgatggattggcagtggcgtacggggtagccatgaataaactggccctcccaattcccagtacctgccctgagccatttgcaaaactgatggaggactgctggaaccctgacccacacagtaggccttcattcacaaatatattggatcaactcacaactatcgaagaatctggctttttcgagatgcccaaggactccttccactgtctgcaagacaactggaaacatgagattcaggaaatgtttgaccaacttcgagctaaagagaaagagctgcggacatgggaggaagagctgacccgtgccgctctgcagcagaagaaccaggaggaactcttgcgcagacgagagcaggaacttgccgaacgcgagattgatatcctagaaagggagctcaatattatcatccaccaactgtgtcaggagaaacccagagtaaagaagcgaaagggtaagtttaggaaaagtcggctgaaactcaaggatggcaaccgcatatctctcccctctgactttcagcacaagttcacagtccaagcatcaccgactatggataagcggaaatctctcatcaacagtcggagttccccacctgcaagccccaccataatacctcgactgcgggcaatccagctcacacctggggagagcagtaagacatggggacggtcgtcagtggtccccaaggaggaaggagaggaagaggaaaagcgcgcacccaaaaaaaagggtagaacgtggggcccagggacactcgggcaaaaggagctggcgagcggagatgagggctcgcctcagagacgggagaaggccaatggattatctactccctctgagtccccccactttcacctgggcctgaagtctctcgtcgacggatataagcaatggtccagcagcgccccaaacctggtgaaagggcctcggagctctcccgctcttcccggattcacctcacttatggaaatggaggacgaggactcagagggacccggatccggcgagtcccgattgcagcattctccgtcccagagctacctctgtatccccttcccccgtggcgaagatggtgatggcccatcatctgacggaatacatgaggagcctacaccagtaaattccgctacgagcaccccacagttgacgcctacaaatagcctgaagcgcggaggcgcacatcatcggcgatgcgaggtggccctcctgggatgcggagccgttctggccgctacgggcttggggttcgacctgctcgaagccggaaagtgccagctgctcccattggaggaacctgaaccacccgctagagaagagaaaaaacgcagagaaggcctctttcagagaagctcaaggccaaggcgcagtacaagtccacccagtcgtaagctctttaagaaggaggaaccaatgctcctgttaggagatccaagcgcctcgcttaccctgctgtcgctgtcgagcatcagtgaatgtaatagcacaagaagcctactgcgcagcgactcggacgaaatcgtggtgtacgaaatgcccgtctctcccgtggaggctccaccgttgtcaccatgtacgcacaaccccttggtgaacgtcagagtcgagaggttcaagcgggaccctaaccagagcttgaccccgactcacgttacccttaccaccccgtcccagccttcttctcacaggcggacccctagcgacggggctctgaaacccgaaacattgctggcttcacggtcaccctcttcaaatgggttgagtccaagccccggagctggtatgttgaagaccccctcaccttcaagggaccctggcgagttcccacggctcccagaccctaatgtagttttccccccaactccgagacgttggaacactcagcaggattccacactggagagacccaagacacttgaattcctgcccaggccacgcccttcagccaacaggcagcgcctggacccttggtggttcgtaagcccctcacatgctaggtcaacttctcccgcaaattcaagctccacagaaacgccctccaaccttgacagctgcttcgccagttcctccagcactgtcgaggaacgaccaggactccctgccctccttcccttccaggccggtcccttgcctcccacagagcgcaccctgctggatctggacgcagaaggccagtcacaagactctacagtccccttgtgtcgagccgaattaaatacccaccggcctgccccatatgagatccagcaggaattttggtcatag

SEQ ID NO: 103502 - DNA, 3315 bp, Artificial Sequence
  derived and/or modified sequence
atggagcccagcagagccctgctgggctgcctggccagcgccgccgccgccgccccccccggcgaggacggcgccggcgccggcgccgaggaggaggaggaggaggaggaggaggccgccgccgccgtgggccccggcgagctgggctgcgacgcccccctgccctactggaccgccgtgttcgagtacgaggccgccggcgaggacgagctgaccctgagactgggcgacgtggtggaggtgctgagcaaggacagccaggtgagcggcgacgagggctggtggaccggccagctgaaccagagagtgggcatcttccccagcaactacgtgacccccagaagcgccttcagcagcagatgccagcccggcggcgaggaccccagctgctacccccccatccagctgctggagatcgacttcgccgagctgaccctggaggagatcatcggcatcggcggcttcggcaaggtgtacagagccttctggatcggcgacgaggtggccgtgaaggccgccagacacgaccccgacgaggacatcagccagaccatcgagaacgtgagacaggaggccaagctgttcgccatgctgaagcaccccaacatcatcgccctgagaggcgtgtgcctgaaggagcccaacctgtgcctggtgatggagttcgccagaggcggccccctgaacagagtgctgagcggcaagagaatcccccccgacatcctggtgaactgggccgtgcagatcgccagaggcatgaactacctgcacgacgaggccatcgtgcccatcatccacagagacctgaagagcagcaacatcctgatcctgcagaaggtggagaacggcgacctgagcaacaagatcctgaagatcaccgacttcggcctggccagagagtggcacagaaccaccaagatgagcgccgccggcacctacgcctggatggcccccgaggtgatcagagccagcatgttcagcaagggcagcgacgtgtggagctacggcgtgctgctgtgggagctgctgaccggcgaggtgcccttcagaggcatcgacggcctggccgtggcctacggcgtggccatgaacaagctggccctgcccatccccagcacctgccccgagcccttcgccaagctgatggaggactgctggaaccccgacccccacagcagacccagcttcaccaacatcctggaccagctgaccaccatcgaggagagcggcttcttcgagatgcccaaggacagcttccactgcctgcaggacaactggaagcacgagatccaggagatgttcgaccagctgagagccaaggagaaggagctgagaacctgggaggaggagctgaccagagccgccctgcagcagaagaaccaggaggagctgctgagaagaagagagcaggagctggccgagagagagatcgacatcctggagagagagctgaacatcatcatccaccagctgtgccaggagaagcccagagtgaagaagagaaagggcaagttcagaaagagcagactgaagctgaaggacggcaacagaatcagcctgcccagcgacttccagcacaagttcaccgtgcaggccagccccaccatggacaagagaaagagcctgatcaacagcagaagcagcccccccgccagccccaccatcatccccagactgagagccatccagctgacccccggcgagagcagcaagacctggggcagaagcagcgtggtgcccaaggaggagggcgaggaggaggagaagagagcccccaagaagaagggcagaacctggggccccggcaccctgggccagaaggagctggccagcggcgacgagggcagcccccagagaagagagaaggccaacggcctgagcacccccagcgagagcccccacttccacctgggcctgaagagcctggtggacggctacaagcagtggagcagcagcgcccccaacctggtgaagggccccagaagcagccccgccctgcccggcttcaccagcctgatggagatggaggacgaggacagcgagggccccggcagcggcgagagcagactgcagcacagccccagccagagctacctgtgcatccccttccccagaggcgaggacggcgacggccccagcagcgacggcatccacgaggagcccacccccgtgaacagcgccaccagcaccccccagctgacccccaccaacagcctgaagagaggcggcgcccaccacagaagatgcgaggtggccctgctgggctgcggcgccgtgctggccgccaccggcctgggcttcgacctgctggaggccggcaagtgccagctgctgcccctggaggagcccgagccccccgccagagaggagaagaagagaagagagggcctgttccagagaagcagcagacccagaagaagcaccagcccccccagcagaaagctgttcaagaaggaggagcccatgctgctgctgggcgaccccagcgccagcctgaccctgctgagcctgagcagcatcagcgagtgcaacagcaccagaagcctgctgagaagcgacagcgacgagatcgtggtgtacgagatgcccgtgagccccgtggaggccccccccctgagcccctgcacccacaaccccctggtgaacgtgagagtggagagattcaagagagaccccaaccagagcctgacccccacccacgtgaccctgaccacccccagccagcccagcagccacagaagaacccccagcgacggcgccctgaagcccgagaccctgctggccagcagaagccccagcagcaacggcctgagccccagccccggcgccggcatgctgaagacccccagccccagcagagaccccggcgagttccccagactgcccgaccccaacgtggtgttcccccccacccccagaagatggaacacccagcaggacagcaccctggagagacccaagaccctggagttcctgcccagacccagacccagcgccaacagacagagactggacccctggtggttcgtgagccccagccacgccagaagcaccagccccgccaacagcagcagcaccgagacccccagcaacctggacagctgcttcgccagcagcagcagcaccgtggaggagagacccggcctgcccgccctgctgcccttccaggccggccccctgccccccaccgagagaaccctgctggacctggacgccgagggccagagccaggacagcaccgtgcccctgtgcagagccgagctgaacacccacagacccgccccctacgagatccagcaggagttctggagctag

SEQ ID NO: 103503 - protein, 99 aa, Artificial Sequence
  derived and/or modified sequence
MSILIIEAFYGGSHKQLVDLLQEELGDCVVYTLPAKKWHWRARTSALYFSQTIPISEHYRTLFASSVLNLTELAALRPDLGKLKKILYFHENQLIYPVK

SEQ ID NO: 103504 - protein, 173 aa, Artificial Sequence
  derived and/or modified sequence
MSILIIEAFYGGSHKQLVDLLQEELGDCVVYTLPAKKWHWRARTSALYFSQTIPISEHYRTLFASSVLNLTELAALRPDLGKLKKILYFHENQLIYPVKKCQERDFQYGYNQILSCLVADVVVFNSVFNMESFLTSMGKFMKLIPDHRPKDLESIIRPKCQVIYFPIRFPDVS

SEQ ID NO: 103505 - DNA, 300 bp, Artificial Sequence
  derived and/or modified sequence
atgtctatcttgattattgaggcattctacggaggttcccacaagcagttagtcgaccttctccaggaggaactgggtgattgcgttgtgtatactctccctgccaaaaagtggcactggcgagctaggacctctgccctgtatttcagccagacaattccaatttctgagcattatcgcaccctattcgcaagttcggtgctgaatctgactgaactggctgccctgagacccgatctcggcaagctcaaaaaaatactgtactttcacgagaatcagctgatctatcctgtaaagtag

SEQ ID NO: 103506 - DNA, 522 bp, Artificial Sequence
  derived and/or modified sequence
atgtccatcctaataattgaggctttctatggcggatctcataaacaactggtggacctgcttcaggaagaactgggagattgtgtggtatacactttgcctgcaaaaaaatggcattggagagccaggacctcggccctctattttagccaaactattcccatcagcgaacactatcggactctgtttgctagtagcgtgttgaacctcacggaactggccgcccttaggcctgatctaggtaaactaaaaaagatattgtacttccatgaaaatcagcttatttacccggtaaaaaaatgccaggaaagggacttccaatatggctacaaccagatcttgagctgtctcgttgcagatgtggtcgtatttaattctgtttttaatatggagtcctttctcacatctatgggaaagttcatgaaactgatccctgatcacaggcccaaggaccttgagagcattataaggccaaagtgtcaagtcatctatttccccatccggtttcctgacgtgtcatag

SEQ ID NO: 103507 - DNA, 601 bp, Artificial Sequence
  derived and/or modified sequence
aggtgacactgatgataaaaatccatccaagaatttatatgtgacatctgcagcaggttcaaatctctcagctatgagacaaactggatacttcctaaggattgccatctattatgcacagagagccaaaatccgttactgaaattgtctgggtatctctgcattagccagattggacatatgtaaagggacatcagtatatctggatcatcagattgtgcttcaagaagaccatagggaagaacgcattttcatcttgctgcaaaagttgcaatagaagatctgaaggtttgaatgggccaatgagtatcctcatcattgaagcattctatggaggctcccataaacagctggtggatcttcttcaagaagagttaggagactgtgtcgtttatacccttcctgcaaagaaatggcattggagagcccggacatctgctttatatttctctcagaccattcccatcagtgagcattacaggaccctctttgcaagttcagtgcttaacctgaccgaactggctgcccttcggcctgaccttgggaaactgaaaaagattctgtattttcacgagaaccagttgatatatcctgtcaagaa

SEQ ID NO: 103508 - DNA, 753 bp, Artificial Sequence
  derived and/or modified sequence
gtatctctgcattagccagattggacatatgtaaagggacatcagtatatctggatcatcagtggtataatgtgttatagaggtggacaagcctgcagattgaagtggggatcgtccagattgttcccttccctggaccatatgattgtgcttcaagaagaccatagggaagaacgcattttcatcttgctgcaaaagttgcaatagaagatctgaaggtttgaatgggccaatgagtatcctcatcattgaagcattctatggaggctcccataaacagctggtggatcttcttcaagaagagttaggagactgtgtcgtttatacccttcctgcaaagaaatggcattggagagcccggacatctgctttatatttctctcagaccattcccatcagtgagcattacaggaccctctttgcaagttcagtgcttaacctgaccgaactggctgcccttcggcctgaccttgggaaactgaaaaagattctgtattttcacgagaaccagttgatatatcctgtcaagaaatgtcaggagagggatttccaatatggatacaaccaaattctttcatgcctggtggctgatgtggttgtattcaactcagtttttaatatggaatcatttctcacttccatgggaaaatttatgaagctgattcctgatcacagacccaaggatctggaaagcatcatcagacccaagtgccaagttatttactttcccatcaggtttcctgatgtgagcag

SEQ ID NO: 103509 - DNA, 300 bp, Artificial Sequence
  derived and/or modified sequence
atgagcatcctgatcatcgaggccttctacggcggcagccacaagcagctggtggacctgctgcaggaggagctgggggactgtgtggtgtacaccctgcctgccaagaagtggcactggagggcccggaccagcgccctgtacttcagccagaccatccccatcagcgagcactaccgcaccctgtttgccagctctgtgctgaacctgacagagctggccgccctgcggccagacctgggcaagctgaagaagatcctgtacttccacgagaaccagctgatctaccctgtgaagtag

SEQ ID NO: 103510 - DNA, 522 bp, Artificial Sequence
  derived and/or modified sequence
atgagcatcctgatcatcgaggccttctacggcggcagccacaagcagctggtggacctgctgcaggaggagctgggggactgtgtggtgtacaccctgcctgccaagaagtggcactggagggcccggaccagcgccctgtacttcagccagaccatccccatcagcgagcactaccgcaccctgtttgccagctctgtgctgaacctgacagagctggccgccctgcggccagacctgggcaagctgaagaagatcctgtacttccacgagaaccagctgatctaccctgtgaagaagtgccaggagcgggacttccagtatggctacaaccagatcctgagctgcctggtggctgatgtggtggtgttcaacagcgtcttcaacatggagagcttcctgacctccatgggcaagttcatgaagctgatcccagaccaccggcccaaggacctggagagcatcatccggcccaagtgccaggtgatctacttccccatccgcttcccagatgtgtcctag

SEQ ID NO: 103511 - DNA, 300 bp, Artificial Sequence
  derived and/or modified sequence
atgagcatcctgatcatcgaggccttctacggcggcagccacaagcagctggtagaccttctgcaggaagaactcggtgattgcgtagtgtacacactgccagcgaaaaagtggcattggcgggcccgaacctcagccctctacttcagccagacaatccccatatcggagcactatagaacactgtttgcgtcgagtgtcctcaatctgactgaactcgctgctttgcggcccgaccttggaaaactgaaaaagattctatacttccacgaaaaccagttgatataccccgttaagtag

SEQ ID NO: 103512 - DNA, 522 bp, Artificial Sequence
  derived and/or modified sequence
atgagcatcctgatcatcgaggccttctacggcggcagccacaagcaactggtagatctcctgcaggaagagcttggcgattgcgtggtgtacaccctgccagctaaaaaatggcactggcgggcgcgcacctccgctttatacttctctcaaacgattccgatctctgaacattataggacgctatttgcctcttcagtgctgaatttgacggagcttgccgccctgagaccggacctcggcaaattgaagaaaatcttgtactttcatgaaaaccagttaatctaccctgttaaaaaatgtcaggagagggatttccagtacggctacaatcagatcctctcctgcctcgtcgcggatgtggtggtgttcaactccgtgttcaacatggagtcctttttaacatctatggggaagtttatgaaactgatacctgatcatcgccccaaagacctggagtccataatccgcccaaagtgccaggttatttacttccccatcaggttcccagacgtgtcatag

SEQ ID NO: 103513 - DNA, 300 bp, Artificial Sequence
  derived and/or modified sequence
atgtctatactcataattgaagcattctatggcggtagtcacaagcaactcgtggatcttctacaggaggaattgggtgactgtgtagtatatacgctgcctgccaaaaagtggcattggcgggcaaggaccagcgcactgtacttcagtcagaccattcccatttccgaacattacaggactctcttcgcgtcctcagtgctgaacttaactgagctggctgccttgaggccagacttaggtaagttgaagaagatcttatatttccatgaaaatcagttgatttatcctgtgaaatag

SEQ ID NO: 103514 - DNA, 522 bp, Artificial Sequence
  derived and/or modified sequence
atgtcaattctgataattgaagctttctacggcggttcccataagcagctagtggatctgcttcaggaggaattgggcgactgcgtggtttacaccctgcctgctaagaagtggcactggcgtgcacgtacatccgccctgtacttcagccagaccattccaatctctgaacactacagaaccttgtttgcctctagcgtcttgaatctcaccgaactagccgcactgcgcccagaccttggaaagctgaagaagattctgtacttccacgagaaccaactaatttacccggtcaagaagtgtcaagaaagagacttccagtacggatacaaccagattctctcgtgccttgtagctgacgtcgtggtgttcaacagtgtcttcaatatggagtctttcttgacgtccatgggaaaattcatgaagctcattcccgaccatcgacccaaagacctggagtctatcattagaccgaaatgccaggtgatttattttccaataagattccctgatgtgagttag

SEQ ID NO: 103515 - DNA, 300 bp, Artificial Sequence
  derived and/or modified sequence
atgagcatcctgatcatcgaggccttctacggcggcagccacaagcagctggtggacctgctgcaggaggagctgggcgactgcgtggtgtacaccctgcccgccaagaagtggcactggagagccagaaccagcgccctgtacttcagccagaccatccccatcagcgagcactacagaaccctgttcgccagcagcgtgctgaacctgaccgagctggccgccctgagacccgacctgggcaagctgaagaagatcctgtacttccacgagaaccagctgatctaccccgtgaagtag

SEQ ID NO: 103516 - DNA, 522 bp, Artificial Sequence
  derived and/or modified sequence
atgagcatcctgatcatcgaggccttctacggcggcagccacaagcagctggtggacctgctgcaggaggagctgggcgactgcgtggtgtacaccctgcccgccaagaagtggcactggagagccagaaccagcgccctgtacttcagccagaccatccccatcagcgagcactacagaaccctgttcgccagcagcgtgctgaacctgaccgagctggccgccctgagacccgacctgggcaagctgaagaagatcctgtacttccacgagaaccagctgatctaccccgtgaagaagtgccaggagagagacttccagtacggctacaaccagatcctgagctgcctggtggccgacgtggtggtgttcaacagcgtgttcaacatggagagcttcctgaccagcatgggcaagttcatgaagctgatccccgaccacagacccaaggacctggagagcatcatcagacccaagtgccaggtgatctacttccccatcagattccccgacgtgagctag

SEQ ID NO: 103517 - protein, 127 aa, Artificial Sequence
  derived and/or modified sequence
MRTEAEAAGPPLEPGDFVQLPVPVIQQLYHWDCGLACSRMVLRYLGQLDDSEFERALQKLQLTRSIWTIDLAYLMHHFGVRHRFCTQTLGVDKGYKNQSFYRKHFDTEETRVNQLFAQAKACKVLVE

SEQ ID NO: 103518 - DNA, 773 bp, Artificial Sequence
  derived and/or modified sequence
agtacgatagttccggcaccggaaaagagggctgatgactgggcccgggggccgccgcaacgacccttggggccggcaaagagccagagagggtgctcacacttccaagcaccccacaccaaggacaggctggacggcaaggcggagacgcggggcttgggccctcagaccggggacagcaggaggttgggccaagggccaggacttcccgtcacaatttcatttgttgatcccggcaccgccagccgccgcctcccgttctctcctccgcagcggcggcggtggcggagaaggaactcgacacgcaccgaccgccctcccgccccagccgaagcggaagctgtagcccgctctgggccggggccatgggcgccccgcgccgcccgggtcatgaggacggaggcggaggcagcggggccgccgctcgagcccggggactttgtgcaactgcctgtgcccgtcatccagcagctctaccactgggactgtggcctggcctgctccaggatggtgctgcggtacctgggccagctggacgacagtgagtttgagagagccctgcagaagctgcagctgaccaggagcatctggaccatcgacctggcctacctgatgcaccactttggcgtgaggcaccgcttctgtacccagaccctgggtgtcgacaagggctacaagaaccagtccttctacaggaagcactttgacacagaagagacccgggtgaatcagctgtttgcacaagcaaaggcctgcaaggtgctggtggagaa

SEQ ID NO: 103519 - DNA, 384 bp, Artificial Sequence
  derived and/or modified sequence
atgagaaccgaggccgaggccgccggcccccccctggagcccggcgacttcgtgcagctgcccgtgcccgtgatccagcagctgtaccactgggactgcggcctggcctgcagcagaatggtgctgagatacctgggccagctggacgacagcgagttcgagagagccctgcagaagctgcagctgaccagaagcatctggaccatcgacctggcctacctgatgcaccacttcggcgtgagacacagattctgcacccagaccctgggcgtggacaagggctacaagaaccagagcttctacagaaagcacttcgacaccgaggagaccagagtgaaccagctgttcgcccaggccaaggcctgcaaggtgctggtggagtag

SEQ ID NO: 103520 - DNA, 384 bp, Artificial Sequence
  derived and/or modified sequence
atgagaaccgaggcagaagctgccggaccgcccttagagccaggcgactttgtgcagctgccagttcctgtaatccagcagctgtaccattgggattgcggccttgcgtgcagccgcatggtcctccgctatcttggacagttagatgacagtgagtttgagcgagcactccaaaagttacaactaactagatccatatggacgatcgatctggcctatctgatgcaccattttggtgtgaggcatcgcttttgcacgcagaccttgggcgtcgacaagggatacaaaaatcagagtttttaccgcaaacatttcgacaccgaggaaacccgtgtgaaccagctgtttgcgcaagctaaggcatgcaaagttctggttgaatag

SEQ ID NO: 103521 - DNA, 384 bp, Artificial Sequence
  derived and/or modified sequence
atgaggacagaagctgaggccgccggcccccccctggagcccggggactttgtgcagctgcctgtgcctgtgatccagcagctgtaccactgggactgtggcctggcctgcagcaggatggtgctgcgctacctgggccagctggatgattctgaatttgagcgggccctgcagaagctgcagctgaccaggagcatctggaccatcgacctggcctacctgatgcaccactttggagtgcgccaccgcttctgcacccagaccctgggcgtggacaagggctacaagaaccagagcttctacaggaagcactttgacacagaggagaccagggtgaaccagctgtttgcccaggccaaggcctgcaaggtgctggtggagtag

SEQ ID NO: 103522 - DNA, 384 bp, Artificial Sequence
  derived and/or modified sequence
atgcggaccgaggccgaggccgccggcccccccctggagcccggcgactttgtgcaactgccagtgccagttatccagcagctctaccactgggattgcggcctggcttgctcaaggatggttttgaggtatttgggccagctggatgacagcgagttcgaacgcgcactgcagaaactccaacttacaaggagcatctggaccattgacctggcttacttaatgcatcacttcggggtacgccaccgcttttgtacccagaccctcggtgtggataagggctacaaaaaccaaagtttctatcgcaaacacttcgacaccgaagaaacgagggtgaaccagttgttcgcccaggctaaggcttgtaaagtgttagtggagtag

SEQ ID NO: 103523 - DNA, 384 bp, Artificial Sequence
  derived and/or modified sequence
atgagaacagaggccgaagctgccggtcccccactggagcctggtgactttgttcagctcccagttccagtcatccagcagttataccattgggattgtggattagcttgctcacgcatggtgctgcgataccttggacagctggacgattccgaatttgaacgcgctctacaaaagctgcagttgacccggtcaatctggaccatcgatttggcgtacttaatgcaccattttggagtacgtcacagattttgtactcagaccctcggggtcgataaggggtataagaaccagtcattttaccggaagcactttgacactgaggagacccgcgtcaaccagctgttcgcacaagctaaagcctgtaaggtccttgtggaatag

SEQ ID NO: 103524 - protein, 1820 aa, Artificial Sequence
  derived and/or modified sequence
MESNFNQEGVPRPSYVFSADPIARPSEINFDGIKLDLSHEFSLVAPNTEANSFESKDYLQVCLRIRPFTQSEKELESEGCVHILDSQTVVLKEPQCILGRLSEKSSGQMAQKFSFSKVFGPATTQKEFFQGCIMQPVKDLLKGQSRLIFTYGLTNSGKTYTFQGTEENIGILPRTLNVLFDSLQERLYTKMNLKPHRSREYLRLSSEQEKEEIASKSALLRQIKEVTVHNDSDDTLYGSLTNSLNISEFEESIKDYEQANLNMANSIKFSVWVSFFEIYNEYIYDLFVPVSSKFQKRKMLRLSQDVKGYSFIKDLQWIQVSDSKEAYRLLKLGIKHQSVAFTKLNNASSRSHSIFTVKILQIEDSEMSRVIRVSELSLCDLAGSERTMKTQNEGERLRETGNINTSLLTLGKCINVLKNSEKSKFQQHVPFRESKLTHYFQSFFNGKGKICMIVNISQCYLAYDETLNVLKFSAIAQKVCVPDTLNSSQEKLFGPVKSSQDVSLDSNSNSKILNVKRATISWENSLEDLMEDEDLVEELENAEETQNVETKLLDEDLDKTLEENKAFISHEEKRKLLDLIEDLKKKLINEKKEKLTLEFKIREEVTQEFTQYWAQREADFKETLLQEREILEENAERRLAIFKDLVGKCDTREEAAKDICATKVETEETHNYVGFEDIIDSLQDNVADIKKQAEIAHLYIASLPDPQEATACLELKFNQIKAELAKTKGELIKTKEELKKRENESDSLIQELETSNKKIITQNQRIKELINIIDQKEDTINEFQNLKSHMENTFKCNDKADTSSLIINNKLICNETVEVPKDSKSKICSERKRVNENELQQDEPPAKKGSIHVSSAITEDQKKSEEVRPNIAEIEDIRVLQENNEGLRAFLLTIENELKNEKEEKAELNKQIVHFQQELSLSEKKNLTLSKEVQQIQSNYDIAIAELHVQKSKNQEQEEKIMKLSNEIETATRSITNNVSQIKLMHTKIDELRTLDSVSQISNIDLLNLRDLSNGSEEDNLPNTQLDLLGNDYLVSKQVKEYRIQEPNRENSFHSSIEAIWEECKEIVKASSKKSHQIEELEQQIEKLQAEVKGYKDENNRLKEKEHKNQDDLLKEKETLIQQLKEELQEKNVTLDVQIQHVVEGKRALSELTQGVTCYKAKIKELETILETQKVECSHSAKLEQDILEKESIILKLERNLKEFQEHLQDSVKNTKDLNVKELKLKEEITQLTNNLQDMKHLLQLKEEEEETNRQETEKLKEELSASSARTQNLKADLQRKEEDYADLKEKLTDAKKQIKQVQKEVSVMRDEDKLLRIKINELEKKKNQCSQELDMKQRTIQQLKEQLNNQKVEEAIQQYERACKDLNVKEKIIEDMRMTLEEQEQTQVEQDQVLEAKLEEVERLATELEKWKEKCNDLETKNNQRSNKEHENNTDVLGKLTNLQDELQESEQKYNADRKKWLEEKMMLITQAKEAENIRNKEMKKYAEDRERFFKQQNEMEILTAQLTEKDSDLQKWREERDQLVAALEIQLKALISSNVQKDNEIEQLKRIISETSKIETQIMDIKPKRISSADPDKLQTEPLSTSFEISRNKIEDGSVVLDSCEVSTENDQSTRFPKPELEIQFTPLQPNKMAVKHPGCTTPVTVKIPKARKRKSNEMEEDLVKCENKKNATPRTNLKFPISDDRNSSVKKEQKVAIRPSSKKTYSLRSQASIIGVNLATKKKEGTLQKFGDFLQHSPSILQSKAKKIIETMSSSKLSNVEASKENVSQPKRAKRKLYTSEISSPIDISGQVILMDQKMKESDHQIIKRRLRTKTAK

SEQ ID NO: 103525 - protein, 1722 aa, Artificial Sequence
  derived and/or modified sequence
MESNFNQEGVPRPSYVFSADPIARPSEINFDGIKLDLSHEFSLVAPNTEANSFESKDYLQVCLRIRPFTQSEKELESEGCVHILDSQTVVLKEPQCILGRLSEKSSGQMAQKFSFSKVFGPATTQKEFFQGCIMQPVKDLLKGQSRLIFTYGLTNSGKTYTFQGTEENIGILPRTLNVLFDSLQERLYTKMNLKPHRSREYLRLSSEQEKEEIASKSALLRQIKEVTVHNDSDDTLYGSLTNSLNISEFEESIKDYEQANLNMANSIKFSVWVSFFEIYNEYIYDLFVPVSSKFQKRKMLRLSQDVKGYSFIKDLQWIQVSDSKEAYRLLKLGIKHQSVAFTKLNNASSRSHSIFTVKILQIEDSEMSRVIRVSELSLCDLAGSERTMKTQNEGERLRETGNINTSLLTLGKCINVLKNSEKSKFQQHVPFRESKLTHYFQSFFNGKGKICMIVNISQCYLAYDETLNVLKFSAIAQKVCVPDTLNSSQEKLFGPVKSSQDVSLDSNSNSKILNVKRATISWENSLEDLMEDEDLVEELENAEETQNVETKLLDEDLDKTLEENKAFISHEEKRKLLDLIEDLKKKLINEKKEKLTLEFKIREEVTQEFTQYWAQREADFKETLLQEREILEENAERRLAIFKDLVGKCDTREEAAKDICATKVETEETHNYVGFEDIIDSLQDNVADIKKQAEIAHLYIASLPDPQEATACLELKFNQIKAELAKTKGELIKTKEELKKRENESDSLIQELETSNKKIITQNQRIKELINIIDQKEDTINEFQNLKSHMENTFKCNDKADTSSLIINNKLICNETVEVPKDSKSKICSERKRVNENELQQDEPPAKKGSIHVSSAITEDQKKSEEVRPNIAEIEDIRVLQENNEGLRAFLLTIENELKNEKEEKAELNKQIVHFQQELSLSEKKNLTLSKEVQQIQSNYDIAIAELHVQKSKNQEQEEKIMKLSNEIETATRSITNNVSQIKLMHTKIDELRTLDSVSQISNIDLLNLRDLSNGSEEDNLPNTQLDLLGNDYLVSKQVKEYRIQEPNRENSFHSSIEAIWEECKEIVKASSKKSHQIEELEQQIEKLQAEVKGYKDENNRLKEKEHKNQDDLLKEKETLIQQLKEELQEKNVTLDVQIQHVVEGKRALSELTQGVTCYKAKIKELETILETQKVECSHSAKLEQDILEKESIILKLERNLKEFQEHLQDSVKNTKDLNVKELKLKEEITQLTNNLQDMKHLLQLKEEEEETNRQETEKLKEELSASSARTQNLKADLQRKEEDYADLKEKLTDAKKQIKQVQKEVSVMRDEDKLLRIKINELEKKKNQCSQELDMKQRTIQQLKEQLNNQKVEEAIQQYERACKDLNVKEKIIEDMRMTLEEQEQTQVEQDQVLEAKLEEVERLATELEKWKEKCNDLETKNNQRSNKEHENNTDVLGKLTNLQDELQESEQKYNADRKKWLEEKMMLITQAKEAENIRNKEMKKYAEDRERFFKQQNEMEILTAQLTEKDSDLQKWREERDQLVAALEIQLKALISSNVQKDNEIEQLKRIISETSKIETQIMDIKPKRISSADPDKLQTEPLSTSFEISRNKIEDGSVVLDSCEVSTENDQSTRFPKPELEIQFTPLQPNKMAVKHPGCTTPVTVKIPKARKRKSNEMEESASPPPKECSSSPAMEQSWKENDFDKLREEGFRRSNYSELQEEIQTKGKEVENFEKNLD

SEQ ID NO: 103526 - protein, 1850 aa, Artificial Sequence
  derived and/or modified sequence
MESNFNQEGVPRPSYVFSADPIARPSEINFDGIKLDLSHEFSLVAPNTEANSFESKDYLQVCLRIRPFTQSEKELESEGCVHILDSQTVVLKEPQCILGRLSEKSSGQMAQKFSFSKVFGPATTQKEFFQGCIMQPVKDLLKGQSRLIFTYGLTNSGKTYTFQGTEENIGILPRTLNVLFDSLQERLYTKMNLKPHRSREYLRLSSEQEKEEIASKSALLRQIKEVTVHNDSDDTLYGSLTNSLNISEFEESIKDYEQANLNMANSIKFSVWVSFFEIYNEYIYDLFVPVSSKFQKRKMLRLSQDVKGYSFIKDLQWIQVSDSKEAYRLLKLGIKHQSVAFTKLNNASSRSHSIFTVKILQIEDSEMSRVIRVSELSLCDLAGSERTMKTQNEGERLRETGNINTSLLTLGKCINVLKNSEKSKFQQHVPFRESKLTHYFQSFFNGKGKICMIVNISQCYLAYDETLNVLKFSAIAQKVCVPDTLNSSQEKLFGPVKSSQDVSLDSNSNSKILNVKRATISWENSLEDLMEDEDLVEELENAEETQNVETKLLDEDLDKTLEENKAFISHEEKRKLLDLIEDLKKKLINEKKEKLTLEFKIREEVTQEFTQYWAQREADFKETLLQEREILEENAERRLAIFKDLVGKCDTREEAAKDICATKVETEETHNYVGFEDIIDSLQDNVADIKKQAEIAHLYIASLPDPQEATACLELKFNQIKAELAKTKGELIKTKEELKKRENESDSLIQELETSNKKIITQNQRIKELINIIDQKEDTINEFQNLKSHMENTFKCNDKADTSSLIINNKLICNETVEVPKDSKSKICSERKRVNENELQQDEPPAKKGTTSAASSRRLRKLISKPVNRTRQTEGHSLVSIHVSSAITEDQKKSEEVRPNIAEIEDIRVLQENNEGLRAFLLTIENELKNEKEEKAELNKQIVHFQQELSLSEKKNLTLSKEVQQIQSNYDIAIAELHVQKSKNQEQEEKIMKLSNEIETATRSITNNVSQIKLMHTKIDELRTLDSVSQISNIDLLNLRDLSNGSEEDNLPNTQLDLLGNDYLVSKQVKEYRIQEPNRENSFHSSIEAIWEECKEIVKASSKKSHQIEELEQQIEKLQAEVKGYKDENNRLKEKEHKNQDDLLKEKETLIQQLKEELQEKNVTLDVQIQHVVEGKRALSELTQGVTCYKAKIKELETILETQKVECSHSAKLEQDILEKESIILKLERNLKEFQEHLQDSVKNTKDLNVKELKLKEEITQLTNNLQDMKHLLQLKEEEEETNRQETEKLKEELSASSARTQNLKADLQRKEEDYADLKEKLTDAKKQIKQVQKEVSVMRDEDKLLRIKINELEKKKNQCSQELDMKQRTIQQLKEQLNNQKVEEAIQQYERACKDLNVKEKIIEDMRMTLEEQEQTQVEQDQVLEAKLEEVERLATELEKWKEKCNDLETKNNQRSNKEHENNTDVLGKLTNLQDELQESEQKYNADRKKWLEEKMMLITQAKEAENIRNKEMKKYAEDRERFFKQQNEMEILTAQLTEKDSDLQKWREERDQLVAALEIQLKALISSNVQKDNEIEQLKRIISETSKIETQIMDIKPKRISSADPDKLQTEPLSTSFEISRNKIEDGSVVLDSCEVSTENDQSTRFPKPELEIQFTPLQPNKMAVKHPGCTTPVTVKIPKARKRKSNEMEEDLVKCENKKNATPRTNLKFPISDDRNSSVKKEQKVAIRPSSKKTYSLRSQASIIGVNLATKKKEGTLQKFGDFLQHSPSILQSKAKKIIETMSSSKLSNVEASKENVSQPKRAKRKLYTSEISSPIDISGQVILMDQKMKESDHQIIKRRLRTKTAK

SEQ ID NO: 103527 - DNA, 5463 bp, Artificial Sequence
  derived and/or modified sequence
atggagagcaacttcaaccaggagggcgtgcccagacccagctacgtgttcagcgccgaccccatcgccagacccagcgagatcaacttcgacggcatcaagctggacctgagccacgagttcagcctggtggcccccaacaccgaggccaacagcttcgagagcaaggactacctgcaggtgtgcctgagaatcagacccttcacccagagcgagaaggagctggagagcgagggctgcgtgcacatcctggacagccagaccgtggtgctgaaggagccccagtgcatcctgggcagactgagcgagaagagcagcggccagatggcccagaagttcagcttcagcaaggtgttcggccccgccaccacccagaaggagttcttccagggctgcatcatgcagcccgtgaaggacctgctgaagggccagagcagactgatcttcacctacggcctgaccaacagcggcaagacctacaccttccagggcaccgaggagaacatcggcatcctgcccagaaccctgaacgtgctgttcgacagcctgcaggagagactgtacaccaagatgaacctgaagccccacagaagcagagagtacctgagactgagcagcgagcaggagaaggaggagatcgccagcaagagcgccctgctgagacagatcaaggaggtgaccgtgcacaacgacagcgacgacaccctgtacggcagcctgaccaacagcctgaacatcagcgagttcgaggagagcatcaaggactacgagcaggccaacctgaacatggccaacagcatcaagttcagcgtgtgggtgagcttcttcgagatctacaacgagtacatctacgacctgttcgtgcccgtgagcagcaagttccagaagagaaagatgctgagactgagccaggacgtgaagggctacagcttcatcaaggacctgcagtggatccaggtgagcgacagcaaggaggcctacagactgctgaagctgggcatcaagcaccagagcgtggccttcaccaagctgaacaacgccagcagcagaagccacagcatcttcaccgtgaagatcctgcagatcgaggacagcgagatgagcagagtgatcagagtgagcgagctgagcctgtgcgacctggccggcagcgagagaaccatgaagacccagaacgagggcgagagactgagagagaccggcaacatcaacaccagcctgctgaccctgggcaagtgcatcaacgtgctgaagaacagcgagaagagcaagttccagcagcacgtgcccttcagagagagcaagctgacccactacttccagagcttcttcaacggcaagggcaagatctgcatgatcgtgaacatcagccagtgctacctggcctacgacgagaccctgaacgtgctgaagttcagcgccatcgcccagaaggtgtgcgtgcccgacaccctgaacagcagccaggagaagctgttcggccccgtgaagagcagccaggacgtgagcctggacagcaacagcaacagcaagatcctgaacgtgaagagagccaccatcagctgggagaacagcctggaggacctgatggaggacgaggacctggtggaggagctggagaacgccgaggagacccagaacgtggagaccaagctgctggacgaggacctggacaagaccctggaggagaacaaggccttcatcagccacgaggagaagagaaagctgctggacctgatcgaggacctgaagaagaagctgatcaacgagaagaaggagaagctgaccctggagttcaagatcagagaggaggtgacccaggagttcacccagtactgggcccagagagaggccgacttcaaggagaccctgctgcaggagagagagatcctggaggagaacgccgagagaagactggccatcttcaaggacctggtgggcaagtgcgacaccagagaggaggccgccaaggacatctgcgccaccaaggtggagaccgaggagacccacaactacgtgggcttcgaggacatcatcgacagcctgcaggacaacgtggccgacatcaagaagcaggccgagatcgcccacctgtacatcgccagcctgcccgacccccaggaggccaccgcctgcctggagctgaagttcaaccagatcaaggccgagctggccaagaccaagggcgagctgatcaagaccaaggaggagctgaagaagagagagaacgagagcgacagcctgatccaggagctggagaccagcaacaagaagatcatcacccagaaccagagaatcaaggagctgatcaacatcatcgaccagaaggaggacaccatcaacgagttccagaacctgaagagccacatggagaacaccttcaagtgcaacgacaaggccgacaccagcagcctgatcatcaacaacaagctgatctgcaacgagaccgtggaggtgcccaaggacagcaagagcaagatctgcagcgagagaaagagagtgaacgagaacgagctgcagcaggacgagccccccgccaagaagggcagcatccacgtgagcagcgccatcaccgaggaccagaagaagagcgaggaggtgagacccaacatcgccgagatcgaggacatcagagtgctgcaggagaacaacgagggcctgagagccttcctgctgaccatcgagaacgagctgaagaacgagaaggaggagaaggccgagctgaacaagcagatcgtgcacttccagcaggagctgagcctgagcgagaagaagaacctgaccctgagcaaggaggtgcagcagatccagagcaactacgacatcgccatcgccgagctgcacgtgcagaagagcaagaaccaggagcaggaggagaagatcatgaagctgagcaacgagatcgagaccgccaccagaagcatcaccaacaacgtgagccagatcaagctgatgcacaccaagatcgacgagctgagaaccctggacagcgtgagccagatcagcaacatcgacctgctgaacctgagagacctgagcaacggcagcgaggaggacaacctgcccaacacccagctggacctgctgggcaacgactacctggtgagcaagcaggtgaaggagtacagaatccaggagcccaacagagagaacagcttccacagcagcatcgaggccatctgggaggagtgcaaggagatcgtgaaggccagcagcaagaagagccaccagatcgaggagctggagcagcagatcgagaagctgcaggccgaggtgaagggctacaaggacgagaacaacagactgaaggagaaggagcacaagaaccaggacgacctgctgaaggagaaggagaccctgatccagcagctgaaggaggagctgcaggagaagaacgtgaccctggacgtgcagatccagcacgtggtggagggcaagagagccctgagcgagctgacccagggcgtgacctgctacaaggccaagatcaaggagctggagaccatcctggagacccagaaggtggagtgcagccacagcgccaagctggagcaggacatcctggagaaggagagcatcatcctgaagctggagagaaacctgaaggagttccaggagcacctgcaggacagcgtgaagaacaccaaggacctgaacgtgaaggagctgaagctgaaggaggagatcacccagctgaccaacaacctgcaggacatgaagcacctgctgcagctgaaggaggaggaggaggagaccaacagacaggagaccgagaagctgaaggaggagctgagcgccagcagcgccagaacccagaacctgaaggccgacctgcagagaaaggaggaggactacgccgacctgaaggagaagctgaccgacgccaagaagcagatcaagcaggtgcagaaggaggtgagcgtgatgagagacgaggacaagctgctgagaatcaagatcaacgagctggagaagaagaagaaccagtgcagccaggagctggacatgaagcagagaaccatccagcagctgaaggagcagctgaacaaccagaaggtggaggaggccatccagcagtacgagagagcctgcaaggacctgaacgtgaaggagaagatcatcgaggacatgagaatgaccctggaggagcaggagcagacccaggtggagcaggaccaggtgctggaggccaagctggaggaggtggagagactggccaccgagctggagaagtggaaggagaagtgcaacgacctggagaccaagaacaaccagagaagcaacaaggagcacgagaacaacaccgacgtgctgggcaagctgaccaacctgcaggacgagctgcaggagagcgagcagaagtacaacgccgacagaaagaagtggctggaggagaagatgatgctgatcacccaggccaaggaggccgagaacatcagaaacaaggagatgaagaagtacgccgaggacagagagagattcttcaagcagcagaacgagatggagatcctgaccgcccagctgaccgagaaggacagcgacctgcagaagtggagagaggagagagaccagctggtggccgccctggagatccagctgaaggccctgatcagcagcaacgtgcagaaggacaacgagatcgagcagctgaagagaatcatcagcgagaccagcaagatcgagacccagatcatggacatcaagcccaagagaatcagcagcgccgaccccgacaagctgcagaccgagcccctgagcaccagcttcgagatcagcagaaacaagatcgaggacggcagcgtggtgctggacagctgcgaggtgagcaccgagaacgaccagagcaccagattccccaagcccgagctggagatccagttcacccccctgcagcccaacaagatggccgtgaagcaccccggctgcaccacccccgtgaccgtgaagatccccaaggccagaaagagaaagagcaacgagatggaggaggacctggtgaagtgcgagaacaagaagaacgccacccccagaaccaacctgaagttccccatcagcgacgacagaaacagcagcgtgaagaaggagcagaaggtggccatcagacccagcagcaagaagacctacagcctgagaagccaggccagcatcatcggcgtgaacctggccaccaagaagaaggagggcaccctgcagaagttcggcgacttcctgcagcacagccccagcatcctgcagagcaaggccaagaagatcatcgagaccatgagcagcagcaagctgagcaacgtggaggccagcaaggagaacgtgagccagcccaagagagccaagagaaagctgtacaccagcgagatcagcagccccatcgacatcagcggccaggtgatcctgatggaccagaagatgaaggagagcgaccaccagatcatcaagagaagactgagaaccaagaccgccaagtag

SEQ ID NO: 103528 - DNA, 5169 bp, Artificial Sequence
  derived and/or modified sequence
atggagagcaacttcaaccaggagggcgtgcccagacccagctacgtgttcagcgccgaccccatcgccagacccagcgagatcaacttcgacggcatcaagctggacctgagccacgagttcagcctggtggcccccaacaccgaggccaacagcttcgagagcaaggactacctgcaggtgtgcctgagaatcagacccttcacccagagcgagaaggagctggagagcgagggctgcgtgcacatcctggacagccagaccgtggtgctgaaggagccccagtgcatcctgggcagactgagcgagaagagcagcggccagatggcccagaagttcagcttcagcaaggtgttcggccccgccaccacccagaaggagttcttccagggctgcatcatgcagcccgtgaaggacctgctgaagggccagagcagactgatcttcacctacggcctgaccaacagcggcaagacctacaccttccagggcaccgaggagaacatcggcatcctgcccagaaccctgaacgtgctgttcgacagcctgcaggagagactgtacaccaagatgaacctgaagccccacagaagcagagagtacctgagactgagcagcgagcaggagaaggaggagatcgccagcaagagcgccctgctgagacagatcaaggaggtgaccgtgcacaacgacagcgacgacaccctgtacggcagcctgaccaacagcctgaacatcagcgagttcgaggagagcatcaaggactacgagcaggccaacctgaacatggccaacagcatcaagttcagcgtgtgggtgagcttcttcgagatctacaacgagtacatctacgacctgttcgtgcccgtgagcagcaagttccagaagagaaagatgctgagactgagccaggacgtgaagggctacagcttcatcaaggacctgcagtggatccaggtgagcgacagcaaggaggcctacagactgctgaagctgggcatcaagcaccagagcgtggccttcaccaagctgaacaacgccagcagcagaagccacagcatcttcaccgtgaagatcctgcagatcgaggacagcgagatgagcagagtgatcagagtgagcgagctgagcctgtgcgacctggccggcagcgagagaaccatgaagacccagaacgagggcgagagactgagagagaccggcaacatcaacaccagcctgctgaccctgggcaagtgcatcaacgtgctgaagaacagcgagaagagcaagttccagcagcacgtgcccttcagagagagcaagctgacccactacttccagagcttcttcaacggcaagggcaagatctgcatgatcgtgaacatcagccagtgctacctggcctacgacgagaccctgaacgtgctgaagttcagcgccatcgcccagaaggtgtgcgtgcccgacaccctgaacagcagccaggagaagctgttcggccccgtgaagagcagccaggacgtgagcctggacagcaacagcaacagcaagatcctgaacgtgaagagagccaccatcagctgggagaacagcctggaggacctgatggaggacgaggacctggtggaggagctggagaacgccgaggagacccagaacgtggagaccaagctgctggacgaggacctggacaagaccctggaggagaacaaggccttcatcagccacgaggagaagagaaagctgctggacctgatcgaggacctgaagaagaagctgatcaacgagaagaaggagaagctgaccctggagttcaagatcagagaggaggtgacccaggagttcacccagtactgggcccagagagaggccgacttcaaggagaccctgctgcaggagagagagatcctggaggagaacgccgagagaagactggccatcttcaaggacctggtgggcaagtgcgacaccagagaggaggccgccaaggacatctgcgccaccaaggtggagaccgaggagacccacaactacgtgggcttcgaggacatcatcgacagcctgcaggacaacgtggccgacatcaagaagcaggccgagatcgcccacctgtacatcgccagcctgcccgacccccaggaggccaccgcctgcctggagctgaagttcaaccagatcaaggccgagctggccaagaccaagggcgagctgatcaagaccaaggaggagctgaagaagagagagaacgagagcgacagcctgatccaggagctggagaccagcaacaagaagatcatcacccagaaccagagaatcaaggagctgatcaacatcatcgaccagaaggaggacaccatcaacgagttccagaacctgaagagccacatggagaacaccttcaagtgcaacgacaaggccgacaccagcagcctgatcatcaacaacaagctgatctgcaacgagaccgtggaggtgcccaaggacagcaagagcaagatctgcagcgagagaaagagagtgaacgagaacgagctgcagcaggacgagccccccgccaagaagggcagcatccacgtgagcagcgccatcaccgaggaccagaagaagagcgaggaggtgagacccaacatcgccgagatcgaggacatcagagtgctgcaggagaacaacgagggcctgagagccttcctgctgaccatcgagaacgagctgaagaacgagaaggaggagaaggccgagctgaacaagcagatcgtgcacttccagcaggagctgagcctgagcgagaagaagaacctgaccctgagcaaggaggtgcagcagatccagagcaactacgacatcgccatcgccgagctgcacgtgcagaagagcaagaaccaggagcaggaggagaagatcatgaagctgagcaacgagatcgagaccgccaccagaagcatcaccaacaacgtgagccagatcaagctgatgcacaccaagatcgacgagctgagaaccctggacagcgtgagccagatcagcaacatcgacctgctgaacctgagagacctgagcaacggcagcgaggaggacaacctgcccaacacccagctggacctgctgggcaacgactacctggtgagcaagcaggtgaaggagtacagaatccaggagcccaacagagagaacagcttccacagcagcatcgaggccatctgggaggagtgcaaggagatcgtgaaggccagcagcaagaagagccaccagatcgaggagctggagcagcagatcgagaagctgcaggccgaggtgaagggctacaaggacgagaacaacagactgaaggagaaggagcacaagaaccaggacgacctgctgaaggagaaggagaccctgatccagcagctgaaggaggagctgcaggagaagaacgtgaccctggacgtgcagatccagcacgtggtggagggcaagagagccctgagcgagctgacccagggcgtgacctgctacaaggccaagatcaaggagctggagaccatcctggagacccagaaggtggagtgcagccacagcgccaagctggagcaggacatcctggagaaggagagcatcatcctgaagctggagagaaacctgaaggagttccaggagcacctgcaggacagcgtgaagaacaccaaggacctgaacgtgaaggagctgaagctgaaggaggagatcacccagctgaccaacaacctgcaggacatgaagcacctgctgcagctgaaggaggaggaggaggagaccaacagacaggagaccgagaagctgaaggaggagctgagcgccagcagcgccagaacccagaacctgaaggccgacctgcagagaaaggaggaggactacgccgacctgaaggagaagctgaccgacgccaagaagcagatcaagcaggtgcagaaggaggtgagcgtgatgagagacgaggacaagctgctgagaatcaagatcaacgagctggagaagaagaagaaccagtgcagccaggagctggacatgaagcagagaaccatccagcagctgaaggagcagctgaacaaccagaaggtggaggaggccatccagcagtacgagagagcctgcaaggacctgaacgtgaaggagaagatcatcgaggacatgagaatgaccctggaggagcaggagcagacccaggtggagcaggaccaggtgctggaggccaagctggaggaggtggagagactggccaccgagctggagaagtggaaggagaagtgcaacgacctggagaccaagaacaaccagagaagcaacaaggagcacgagaacaacaccgacgtgctgggcaagctgaccaacctgcaggacgagctgcaggagagcgagcagaagtacaacgccgacagaaagaagtggctggaggagaagatgatgctgatcacccaggccaaggaggccgagaacatcagaaacaaggagatgaagaagtacgccgaggacagagagagattcttcaagcagcagaacgagatggagatcctgaccgcccagctgaccgagaaggacagcgacctgcagaagtggagagaggagagagaccagctggtggccgccctggagatccagctgaaggccctgatcagcagcaacgtgcagaaggacaacgagatcgagcagctgaagagaatcatcagcgagaccagcaagatcgagacccagatcatggacatcaagcccaagagaatcagcagcgccgaccccgacaagctgcagaccgagcccctgagcaccagcttcgagatcagcagaaacaagatcgaggacggcagcgtggtgctggacagctgcgaggtgagcaccgagaacgaccagagcaccagattccccaagcccgagctggagatccagttcacccccctgcagcccaacaagatggccgtgaagcaccccggctgcaccacccccgtgaccgtgaagatccccaaggccagaaagagaaagagcaacgagatggaggagagcgccagccccccccccaaggagtgcagcagcagccccgccatggagcagagctggaaggagaacgacttcgacaagctgagagaggagggcttcagaagaagcaactacagcgagctgcaggaggagatccagaccaagggcaaggaggtggagaacttcgagaagaacctggactag

SEQ ID NO: 103529 - DNA, 5553 bp, Artificial Sequence
  derived and/or modified sequence
atggagagcaacttcaaccaggagggcgtgcccagacccagctacgtgttcagcgccgaccccatcgccagacccagcgagatcaacttcgacggcatcaagctggacctgagccacgagttcagcctggtggcccccaacaccgaggccaacagcttcgagagcaaggactacctgcaggtgtgcctgagaatcagacccttcacccagagcgagaaggagctggagagcgagggctgcgtgcacatcctggacagccagaccgtggtgctgaaggagccccagtgcatcctgggcagactgagcgagaagagcagcggccagatggcccagaagttcagcttcagcaaggtgttcggccccgccaccacccagaaggagttcttccagggctgcatcatgcagcccgtgaaggacctgctgaagggccagagcagactgatcttcacctacggcctgaccaacagcggcaagacctacaccttccagggcaccgaggagaacatcggcatcctgcccagaaccctgaacgtgctgttcgacagcctgcaggagagactgtacaccaagatgaacctgaagccccacagaagcagagagtacctgagactgagcagcgagcaggagaaggaggagatcgccagcaagagcgccctgctgagacagatcaaggaggtgaccgtgcacaacgacagcgacgacaccctgtacggcagcctgaccaacagcctgaacatcagcgagttcgaggagagcatcaaggactacgagcaggccaacctgaacatggccaacagcatcaagttcagcgtgtgggtgagcttcttcgagatctacaacgagtacatctacgacctgttcgtgcccgtgagcagcaagttccagaagagaaagatgctgagactgagccaggacgtgaagggctacagcttcatcaaggacctgcagtggatccaggtgagcgacagcaaggaggcctacagactgctgaagctgggcatcaagcaccagagcgtggccttcaccaagctgaacaacgccagcagcagaagccacagcatcttcaccgtgaagatcctgcagatcgaggacagcgagatgagcagagtgatcagagtgagcgagctgagcctgtgcgacctggccggcagcgagagaaccatgaagacccagaacgagggcgagagactgagagagaccggcaacatcaacaccagcctgctgaccctgggcaagtgcatcaacgtgctgaagaacagcgagaagagcaagttccagcagcacgtgcccttcagagagagcaagctgacccactacttccagagcttcttcaacggcaagggcaagatctgcatgatcgtgaacatcagccagtgctacctggcctacgacgagaccctgaacgtgctgaagttcagcgccatcgcccagaaggtgtgcgtgcccgacaccctgaacagcagccaggagaagctgttcggccccgtgaagagcagccaggacgtgagcctggacagcaacagcaacagcaagatcctgaacgtgaagagagccaccatcagctgggagaacagcctggaggacctgatggaggacgaggacctggtggaggagctggagaacgccgaggagacccagaacgtggagaccaagctgctggacgaggacctggacaagaccctggaggagaacaaggccttcatcagccacgaggagaagagaaagctgctggacctgatcgaggacctgaagaagaagctgatcaacgagaagaaggagaagctgaccctggagttcaagatcagagaggaggtgacccaggagttcacccagtactgggcccagagagaggccgacttcaaggagaccctgctgcaggagagagagatcctggaggagaacgccgagagaagactggccatcttcaaggacctggtgggcaagtgcgacaccagagaggaggccgccaaggacatctgcgccaccaaggtggagaccgaggagacccacaactacgtgggcttcgaggacatcatcgacagcctgcaggacaacgtggccgacatcaagaagcaggccgagatcgcccacctgtacatcgccagcctgcccgacccccaggaggccaccgcctgcctggagctgaagttcaaccagatcaaggccgagctggccaagaccaagggcgagctgatcaagaccaaggaggagctgaagaagagagagaacgagagcgacagcctgatccaggagctggagaccagcaacaagaagatcatcacccagaaccagagaatcaaggagctgatcaacatcatcgaccagaaggaggacaccatcaacgagttccagaacctgaagagccacatggagaacaccttcaagtgcaacgacaaggccgacaccagcagcctgatcatcaacaacaagctgatctgcaacgagaccgtggaggtgcccaaggacagcaagagcaagatctgcagcgagagaaagagagtgaacgagaacgagctgcagcaggacgagccccccgccaagaagggcaccaccagcgccgccagcagcagaagactgagaaagctgatcagcaagcccgtgaacagaaccagacagaccgagggccacagcctggtgagcatccacgtgagcagcgccatcaccgaggaccagaagaagagcgaggaggtgagacccaacatcgccgagatcgaggacatcagagtgctgcaggagaacaacgagggcctgagagccttcctgctgaccatcgagaacgagctgaagaacgagaaggaggagaaggccgagctgaacaagcagatcgtgcacttccagcaggagctgagcctgagcgagaagaagaacctgaccctgagcaaggaggtgcagcagatccagagcaactacgacatcgccatcgccgagctgcacgtgcagaagagcaagaaccaggagcaggaggagaagatcatgaagctgagcaacgagatcgagaccgccaccagaagcatcaccaacaacgtgagccagatcaagctgatgcacaccaagatcgacgagctgagaaccctggacagcgtgagccagatcagcaacatcgacctgctgaacctgagagacctgagcaacggcagcgaggaggacaacctgcccaacacccagctggacctgctgggcaacgactacctggtgagcaagcaggtgaaggagtacagaatccaggagcccaacagagagaacagcttccacagcagcatcgaggccatctgggaggagtgcaaggagatcgtgaaggccagcagcaagaagagccaccagatcgaggagctggagcagcagatcgagaagctgcaggccgaggtgaagggctacaaggacgagaacaacagactgaaggagaaggagcacaagaaccaggacgacctgctgaaggagaaggagaccctgatccagcagctgaaggaggagctgcaggagaagaacgtgaccctggacgtgcagatccagcacgtggtggagggcaagagagccctgagcgagctgacccagggcgtgacctgctacaaggccaagatcaaggagctggagaccatcctggagacccagaaggtggagtgcagccacagcgccaagctggagcaggacatcctggagaaggagagcatcatcctgaagctggagagaaacctgaaggagttccaggagcacctgcaggacagcgtgaagaacaccaaggacctgaacgtgaaggagctgaagctgaaggaggagatcacccagctgaccaacaacctgcaggacatgaagcacctgctgcagctgaaggaggaggaggaggagaccaacagacaggagaccgagaagctgaaggaggagctgagcgccagcagcgccagaacccagaacctgaaggccgacctgcagagaaaggaggaggactacgccgacctgaaggagaagctgaccgacgccaagaagcagatcaagcaggtgcagaaggaggtgagcgtgatgagagacgaggacaagctgctgagaatcaagatcaacgagctggagaagaagaagaaccagtgcagccaggagctggacatgaagcagagaaccatccagcagctgaaggagcagctgaacaaccagaaggtggaggaggccatccagcagtacgagagagcctgcaaggacctgaacgtgaaggagaagatcatcgaggacatgagaatgaccctggaggagcaggagcagacccaggtggagcaggaccaggtgctggaggccaagctggaggaggtggagagactggccaccgagctggagaagtggaaggagaagtgcaacgacctggagaccaagaacaaccagagaagcaacaaggagcacgagaacaacaccgacgtgctgggcaagctgaccaacctgcaggacgagctgcaggagagcgagcagaagtacaacgccgacagaaagaagtggctggaggagaagatgatgctgatcacccaggccaaggaggccgagaacatcagaaacaaggagatgaagaagtacgccgaggacagagagagattcttcaagcagcagaacgagatggagatcctgaccgcccagctgaccgagaaggacagcgacctgcagaagtggagagaggagagagaccagctggtggccgccctggagatccagctgaaggccctgatcagcagcaacgtgcagaaggacaacgagatcgagcagctgaagagaatcatcagcgagaccagcaagatcgagacccagatcatggacatcaagcccaagagaatcagcagcgccgaccccgacaagctgcagaccgagcccctgagcaccagcttcgagatcagcagaaacaagatcgaggacggcagcgtggtgctggacagctgcgaggtgagcaccgagaacgaccagagcaccagattccccaagcccgagctggagatccagttcacccccctgcagcccaacaagatggccgtgaagcaccccggctgcaccacccccgtgaccgtgaagatccccaaggccagaaagagaaagagcaacgagatggaggaggacctggtgaagtgcgagaacaagaagaacgccacccccagaaccaacctgaagttccccatcagcgacgacagaaacagcagcgtgaagaaggagcagaaggtggccatcagacccagcagcaagaagacctacagcctgagaagccaggccagcatcatcggcgtgaacctggccaccaagaagaaggagggcaccctgcagaagttcggcgacttcctgcagcacagccccagcatcctgcagagcaaggccaagaagatcatcgagaccatgagcagcagcaagctgagcaacgtggaggccagcaaggagaacgtgagccagcccaagagagccaagagaaagctgtacaccagcgagatcagcagccccatcgacatcagcggccaggtgatcctgatggaccagaagatgaaggagagcgaccaccagatcatcaagagaagactgagaaccaagaccgccaagtag

SEQ ID NO: 103530 - DNA, 5463 bp, Artificial Sequence
  derived and/or modified sequence
atggaatctaattttaatcaagaaggcgtgcctagacccagctacgtgttttccgccgatcctatagccagaccctctgaaatcaatttcgacggcattaagctggatctcagccatgagttcagcctggttgcccctaataccgaggccaacagtttcgaatctaaagactatctgcaggtgtgtcttaggatcaggccgttcacgcagtccgagaaggagttggagtccgagggctgcgtgcacatcctggactctcagaccgtcgtcctcaaagaaccacaatgtatcctcggacgattgagcgaaaagtcgagtggccagatggcgcaaaaattctcatttagtaaggtattcggccctgccactacacagaaggaattttttcaggggtgcattatgcagccagttaaggaccttctgaaaggacaaagccgactgatctttacttatggtctcaccaactcaggaaagacttacactttccagggaacagaggagaacattggaatcctccctaggacattgaatgtgttgttcgattctctccaagagaggctgtacacaaaaatgaacctgaagccccacagatccagggaatacctaagactgtccagtgaacaggagaaagaggagattgcatccaaatcggccctccttcggcagattaaggaggtgaccgtgcacaacgactctgacgatacactgtatggcagcctgacgaattccctgaacatttctgagtttgaggagtctatcaaagactacgaacaagcaaatctgaacatggccaactcaatcaagttctctgtttgggtgtctttcttcgagatatacaatgaatatatatatgatttattcgtgcccgtaagtagtaagtttcagaaacggaaaatgctgcggctgtcccaggatgtgaaaggctacagtttcattaaagatttacaatggatccaggttagtgatagcaaggaagcgtacaggctcctgaaactgggcatcaagcaccaatcagtcgcctttactaagctgaacaacgcctcctcgcgcagtcactccatttttacagttaagattctccaaatcgaagactccgagatgagtcgtgtgatcagggtgtctgaactctcactctgcgatcttgcaggcagcgaaagaacaatgaagacccagaacgagggcgagcgactgcgcgaaacgggtaatatcaataccagcctgctaacactgggcaagtgcattaacgtgctcaagaattcggaaaaaagcaaattccaacaacacgttccatttcgcgagagtaagctaactcactacttccaatcttttttcaacggtaaaggtaaaatttgcatgattgtgaatatatcccaatgttacctggcttacgacgaaaccctgaatgtgctgaagttttccgctatagcacagaaagtctgtgtcccggacacccttaatagctcacaggaaaaattgttcggacccgttaaaagctctcaagatgtgtcactggattcaaatagcaacagcaagatactgaacgtcaagagagcaaccatctcctgggagaattccctggaggacttaatggaagatgaggatctggtggaagagctagaaaacgcggaggagacacaaaacgttgagacaaaacttttggatgaggacctggacaagaccctagaagagaataaagctttcatctcacatgaagaaaagaggaaactgcttgatttaatcgaggacttaaaaaagaagctgatcaatgaaaagaaagagaagctcactctggagttcaaaatacgtgaggaagttactcaggaatttacacagtattgggcgcagcgggaggctgactttaaagaaaccttgctgcaggagcgagaaatcctggaggaaaatgccgagcgtcgtctggccatatttaaagacttggtggggaagtgtgacactagggaggaagccgccaaggacatctgtgccaccaaggtcgagaccgaggagactcataactacgtcggctttgaagatatcatcgacagcctgcaggataatgttgcagacattaaaaagcaagcggagatcgctcatctatacattgcctctttgcccgacccacaggaggccacagcatgcctggagctgaagtttaatcagatcaaagccgaattagccaagacaaagggtgaattgatcaaaactaaggaagaactgaagaagcgagaaaacgaaagtgatagcttgatccaggagttggagacatctaataagaaaatcatcactcagaatcaacggatcaaggaactgatcaatataatcgatcagaaggaggatactattaatgaatttcaaaatttgaagtcccacatggagaacaccttcaaatgcaacgacaaggccgacacctccagtctgattatcaataataagctgatttgtaatgagaccgtcgaggtcccaaaagattccaaaagcaaaatttgtagcgaacggaagcgggtcaacgaaaacgagctccagcaggacgaaccccccgccaagaagggctccatccatgtgtccagtgcaataaccgaagaccagaaaaagtcggaggaagtgagaccaaatatcgccgaaattgaggacatacgagtactgcaagaaaataacgagggcctccgcgctttcctgctcacaatcgaaaacgagctgaagaatgagaaggaggagaaagccgagctcaacaaacaaattgtccacttccagcaagagttgtctctgtcagagaagaagaacctgacactgtcaaaggaggtgcagcagatacagtccaattatgatatagctatcgccgaacttcacgttcagaaatccaaaaatcaggaacaggaggagaagatcatgaagctctcaaatgagatcgagacagccacccgatcaattaccaacaacgtaagccagataaagctaatgcacacaaaaattgacgaattgcgtacccttgactcagtgtctcagatttccaacattgacttactgaacctgcgcgatctgagcaacgggtctgaggaggataacctgccaaatacccagctggaccttctagggaatgactacctggtgagcaagcaagtcaaggaatacaggatccaagaacccaatagagaaaattccttccactccagtattgaggccatttgggaggagtgtaaggagatcgtgaaggcttcatccaagaaaagccaccagattgaagagctggaacagcagatcgagaagctgcaggcagaggtaaaggggtacaaggatgagaacaatcgcttgaaagaaaaagagcataaaaaccaggatgacctgctaaaagagaaagaaactctgattcagcaactaaaggaggagctccaagagaagaacgtgaccttagacgttcagattcagcatgtggtggagggaaagcgagctctgagtgagcttacacagggtgtgacctgctacaaggccaaaatcaaggaactggaaaccatcctggaaacacagaaggttgaatgtagtcactcggccaaactcgagcaggacattcttgagaaagagagcatcatccttaaactggaaaggaacctcaaggagttccaggaacatctgcaggatagcgtgaaaaataccaaagatttgaatgtgaaggaactcaaactgaaagaagagatcacgcagctgaccaacaatctccaggacatgaaacaccttttgcagctgaaagaagaagaggaggagactaaccgccaggagaccgagaagcttaaggaggagctgtctgcttcctccgctcgtacacagaacttgaaggctgacttgcagcggaaggaggaggattatgccgacctgaaggaaaagttgactgatgcaaagaaacagattaagcaagtacagaaggaggtctccgtcatgagggacgaagataagctgttgagaataaaaatcaacgagctggagaagaaaaagaaccagtgctcccaggagctggacatgaaacagcggactatccagcagctgaaagaacagctgaataaccagaaggttgaggaggcaatccaacagtacgaacgggcatgcaaagatctgaacgtcaaggaaaagatcattgaggatatgaggatgactctcgaagagcaggagcagacacaggttgaacaagatcaggtgctcgaggccaagttggaggaggtcgaacggctggcaacagagctggaaaaatggaaagagaagtgcaatgatctggaaaccaaaaacaatcaacgctcaaataaagaacatgagaacaatacagacgtgttagggaagttaactaatctgcaggatgagcttcaggagagtgagcagaagtataacgccgacaggaaaaaatggttggaagagaagatgatgctcatcacacaagccaaggaagcagaaaatataagaaacaaggaaatgaaaaagtatgcggaagaccgggaacgtttcttcaagcagcagaatgagatggaaattctgaccgctcagctaacagaaaaggattctgatctgcagaagtggagagaggagagggatcagcttgtggccgccctggagatacagttaaaggcgctcatttcttccaacgtacagaaagataacgagattgaacagttgaaaagaataatctccgaaacgtccaaaattgaaacacagataatggatatcaagccaaagcggatcagttcagcggatcctgacaagctccagacagagccgctgtctacctcatttgagatttctcggaataaaattgaggacgggtccgtggtccttgattcctgtgaggtgtcaaccgagaatgatcagagcacgcgattcccaaaaccagaacttgagattcaattcacccctctccagcccaataagatggccgtgaagcatcctggatgtacaactccagtgaccgtgaagattccaaaagctagaaagcggaagagcaatgagatggaggaggacttggttaagtgtgagaataagaagaacgctactccgcgcacaaatctgaaattccctatctctgacgatcgcaattctagcgtcaagaaggagcaaaaggtggctattaggccaagctccaaaaagacatattccctgaggagtcaagcctctatcattggcgtcaacttagcgactaaaaaaaaagagggcacactccagaaatttggagactttcttcaacacagcccctccatactccaatccaaagcgaaaaagattatcgagacgatgagctccagtaaacttagcaatgtggaagcaagcaaagagaatgtcagccagccgaagagggccaagaggaagctgtacacatccgaaatttcatctcccatcgacattagtggtcaggtgatactgatggaccagaagatgaaggaaagcgaccatcaaatcattaaacgtcgtctcaggacgaagaccgcgaagtag

SEQ ID NO: 103531 - DNA, 5169 bp, Artificial Sequence
  derived and/or modified sequence
atggagtctaatttcaaccaggaaggagttccccggccatcttacgtattcagtgccgatcctatcgccagacccagcgagatcaacttcgacggcattaagctagacctctcccacgagttctctcttgtagcgccaaatactgaagctaatagtttcgagtccaaagactacctgcaggtctgcctcaggataaggccttttactcagtccgaaaaggagctcgagtctgagggatgtgtgcacatattggattcacagactgtcgtgctcaaagaaccacaatgtatactgggacgcttgtctgaaaaatcctccggtcagatggcccagaaattttcctttagcaaagtgttcggacccgcaacgacccaaaaggaattttttcagggctgtataatgcagcctgtgaaggatctgctgaaaggacagtcccgattaatcttcacctacggcctgacaaacagtggtaagacttacactttccaggggaccgaggagaacattggcattctgccgaggacgcttaatgtgttgttcgatagtctccaggaaaggctttacaccaaaatgaacctgaaaccacaccgaagcagggaatatctgagactaagctcggagcaggagaaggaggaaattgccagcaagtcagctctactgagacaaataaaagaggttaccgtgcataacgactcggatgacaccctgtatggctctctgactaattccctgaacatttctgagtttgaagaatcaataaaggactacgaacaggccaacctgaatatggcaaacagcatcaagttcagtgtgtgggtgtctttttttgagatatacaacgaatacatatatgacctgttcgtaccggtgtcatcgaaattccagaagcgaaaaatgttaaggctgagtcaagatgttaaaggatacagttttattaaggatcttcaatggattcaggtttccgattccaaagaggcttaccgattgttgaaacttggcatcaagcatcagagcgtggcgtttacaaaactgaataatgcctcaagtcgcagccattctattttcaccgtgaagatactgcagatcgaggattccgagatgtctcgggttattcgagtttccgaacttagcctctgcgacttggctgggagtgaacggaccatgaagacccagaacgaaggcgaacggctcagggagactgggaacattaatacgagtctccttacacttgggaaatgtattaatgtcctaaagaattcagagaaatctaaattccagcagcacgtgcctttcagagagtctaagctgacccactactttcagagcttctttaacggaaagggaaaaatctgcatgattgttaatatctctcagtgctatctcgcctacgatgagaccctgaacgtcctaaaattttctgcgatagcgcagaaagtctgcgtgccggacaccctgaactcatcccaggagaagcttttcggccccgtcaagtcaagccaagatgtcagtttagactctaatagtaatagtaagattttaaacgtcaagcgggccaccatatcatgggaaaattcactcgaagatttgatggaggatgaagatctcgtggaagagctagagaatgccgaggagacacaaaatgtcgagaccaaactactggacgaggacttggataagacactcgaagagaacaaggcattcattagtcacgaagaaaaaaggaagcttctggacctgattgaggatctgaaaaagaagttgattaatgagaagaaggagaaattgactttagagttcaagatccgggaagaggtgacgcaggaatttacgcagtactgggcccagagagaggccgacttcaaggagacattgctccaggaaagagagattctggaagaaaacgccgaacggaggcttgccatcttcaaggacctggtgggaaaatgtgacactcgagaggaagccgctaaggatatttgcgcaacgaaggtggagactgaggaaacccacaactacgtcggttttgaagacatcattgattccttgcaggataatgtggcagatattaagaagcaggccgagattgcacacttatacattgctagcctgcccgatccacaggaagcaacagcatgtttggaattaaagtttaaccagattaaggccgagctagctaagactaaaggtgaactcattaaaaccaaggaagaattaaaaaagagagagaacgaaagcgacagcctcatccaggagcttgagaccagcaataaaaagattattacccaaaaccagagaatcaaagagttgattaacatcattgaccagaaggaagacactattaatgaattccagaacctcaaatcccacatggaaaacacctttaagtgtaacgacaaagcagacactagctccctgatcatcaataacaaactgatatgcaatgagacagtggaggtgccaaaagactccaaatcgaaaatctgcagtgaacgtaagcgtgtgaacgagaatgaattacagcaagacgaacctcccgccaagaagggcagtattcacgtgtcctctgccatcactgaagatcaaaagaagtccgaggaggtgcgtcccaatatcgcggagatagaagacattagggtcctgcaagagaataatgagggactgcgagccttccttttaaccatagaaaatgagctcaagaatgagaaagaagaaaaggcagagctcaacaaacagatcgtacactttcagcaggagctctcgttatcagagaaaaaaaacctgacactttcaaaagaagtgcagcagatccagtcaaactatgacattgcgatcgccgagttgcacgtgcaaaaatctaagaatcaggaacaagaggagaaaatcatgaaactctcgaatgagatcgagaccgcaaccagatcaattacaaacaacgtatcccagatcaaattgatgcacactaagattgacgagctgagaacactggactctgtctcccagatctcaaatatcgacctcctaaaccttcgagatcttagtaacggcagcgaggaagacaaccttcccaacacccagcttgacttgctcggaaatgactatttagtatctaaacaggttaaggagtatcgaatccaagaacctaaccgcgagaattcgttccattcatctattgaagctatctgggaggagtgcaaagaaatagtgaaggcaagctcaaagaagtcgcaccagatcgaagaactcgaacagcagatagaaaagttgcaggccgaggtcaaaggctataaggatgagaacaaccggctcaaagagaaggaacacaaaaatcaggatgacttgctgaaggaaaaggaaaccctgatccaacaacttaaggaggagctgcaggagaagaacgtgactctagacgtacaaatccagcacgtcgtcgaaggaaaacgcgccttatctgagctcacacaaggggtcacatgttacaaggccaagatcaaagagctggagaccatactggagacccaaaaagttgagtgctctcatagcgctaagcttgaacaggatattctggagaaagagagcatcattctgaagctggagcgcaacctgaaggaatttcaggagcaccttcaggacagcgtgaaaaacaccaaggacctgaacgtcaaagagcttaagctcaaggaagagatcactcagctaactaacaatctccaggacatgaagcatctgctacaattgaaagaggaagaagaagagacaaacagacaagaaacggagaaactgaaagaggaattgagcgcttcctctgcaagaacccaaaacctgaaggccgatttacaacggaaggaggaggactatgctgacctcaaagaaaagctgacagatgcgaagaagcagataaaacaggtccagaaggaagtgtccgttatgcgggatgaggataaactgctccggatcaagattaacgagttggagaagaaaaaaaatcaatgtagccaggagctggacatgaagcagcgcactattcagcagctgaaggagcagctgaacaaccagaaagtggaagaagcaattcagcagtatgagcgagcttgcaaagatctaaatgtaaaagaaaaaatcattgaggatatgcgcatgacactggaggagcaagagcagactcaggtggaacaggaccaagtcctggaggctaagttagaggaggtggagagactggccacggaattagaaaagtggaaggagaagtgcaatgacttagagactaagaataaccagcgttccaacaaagaacatgagaataatacggatgtgttggggaagctgaccaatctgcaggatgaactgcaggaaagcgaacagaaatacaatgctgaccgtaagaaatggttggaagaaaaaatgatgttaatcacccaagccaaggaagcagaaaatattcgcaataaggaaatgaaaaagtatgcggaggaccgggagcggttttttaagcagcagaacgagatggagatcctgacggcacagctcaccgaaaaggacagtgacctccagaagtggcgggaagaacgggaccaactggttgctgccctggagatacagctgaaagccctgatctcttccaacgtgcagaaggacaacgagatcgagcaacttaaacgcatcatcagcgagacttcaaagattgagacacaaatcatggacatcaaaccaaagagaatctcttccgcggaccccgataagctccagaccgaaccactgtccacctcctttgagatttctagaaacaagatcgaggacggtagcgtggtattggattcctgcgaagtgtccaccgaaaacgatcagtcaacaaggttccctaagcctgagttagagatacagtttactccactacagcccaacaagatggcagtcaagcacccagggtgcactactccagttactgtcaagatcccaaaagctcgcaagagaaaatctaatgaaatggaggagtctgcaagtcccccgcctaaagagtgctcatcgtcgcctgccatggagcagagctggaaagagaatgattttgacaagctacgcgaagagggctttaggcggtctaattactcggagttgcaagaggaaatacagacaaagggcaaagaagttgagaacttcgagaagaatcttgactag

SEQ ID NO: 103532 - DNA, 5553 bp, Artificial Sequence
  derived and/or modified sequence
atggagtctaatttcaaccaggagggggtcccccgtccctcatacgtctttagtgcagacccaatcgccagaccctctgagatcaacttcgacgggattaagctcgacttgtcgcacgagttttctttggttgctcctaatactgaggcgaactccttcgagagcaaagattatctccaggtatgccttaggataaggccatttacacagagtgagaaggagctcgaatctgaagggtgtgtccacattctggacagccagactgtggttctcaaggagccccaatgcattttagggcggctctcggagaagagttcaggccaaatggcccagaaattctccttctctaaagttttcgggccagcaacaacccagaaggaattcttccagggatgtattatgcagcctgtgaaagaccttctgaaaggccaatcccggcttatatttacatacggactgaccaatagtggcaagacgtacactttccagggtacagaagaaaatatcgggatcctgccccgtaccctgaatgtgctattcgactcactccaggaaaggctatacaccaaaatgaatttaaagccacaccgatctcgcgaatatctgaggttatcatcagagcaagagaaggaggagatcgcatctaaaagcgccctgctgcgccagatcaaagaggtcactgttcataacgactcagatgacactctgtatggctctctgaccaactcactgaacatcagcgagtttgaagagtccatcaaggattacgagcaggccaatctgaacatggcaaattccattaaattcagtgtgtgggtgagcttttttgaaatctacaatgaatacatatatgatttgtttgtccccgtgtcctctaaatttcaaaagcgtaaaatgctgagactcagccaggatgtcaaagggtacagcttcatcaaagatctccagtggatccaggtttccgattccaaggaggcctacagactcttgaaattagggattaagcaccaatctgtggctttcaccaaattaaacaacgcgtcttctcgcagtcacagcatattcaccgttaagatcttgcagattgaagattctgaaatgtccagagtcatccgtgtcagcgagctgagcctgtgtgaccttgccggctctgaaagaaccatgaagactcagaacgaaggggaaagacttcgagaaaccgggaatattaacacctctctgctaaccctaggaaagtgtattaacgtgctaaagaactcggaaaaatctaagtttcagcagcacgtgcctttcagagaaagtaagcttacccactactttcagtccttctttaatgggaagggcaagatctgtatgatcgtcaacattagccaatgctatctggcctacgatgaaacactcaatgtgcttaagttttctgctattgcccagaaagtgtgcgtgcctgatacactgaattcatcccaagaaaaactctttgggcccgtcaaaagctcccaggacgtttctctggactcgaatagcaactccaaaatcctgaatgtgaagagagcaaccatctcttgggagaacagtctcgaggatctcatggaggatgaagacctggtggaagagttagagaatgccgaagagacgcaaaacgtcgaaacaaagctcctcgatgaggacctggataagacactggaagaaaataaagccttcatttctcatgaggagaagcggaagctgcttgatctcatcgaggacttaaaaaaaaagttaattaatgagaagaaggaaaagctgaccctcgaatttaaaataagagaggaagttacccaggagttcacgcagtactgggcccagcgcgaagccgattttaaagaaactctcttacaggagcgtgagattctggaagagaatgccgagcggagactggcaatcttcaaggatctggtgggaaagtgtgatacccgagaagaagccgccaaagacatttgtgcaaccaaggtggaaaccgaagagacgcacaattatgtcggatttgaggatattatcgactcccttcaggacaacgtagccgacattaagaagcaggccgagatcgcccacctgtacatagcatcccttcccgacccccaggaagccaccgcctgtttagagctgaagttcaaccaaatcaaagctgagctagcaaaaaccaaaggggaactgattaaaacaaaggaagagctgaaaaagcgcgaaaatgagagcgactccctgatccaagaattagagacctctaataaaaaaataataactcaaaaccagcgcattaaggaacttataaacatcatcgatcaaaaggaggacacaatcaacgaattccagaatttgaagtctcatatggaaaacacctttaaatgcaatgacaaagcagacacctctagcctcatcatcaacaacaagctgatttgtaacgagacagtggaggtgcctaaagattctaagtctaaaatttgttccgagaggaagcgagttaatgaaaatgagctccagcaagacgaacctccagccaagaagggaaccaccagcgccgcgagttcaagacgcctgcggaagcttatttccaaacccgtcaataggacccgccagacagagggacactcactggtctcgatccatgtgtcttcagccattaccgaagaccaaaaaaagagtgaggaggttcgaccaaacattgcagagatagaggatattcgggtattgcaggaaaacaatgaggggctccgcgcattcctgctaactatcgaaaacgaactcaaaaacgaaaaagaagagaaggcggagctcaacaaacagattgtacattttcaacaagagctgtctctttctgagaaaaagaaccttaccttgtctaaagaagtgcagcagattcagtcaaattacgatatcgctatcgccgagctgcacgtccagaagtccaaaaaccaggaacaggaagaaaaaatcatgaaactctccaatgagattgagactgcaacacggtccataaccaataacgtgtctcagatcaagctgatgcatacaaaaatcgatgaactgaggactcttgatagcgtgagtcagatcagcaatatcgatttactgaacctaagagacctgtctaacgggagtgaagaagacaatctaccaaacactcagcttgacctccttggcaatgattatctggtcagtaagcaagtaaaggagtatcgcattcaggaacccaatagagagaactcttttcactctagtatcgaggccatttgggaggaatgtaaagagatcgtcaaggcgagctccaagaagagccatcagatcgaagagctagagcagcagatcgagaagctccaggccgaggtcaagggatacaaagatgagaacaatagactgaaggagaaagagcataagaatcaggatgacctgcttaaagaaaaggagacactgatccagcagctcaaagaagagctgcaagagaaaaatgtgactctggacgtacagattcaacacgtcgtggagggcaaaagggctctgtcagagctcacccagggggtgacctgctataaggcaaagatcaaagagctcgagactattttggagacacagaaggttgagtgcagccattccgccaaactagaacaagacattttggagaaggagtccatcatcctgaagcttgaacgcaatttaaaagagtttcaggagcacctacaagatagtgtgaaaaacaccaaggacctgaatgtcaaagaactgaagttgaaggaagagattacgcaactgacaaacaacctccaggacatgaagcacttgctacagttgaaagaagaggaggaggagacgaatcgccaagagacggaaaaattgaaagaggagctgtctgctagctccgcacgaacccagaacttgaaggctgatctgcagcggaaggaggaggattacgctgacctcaaagagaaactgactgatgctaaaaagcagatcaagcaggtgcagaaagaggtaagtgtaatgagagacgaggataagcttctgagaatcaaaattaacgaactggagaaaaaaaagaaccaatgttcccaagaactggacatgaaacagcgcaccattcagcaactgaaagagcagttgaacaaccaaaaggtcgaggaggccattcaacagtatgagcgcgcgtgtaaggacctgaacgtcaaggagaaaatcatagaggacatgcgaatgacgctggaagaacaggaacagacacaggtagagcaagaccaggtgttggaggccaaactggaggaggtcgaaagactggctactgaactagagaagtggaaagagaagtgtaacgatctggagacaaaaaataaccagcggtctaacaaggagcatgaaaataataccgatgttttagggaagctgacaaacctccaggatgagctgcaggagagcgagcaaaagtataacgccgacagaaaaaagtggctggaagaaaaaatgatgttaatcactcaagcgaaagaggcagaaaatatccgcaacaaggaaatgaagaagtacgccgaggaccgggagaggtttttcaaacagcagaatgagatggagattctgaccgcccagctcaccgaaaaggatagcgacctgcagaagtggcgggaagagcgagatcagttggtagcagccttggagatccagctgaaagccctgatctcttctaatgtgcagaaagataacgagatagagcaactgaaacgcataatctcagaaacgtccaagatcgagacacagataatggatataaagcctaagagaatcagttcggccgatcctgacaagctgcagactgagccactctctacatctttcgaaatttcccgcaacaagattgaggatggttcagtggtactggacagctgtgaagtttcaacagagaatgaccagagcacaaggtttcctaagcctgagcttgagatacagttcacaccattacagccgaacaaaatggccgttaagcatcctggatgtaccacacccgtcaccgtcaagatccctaaggctcggaaacgcaaatcgaatgagatggaggaggatcttgtcaagtgtgagaataaaaagaatgccaccccacggaccaacctcaagtttccaatatccgacgataggaactcatctgtgaagaaggaacagaaggtggctatcaggccctcgagtaaaaaaacatactctcttcggagtcaagcttcgatcatcggtgttaacctggctacaaagaaaaaggaggggactctgcagaagttcggagattttctacaacatagtccaagtatcctccagtctaaggcgaagaagatcattgagaccatgtcttctagcaaactgagtaacgttgaagcctccaaagaaaacgtctcacagccgaaaagagctaagaggaagttatacacctctgaaatttccagccctatagacatctctggccaagttattctgatggatcaaaagatgaaggaaagtgaccaccagattatcaaacgccggttgcgaacaaagaccgccaagtag

SEQ ID NO: 103533 - DNA, 6419 bp, Artificial Sequence
  derived and/or modified sequence
gaatttgaaaacggtaacatcgcagtgctgctcgcgggtctggctagtcaggcgaagtttgcagaatggaatctaattttaatcaagagggagtacctcgaccatcttatgtttttagtgctgacccaattgcaaggccttcagaaataaatttcgatggcattaagcttgatctgtctcatgaattttccttagttgctccaaatactgaggcaaacagtttcgaatctaaagattatctccaggtttgtcttcgaataagaccatttacacagtcagaaaaagaacttgagtctgagggctgtgtgcatattctggattcacagactgttgtgctgaaagagcctcaatgcatccttggtcggttaagtgaaaaaagctcagggcagatggcacagaaattcagtttttccaaggtttttggcccagcaactacacagaaggaattctttcagggttgcattatgcaaccagtaaaagacctcttgaaaggacagagtcgtctgatttttacttacgggctaaccaattcaggaaaaacatatacatttcaagggacagaagaaaatattggcattctgcctcgaactttgaatgtattatttgatagtcttcaagaaagactgtatacaaagatgaaccttaaaccacatagatccagagaatacttaaggttatcatcagaacaagagaaagaagaaattgctagcaaaagtgcattgcttcggcaaattaaagaggttactgtgcataatgatagtgatgatactctttatggaagtttaactaactctttgaatatctcagagtttgaagaatccataaaagattatgaacaagccaacttgaatatggctaatagtataaaattttctgtgtgggtttctttctttgaaatttacaatgaatatatttatgacttatttgttcctgtatcatctaaattccaaaagagaaagatgctgcgcctttcccaagacgtaaagggctattcttttataaaagatctacaatggattcaagtatctgattccaaagaagcctatagacttttaaaactaggaataaagcaccagagtgttgccttcacaaaattgaataatgcttccagtagaagtcacagcatattcactgttaaaatattacagattgaagattctgaaatgtctcgtgtaattcgagtcagtgaattatctttatgtgatcttgctggttcagaacgaactatgaagacacagaatgaaggtgaaaggttaagagagactgggaatatcaacacttctttattgactctgggaaagtgtattaacgtcttgaagaatagtgaaaagtcaaagtttcaacagcatgtgcctttccgggaaagtaaactgactcactattttcaaagtttttttaatggtaaagggaaaatttgtatgattgtcaatatcagccaatgttatttagcctatgatgaaacactcaatgtattgaagttctccgccattgcacaaaaagtttgtgtcccagacactttaaattcctctcaagagaaattatttggacctgtcaaatcttctcaagatgtatcactagacagtaattcaaacagtaaaatattaaatgtaaaaagagccaccatttcatgggaaaatagtctagaagatttgatggaagacgaggatttggttgaggagctagaaaacgctgaagaaactcaaaatgtggaaactaaacttcttgatgaagatctagataaaacattagaggaaaataaggctttcattagccacgaggagaaaagaaaactgttggacttaatagaagacttgaaaaaaaaactgataaatgaaaaaaaggaaaaattaaccttggaatttaaaattcgagaagaagttacacaggagtttactcagtattgggctcaacgggaagctgactttaaggagactctgcttcaagaacgagagatattagaagaaaatgctgaacgtcgtttggctatcttcaaggatttggttggtaaatgtgacactcgagaagaagcagcgaaagacatttgtgccacaaaagttgaaactgaagaaacacataattatgtaggatttgaagatattattgattctcttcaagataatgttgctgatattaagaaacaggctgaaattgctcacttatatattgcatctcttcctgacccccaggaagctactgcttgtttagaactaaagtttaatcaaattaaagctgaattagctaaaaccaaaggagaattaatcaaaaccaaagaagagttaaaaaagagagaaaatgaatcagattcattgattcaagagcttgagacatctaataagaaaataattacacagaatcaaagaattaaagaattgataaatataattgatcaaaaagaagatactatcaacgaatttcagaacctaaagtctcatatggaaaacacatttaaatgcaatgacaaggctgatacatcttctttaataataaacaataaattgatttgtaatgaaacagttgaagtacctaaggacagcaaatctaaaatctgttcagaaagaaaaagagtaaatgaaaatgaacttcagcaagatgaaccaccagcaaagaaagggtctatccatgttagttcagctatcactgaagaccaaaagaaaagtgaagaagtgcgaccgaacattgcagaaattgaagacatcagagttttacaagaaaataatgaaggactgagagcatttttactcactattgagaatgaacttaaaaatgaaaaggaagaaaaagcagaattaaataaacagattgttcattttcagcaggaactttctctttctgaaaaaaagaatttaactttaagtaaagaggtccaacaaattcagtcaaattatgatattgcaattgctgaattacatgtgcagaaaagtaaaaatcaagaacaggaggaaaagatcatgaaattgtcaaatgagatagaaactgctacaagaagcattacaaataatgtttcacaaataaaattaatgcacacgaaaatagacgaactacgtactcttgattcagtttctcagatttcaaacatagatttgctcaatctcagggatctgtcaaatggttctgaggaggataatttgccaaatacacagttagaccttttaggtaatgattatttggtaagtaagcaagttaaagaatatcgaattcaagaacccaatagggaaaattctttccactctagtattgaagctatttgggaagaatgtaaagagattgtgaaggcctcttccaaaaaaagtcatcagattgaggaactggaacaacaaattgaaaaattgcaggcagaagtaaaaggctataaggatgaaaacaatagactaaaggagaaggagcataaaaaccaagatgacctactaaaagaaaaagaaactcttatacagcagctgaaagaagaattgcaagaaaaaaatgttactcttgatgttcaaatacagcatgtagttgaaggaaagagagcgctttcagaacttacacaaggtgttacttgctataaggcaaaaataaaggaacttgaaacaattttagagactcagaaagttgaatgtagtcattcagccaagttagaacaagacattttggaaaaggaatctatcatcttaaagctagaaagaaatttgaaggaatttcaagaacatcttcaggattctgtcaaaaacaccaaagatttaaatgtaaaggaactcaagctgaaagaagaaatcacacagttaacaaataatttgcaagatatgaaacatttacttcaattaaaagaagaagaagaagaaaccaacaggcaagaaacagaaaaattgaaagaggaactctctgcaagctctgctcgtacccagaatctgaaagcagatcttcagaggaaggaagaagattatgctgacctgaaagagaaactgactgatgccaaaaagcagattaagcaagtacagaaagaggtatctgtaatgcgtgatgaggataaattactgaggattaaaattaatgaactggagaaaaagaaaaaccagtgttctcaggaattagatatgaaacagcgaaccattcagcaactcaaggagcagttaaataatcagaaagtggaagaagctatacaacagtatgagagagcatgcaaagatctaaatgttaaagagaaaataattgaagacatgcgaatgacactagaagaacaggaacaaactcaggtagaacaggatcaagtgcttgaggctaaattagaggaagttgaaaggctggccacagaattggaaaaatggaaggaaaaatgcaatgatttggaaaccaaaaacaatcaaaggtcaaataaagaacatgagaacaacacagatgtgcttggaaagctcactaatcttcaagatgagttacaggagtctgaacagaaatataatgctgatagaaagaaatggttagaagaaaaaatgatgcttatcactcaagcgaaagaagcagagaatatacgaaataaagagatgaaaaaatatgctgaggacagggagcgtttttttaagcaacagaatgaaatggaaatactgacagcccagctgacagagaaagatagtgaccttcaaaagtggcgagaagaacgagatcaactggttgcagctttagaaatacagctaaaagcactgatatccagtaatgtacagaaagataatgaaattgaacaactaaaaaggatcatatcagagacttctaaaatagaaacacaaatcatggatatcaagcccaaacgtattagttcagcagatcctgacaaacttcaaactgaacctctatcgacaagttttgaaatttccagaaataaaatagaggatggatctgtagtccttgactcttgtgaagtgtcaacagaaaatgatcaaagcactcgatttccaaaacctgagttagagattcaatttacacctttacagccaaacaaaatggcagtgaaacaccctggttgtaccacaccagtgacagttaagattcccaaggctcggaagaggaagagtaatgaaatggaggaggacttggtgaaatgtgaaaataagaagaatgctacacccagaactaatttgaaatttcctatttcagatgatagaaattcttctgtcaaaaaggaacaaaaggttgccatacgtccatcatctaagaaaacatattctttacggagtcaggcatccataattggtgtaaacctggccactaagaaaaaagaaggaacactacagaaatttggagacttcttacaacattctccctcaattcttcaatcaaaagcaaagaagataattgaaacaatgagctcttcaaagctctcaaatgtagaagcaagtaaagaaaatgtgtctcaaccaaaacgagccaaacggaaattatacacaagtgaaatttcatctcctattgatatatcaggccaagtgattttaatggaccagaaaatgaaggagagtgatcaccagattatcaaacgacgacttcgaacaaaaacagccaaataaatcacttatggaaatgtttaatataaattttatagtcatagtcattggaacttgcatcctgtattgtaaatataaatgtatatattatgcattaaatcactctgcatatagattgctgttttatacatagtataattttaattcaataaatgagtcaaaatttgtatatttttataaggcttttttataatagcttctttcaaactgtatttccctattatctcagacattggatcagtgaagatcctaggaaagaggctgttattctcatttattttgctatacaggatgtaataggtcaggtatttggtttacttatatttaacaatgtcttatgaattttttttactttatctgttatacaactgattttacatatctgtttggattatagctaggatttggagaataagtgtgtacagatcacaaaacatgtatatacattatttagaaaagatctcaagtctttaattagaatgtctcacttattttgtaaacattttgtgggtacatagtacatgtatatatttacggggtatgtgagatgttttgacacaggcatgcaatgtgaaatacgtgtatcatggagaatgaggtatccatcccctcaagcatttttcctttgaattacagataatccaattacattctttagatcatttaaaaatatacaagtaagttattattgattatagtcactctattgtgctatcagatagtagatcattctttttatcttatttgtttttgtacccattaaccatccccacctccccctgcaaccgtcagtacccttaccagccactggtaaccattcttctactctgtatgcccatgaggtcaattgattttatttttagatcccataaataaatgagaacatgcagtctt

SEQ ID NO: 103534 - DNA, 5463 bp, Artificial Sequence
  derived and/or modified sequence
atggagagcaacttcaaccaggagggcgtgccccggcccagctatgtgttttctgctgaccccatcgcccggcccagcgagatcaactttgatggcatcaagctggacctgagccatgagttcagcctggtggcccccaacacagaggccaacagctttgagagcaaggactacctgcaggtgtgcctgcgcatccggcccttcacccagagcgagaaggagctggagagcgagggctgtgtgcacatcctggacagccagacagtggtgctgaaggagccccagtgcatcctgggccgcctgtctgagaagagcagcggccagatggcccagaagttctccttcagcaaggtgtttggacctgccaccacccagaaggagttcttccagggctgcatcatgcagcctgtgaaggacctgctgaagggccagagccgcctcatcttcacctacggcctgaccaacagcggcaagacctacaccttccagggcacagaagaaaatattggcatcctgcccaggaccctgaatgtgctgtttgacagcctgcaggagcggctgtacaccaagatgaacctgaagccccacaggagccgggagtacctgcggctgagcagcgagcaggagaaggaggagatcgccagcaagagcgccctgctgcggcagatcaaggaggtgacagtgcacaatgacagtgatgacaccctgtatggcagcctgaccaacagcctgaacatcagcgagtttgaggagagcatcaaggactatgagcaggccaacctgaacatggccaacagcatcaagttctctgtgtgggtgtccttctttgagatctacaatgagtacatctatgacctgtttgtgcctgtgagcagcaagttccagaagaggaagatgctgcggctgagccaggatgtgaagggctacagcttcatcaaggacctgcagtggatccaggtgtctgacagcaaggaggcctaccgcctgctgaagctgggcatcaagcaccagagcgtggccttcaccaagctgaacaatgccagcagccgcagccacagcatcttcaccgtgaagatcctgcagattgaagattctgagatgagcagggtcatccgggtgtctgagctgagcctgtgtgacctggccggcagcgagaggaccatgaagacccagaatgaaggagagcggctgcgggagaccggcaacatcaacaccagcctgctgaccctgggcaagtgcatcaacgtgctgaagaacagcgagaagagcaagttccagcagcacgtgcccttccgggagagcaagctgacccactacttccagagcttcttcaacgggaagggcaagatctgcatgattgtgaacatcagccagtgctacctggcctatgatgagaccctgaatgtgctgaagttcagcgccatcgcccagaaggtgtgtgtgcctgacaccctgaacagcagccaggagaagctgtttggacctgtgaagagcagccaggatgtgtccctggacagcaacagcaacagcaagatcctgaatgtgaagagggccaccatctcctgggagaacagcctggaggacctgatggaggatgaggacctggtggaggagctggagaatgctgaggagacccagaatgtggagaccaagctgctggatgaggacctggacaagaccctggaggagaacaaggccttcatcagccatgaggagaagaggaagctgctggacctgattgaggacctgaagaagaagctgatcaatgagaagaaggagaagctgaccctggagttcaagatccgggaggaggtgacccaggagttcacccagtactgggcccagcgggaggccgacttcaaggagaccctgctgcaggagcgggagatcctggaggagaatgctgagcggcggctggccatcttcaaggacctggtgggcaaatgtgacacccgggaggaggccgccaaggacatctgtgccaccaaggtggagacagaggagacccacaactacgtgggctttgaggacatcatcgacagcctgcaggacaacgtggccgacatcaagaagcaggccgagatcgcccacctgtacatcgccagcctgcctgacccccaggaggccacagcctgcctggagctgaagttcaaccagatcaaggccgagctggccaagaccaagggggagctgatcaagaccaaggaggagctgaagaagcgggagaatgaaagtgacagcctcatccaggagctggagaccagcaacaagaagatcatcacccagaaccagaggatcaaggagctgatcaacatcatcgaccagaaggaggacaccatcaatgagttccagaacctgaagagccacatggagaacaccttcaagtgcaatgacaaggctgacaccagcagcctcatcatcaacaacaagctgatctgcaatgagaccgtggaggtgcccaaggacagcaagagcaagatctgcagcgagaggaagagggtgaatgaaaatgagctgcagcaggatgagcccccagccaagaagggcagcatccacgtgtcctctgccatcacagaggaccagaagaagtctgaggaggtgcggcccaacattgctgagattgaggacatccgggtgctgcaggagaacaatgaaggcctgcgggccttcctgctgaccattgaaaatgagctgaagaatgagaaggaggagaaggccgagctgaacaagcagatcgtgcacttccagcaggagctgagcctgtctgagaagaagaacctgaccctgagcaaggaggtgcagcagatccagagcaactatgacatcgccatcgccgagctgcacgtgcagaagagcaagaaccaggagcaggaggagaagatcatgaagctgagcaatgaaattgaaacagccaccaggagcatcaccaacaacgtgtcccagatcaagctgatgcacaccaagattgatgagctgcggaccctggacagcgtgtcccagatcagcaacatcgacctgctgaacctgcgggacctgagcaatggcagcgaggaggacaacctgcccaacacccagctggacctgctgggcaatgactacctggtgtccaagcaggtgaaggagtaccgcatccaggagcccaaccgggagaacagcttccacagcagcattgaggccatctgggaggagtgcaaggagatcgtgaaggccagcagcaagaagagccaccagatcgaggagctggagcagcagatcgagaagctgcaggccgaggtgaagggctacaaggatgagaacaaccggctgaaggagaaggagcacaagaaccaggatgacctgctgaaggagaaggagaccctcatccagcagctgaaggaggagctgcaggagaagaatgtgaccctggatgtgcagatccagcacgtggtggagggcaagagggccctgtctgagctgacccagggcgtgacctgctacaaggccaagatcaaggagctggagaccatcctggagacccagaaggtggagtgcagccacagcgccaagctggagcaggacatcctggagaaggagagcatcatcctgaagctggagaggaacctgaaggagttccaggagcacctgcaggacagcgtgaagaacaccaaggacctgaatgtgaaggagctgaagctgaaggaggagatcacccagctgaccaacaacctgcaggacatgaagcacctgctgcagctgaaggaggaggaggaggagaccaaccggcaggagacagagaagctgaaggaggagctgagcgccagcagcgcccggacccagaacctgaaggctgacctgcagaggaaggaggaggactatgctgacctgaaggagaagctgacagatgccaagaagcagatcaagcaggtgcagaaggaggtgtctgtgatgagagatgaggacaagctgctgcgcatcaagatcaatgagctggagaagaagaagaaccagtgcagccaggagctggacatgaagcagaggaccatccagcagctgaaggagcagctgaacaaccagaaggtggaggaggccatccagcagtatgaaagagcctgcaaggacctgaatgtgaaggagaagatcatcgaggacatgaggatgaccctggaggagcaggagcagacccaggtggagcaggaccaggtgctggaggccaagctggaggaggtggagcggctggccacagagctggagaagtggaaggagaagtgcaatgacctggagaccaagaacaaccagaggagcaacaaggagcacgagaacaacacagatgtgctgggcaagctgaccaacctgcaggatgagctgcaggagagcgagcagaagtacaatgctgacaggaagaagtggctggaggagaagatgatgctgatcacccaggccaaggaggccgagaacatccggaacaaggagatgaagaagtatgcagaagatcgggagcgcttcttcaagcagcagaatgagatggagatcctgacagcccagctgacagagaaggacagcgacctgcagaagtggagggaggagcgggaccagctggtggccgccctggagatccagctgaaggccctgatcagcagcaatgtgcagaaggacaatgaaattgagcagctgaagaggatcatcagcgagaccagcaagattgagacccagatcatggacatcaagcccaagaggatcagcagcgctgaccctgacaagctgcagacagagcccctgagcaccagctttgagatcagcaggaacaagattgaagatggctctgtggtgctggacagctgtgaggtgtccacagaaaatgaccagagcacccgcttccccaagccagagctggagatccagttcacccccctgcagcccaacaagatggctgtgaagcaccctggctgcaccacccctgtgacagtgaagatccccaaggccaggaagaggaagagcaatgagatggaggaggacctggtgaagtgtgagaacaagaagaatgccacccccaggaccaacctgaagttccccatcagtgatgacaggaacagctctgtgaagaaggagcagaaggtggccatccggcccagcagcaagaagacctacagcctgcggagccaggccagcatcattggagtgaacctggccaccaagaagaaggagggcaccctgcagaagtttggagacttcctgcagcacagccccagcatcctgcagagcaaggccaagaagatcatcgagaccatgagcagcagcaagctgagcaatgtggaggccagcaaagaaaatgtgtcccagcccaagagggccaagaggaagctgtacaccagcgagatcagcagccccatcgacatcagcggccaggtgatcctgatggaccagaagatgaaggagagtgaccaccagatcatcaagaggcggctgcggaccaagacagccaagtag

SEQ ID NO: 103535 - DNA, 5169 bp, Artificial Sequence
  derived and/or modified sequence
atggagagcaacttcaaccaggagggcgtgccccggcccagctatgtgttttctgctgaccccatcgcccggcccagcgagatcaactttgatggcatcaagctggacctgagccatgagttcagcctggtggcccccaacacagaggccaacagctttgagagcaaggactacctgcaggtgtgcctgcgcatccggcccttcacccagagcgagaaggagctggagagcgagggctgtgtgcacatcctggacagccagacagtggtgctgaaggagccccagtgcatcctgggccgcctgtctgagaagagcagcggccagatggcccagaagttctccttcagcaaggtgtttggacctgccaccacccagaaggagttcttccagggctgcatcatgcagcctgtgaaggacctgctgaagggccagagccgcctcatcttcacctacggcctgaccaacagcggcaagacctacaccttccagggcacagaagaaaatattggcatcctgcccaggaccctgaatgtgctgtttgacagcctgcaggagcggctgtacaccaagatgaacctgaagccccacaggagccgggagtacctgcggctgagcagcgagcaggagaaggaggagatcgccagcaagagcgccctgctgcggcagatcaaggaggtgacagtgcacaatgacagtgatgacaccctgtatggcagcctgaccaacagcctgaacatcagcgagtttgaggagagcatcaaggactatgagcaggccaacctgaacatggccaacagcatcaagttctctgtgtgggtgtccttctttgagatctacaatgagtacatctatgacctgtttgtgcctgtgagcagcaagttccagaagaggaagatgctgcggctgagccaggatgtgaagggctacagcttcatcaaggacctgcagtggatccaggtgtctgacagcaaggaggcctaccgcctgctgaagctgggcatcaagcaccagagcgtggccttcaccaagctgaacaatgccagcagccgcagccacagcatcttcaccgtgaagatcctgcagattgaagattctgagatgagcagggtcatccgggtgtctgagctgagcctgtgtgacctggccggcagcgagaggaccatgaagacccagaatgaaggagagcggctgcgggagaccggcaacatcaacaccagcctgctgaccctgggcaagtgcatcaacgtgctgaagaacagcgagaagagcaagttccagcagcacgtgcccttccgggagagcaagctgacccactacttccagagcttcttcaacgggaagggcaagatctgcatgattgtgaacatcagccagtgctacctggcctatgatgagaccctgaatgtgctgaagttcagcgccatcgcccagaaggtgtgtgtgcctgacaccctgaacagcagccaggagaagctgtttggacctgtgaagagcagccaggatgtgtccctggacagcaacagcaacagcaagatcctgaatgtgaagagggccaccatctcctgggagaacagcctggaggacctgatggaggatgaggacctggtggaggagctggagaatgctgaggagacccagaatgtggagaccaagctgctggatgaggacctggacaagaccctggaggagaacaaggccttcatcagccatgaggagaagaggaagctgctggacctgattgaggacctgaagaagaagctgatcaatgagaagaaggagaagctgaccctggagttcaagatccgggaggaggtgacccaggagttcacccagtactgggcccagcgggaggccgacttcaaggagaccctgctgcaggagcgggagatcctggaggagaatgctgagcggcggctggccatcttcaaggacctggtgggcaaatgtgacacccgggaggaggccgccaaggacatctgtgccaccaaggtggagacagaggagacccacaactacgtgggctttgaggacatcatcgacagcctgcaggacaacgtggccgacatcaagaagcaggccgagatcgcccacctgtacatcgccagcctgcctgacccccaggaggccacagcctgcctggagctgaagttcaaccagatcaaggccgagctggccaagaccaagggggagctgatcaagaccaaggaggagctgaagaagcgggagaatgaaagtgacagcctcatccaggagctggagaccagcaacaagaagatcatcacccagaaccagaggatcaaggagctgatcaacatcatcgaccagaaggaggacaccatcaatgagttccagaacctgaagagccacatggagaacaccttcaagtgcaatgacaaggctgacaccagcagcctcatcatcaacaacaagctgatctgcaatgagaccgtggaggtgcccaaggacagcaagagcaagatctgcagcgagaggaagagggtgaatgaaaatgagctgcagcaggatgagcccccagccaagaagggcagcatccacgtgtcctctgccatcacagaggaccagaagaagtctgaggaggtgcggcccaacattgctgagattgaggacatccgggtgctgcaggagaacaatgaaggcctgcgggccttcctgctgaccattgaaaatgagctgaagaatgagaaggaggagaaggccgagctgaacaagcagatcgtgcacttccagcaggagctgagcctgtctgagaagaagaacctgaccctgagcaaggaggtgcagcagatccagagcaactatgacatcgccatcgccgagctgcacgtgcagaagagcaagaaccaggagcaggaggagaagatcatgaagctgagcaatgaaattgaaacagccaccaggagcatcaccaacaacgtgtcccagatcaagctgatgcacaccaagattgatgagctgcggaccctggacagcgtgtcccagatcagcaacatcgacctgctgaacctgcgggacctgagcaatggcagcgaggaggacaacctgcccaacacccagctggacctgctgggcaatgactacctggtgtccaagcaggtgaaggagtaccgcatccaggagcccaaccgggagaacagcttccacagcagcattgaggccatctgggaggagtgcaaggagatcgtgaaggccagcagcaagaagagccaccagatcgaggagctggagcagcagatcgagaagctgcaggccgaggtgaagggctacaaggatgagaacaaccggctgaaggagaaggagcacaagaaccaggatgacctgctgaaggagaaggagaccctcatccagcagctgaaggaggagctgcaggagaagaatgtgaccctggatgtgcagatccagcacgtggtggagggcaagagggccctgtctgagctgacccagggcgtgacctgctacaaggccaagatcaaggagctggagaccatcctggagacccagaaggtggagtgcagccacagcgccaagctggagcaggacatcctggagaaggagagcatcatcctgaagctggagaggaacctgaaggagttccaggagcacctgcaggacagcgtgaagaacaccaaggacctgaatgtgaaggagctgaagctgaaggaggagatcacccagctgaccaacaacctgcaggacatgaagcacctgctgcagctgaaggaggaggaggaggagaccaaccggcaggagacagagaagctgaaggaggagctgagcgccagcagcgcccggacccagaacctgaaggctgacctgcagaggaaggaggaggactatgctgacctgaaggagaagctgacagatgccaagaagcagatcaagcaggtgcagaaggaggtgtctgtgatgagagatgaggacaagctgctgcgcatcaagatcaatgagctggagaagaagaagaaccagtgcagccaggagctggacatgaagcagaggaccatccagcagctgaaggagcagctgaacaaccagaaggtggaggaggccatccagcagtatgaaagagcctgcaaggacctgaatgtgaaggagaagatcatcgaggacatgaggatgaccctggaggagcaggagcagacccaggtggagcaggaccaggtgctggaggccaagctggaggaggtggagcggctggccacagagctggagaagtggaaggagaagtgcaatgacctggagaccaagaacaaccagaggagcaacaaggagcacgagaacaacacagatgtgctgggcaagctgaccaacctgcaggatgagctgcaggagagcgagcagaagtacaatgctgacaggaagaagtggctggaggagaagatgatgctgatcacccaggccaaggaggccgagaacatccggaacaaggagatgaagaagtatgcagaagatcgggagcgcttcttcaagcagcagaatgagatggagatcctgacagcccagctgacagagaaggacagcgacctgcagaagtggagggaggagcgggaccagctggtggccgccctggagatccagctgaaggccctgatcagcagcaatgtgcagaaggacaatgaaattgagcagctgaagaggatcatcagcgagaccagcaagattgagacccagatcatggacatcaagcccaagaggatcagcagcgctgaccctgacaagctgcagacagagcccctgagcaccagctttgagatcagcaggaacaagattgaagatggctctgtggtgctggacagctgtgaggtgtccacagaaaatgaccagagcacccgcttccccaagccagagctggagatccagttcacccccctgcagcccaacaagatggctgtgaagcaccctggctgcaccacccctgtgacagtgaagatccccaaggccaggaagaggaagagcaatgagatggaggagagcgccagccccccacccaaggaatgtagcagcagccctgccatggagcagagctggaaggaaaatgactttgacaagctgcgggaggagggcttccgccgcagcaactacagcgagctgcaggaggagatccagaccaagggcaaggaggtggagaactttgagaagaacctggactag

SEQ ID NO: 103536 - DNA, 5553 bp, Artificial Sequence
  derived and/or modified sequence
atggagagcaacttcaaccaggagggcgtgccccggcccagctatgtgttttctgctgaccccatcgcccggcccagcgagatcaactttgatggcatcaagctggacctgagccatgagttcagcctggtggcccccaacacagaggccaacagctttgagagcaaggactacctgcaggtgtgcctgcgcatccggcccttcacccagagcgagaaggagctggagagcgagggctgtgtgcacatcctggacagccagacagtggtgctgaaggagccccagtgcatcctgggccgcctgtctgagaagagcagcggccagatggcccagaagttctccttcagcaaggtgtttggacctgccaccacccagaaggagttcttccagggctgcatcatgcagcctgtgaaggacctgctgaagggccagagccgcctcatcttcacctacggcctgaccaacagcggcaagacctacaccttccagggcacagaagaaaatattggcatcctgcccaggaccctgaatgtgctgtttgacagcctgcaggagcggctgtacaccaagatgaacctgaagccccacaggagccgggagtacctgcggctgagcagcgagcaggagaaggaggagatcgccagcaagagcgccctgctgcggcagatcaaggaggtgacagtgcacaatgacagtgatgacaccctgtatggcagcctgaccaacagcctgaacatcagcgagtttgaggagagcatcaaggactatgagcaggccaacctgaacatggccaacagcatcaagttctctgtgtgggtgtccttctttgagatctacaatgagtacatctatgacctgtttgtgcctgtgagcagcaagttccagaagaggaagatgctgcggctgagccaggatgtgaagggctacagcttcatcaaggacctgcagtggatccaggtgtctgacagcaaggaggcctaccgcctgctgaagctgggcatcaagcaccagagcgtggccttcaccaagctgaacaatgccagcagccgcagccacagcatcttcaccgtgaagatcctgcagattgaagattctgagatgagcagggtcatccgggtgtctgagctgagcctgtgtgacctggccggcagcgagaggaccatgaagacccagaatgaaggagagcggctgcgggagaccggcaacatcaacaccagcctgctgaccctgggcaagtgcatcaacgtgctgaagaacagcgagaagagcaagttccagcagcacgtgcccttccgggagagcaagctgacccactacttccagagcttcttcaacgggaagggcaagatctgcatgattgtgaacatcagccagtgctacctggcctatgatgagaccctgaatgtgctgaagttcagcgccatcgcccagaaggtgtgtgtgcctgacaccctgaacagcagccaggagaagctgtttggacctgtgaagagcagccaggatgtgtccctggacagcaacagcaacagcaagatcctgaatgtgaagagggccaccatctcctgggagaacagcctggaggacctgatggaggatgaggacctggtggaggagctggagaatgctgaggagacccagaatgtggagaccaagctgctggatgaggacctggacaagaccctggaggagaacaaggccttcatcagccatgaggagaagaggaagctgctggacctgattgaggacctgaagaagaagctgatcaatgagaagaaggagaagctgaccctggagttcaagatccgggaggaggtgacccaggagttcacccagtactgggcccagcgggaggccgacttcaaggagaccctgctgcaggagcgggagatcctggaggagaatgctgagcggcggctggccatcttcaaggacctggtgggcaaatgtgacacccgggaggaggccgccaaggacatctgtgccaccaaggtggagacagaggagacccacaactacgtgggctttgaggacatcatcgacagcctgcaggacaacgtggccgacatcaagaagcaggccgagatcgcccacctgtacatcgccagcctgcctgacccccaggaggccacagcctgcctggagctgaagttcaaccagatcaaggccgagctggccaagaccaagggggagctgatcaagaccaaggaggagctgaagaagcgggagaatgaaagtgacagcctcatccaggagctggagaccagcaacaagaagatcatcacccagaaccagaggatcaaggagctgatcaacatcatcgaccagaaggaggacaccatcaatgagttccagaacctgaagagccacatggagaacaccttcaagtgcaatgacaaggctgacaccagcagcctcatcatcaacaacaagctgatctgcaatgagaccgtggaggtgcccaaggacagcaagagcaagatctgcagcgagaggaagagggtgaatgaaaatgagctgcagcaggatgagcccccagccaagaagggcaccaccagcgctgccagcagccggcggctgaggaagctgatcagcaagcctgtgaacagaacccggcagacagagggccacagcctggtgtccatccacgtgtcctctgccatcacagaggaccagaagaagtctgaggaggtgcggcccaacattgctgagattgaggacatccgggtgctgcaggagaacaatgaaggcctgcgggccttcctgctgaccattgaaaatgagctgaagaatgagaaggaggagaaggccgagctgaacaagcagatcgtgcacttccagcaggagctgagcctgtctgagaagaagaacctgaccctgagcaaggaggtgcagcagatccagagcaactatgacatcgccatcgccgagctgcacgtgcagaagagcaagaaccaggagcaggaggagaagatcatgaagctgagcaatgaaattgaaacagccaccaggagcatcaccaacaacgtgtcccagatcaagctgatgcacaccaagattgatgagctgcggaccctggacagcgtgtcccagatcagcaacatcgacctgctgaacctgcgggacctgagcaatggcagcgaggaggacaacctgcccaacacccagctggacctgctgggcaatgactacctggtgtccaagcaggtgaaggagtaccgcatccaggagcccaaccgggagaacagcttccacagcagcattgaggccatctgggaggagtgcaaggagatcgtgaaggccagcagcaagaagagccaccagatcgaggagctggagcagcagatcgagaagctgcaggccgaggtgaagggctacaaggatgagaacaaccggctgaaggagaaggagcacaagaaccaggatgacctgctgaaggagaaggagaccctcatccagcagctgaaggaggagctgcaggagaagaatgtgaccctggatgtgcagatccagcacgtggtggagggcaagagggccctgtctgagctgacccagggcgtgacctgctacaaggccaagatcaaggagctggagaccatcctggagacccagaaggtggagtgcagccacagcgccaagctggagcaggacatcctggagaaggagagcatcatcctgaagctggagaggaacctgaaggagttccaggagcacctgcaggacagcgtgaagaacaccaaggacctgaatgtgaaggagctgaagctgaaggaggagatcacccagctgaccaacaacctgcaggacatgaagcacctgctgcagctgaaggaggaggaggaggagaccaaccggcaggagacagagaagctgaaggaggagctgagcgccagcagcgcccggacccagaacctgaaggctgacctgcagaggaaggaggaggactatgctgacctgaaggagaagctgacagatgccaagaagcagatcaagcaggtgcagaaggaggtgtctgtgatgagagatgaggacaagctgctgcgcatcaagatcaatgagctggagaagaagaagaaccagtgcagccaggagctggacatgaagcagaggaccatccagcagctgaaggagcagctgaacaaccagaaggtggaggaggccatccagcagtatgaaagagcctgcaaggacctgaatgtgaaggagaagatcatcgaggacatgaggatgaccctggaggagcaggagcagacccaggtggagcaggaccaggtgctggaggccaagctggaggaggtggagcggctggccacagagctggagaagtggaaggagaagtgcaatgacctggagaccaagaacaaccagaggagcaacaaggagcacgagaacaacacagatgtgctgggcaagctgaccaacctgcaggatgagctgcaggagagcgagcagaagtacaatgctgacaggaagaagtggctggaggagaagatgatgctgatcacccaggccaaggaggccgagaacatccggaacaaggagatgaagaagtatgcagaagatcgggagcgcttcttcaagcagcagaatgagatggagatcctgacagcccagctgacagagaaggacagcgacctgcagaagtggagggaggagcgggaccagctggtggccgccctggagatccagctgaaggccctgatcagcagcaatgtgcagaaggacaatgaaattgagcagctgaagaggatcatcagcgagaccagcaagattgagacccagatcatggacatcaagcccaagaggatcagcagcgctgaccctgacaagctgcagacagagcccctgagcaccagctttgagatcagcaggaacaagattgaagatggctctgtggtgctggacagctgtgaggtgtccacagaaaatgaccagagcacccgcttccccaagccagagctggagatccagttcacccccctgcagcccaacaagatggctgtgaagcaccctggctgcaccacccctgtgacagtgaagatccccaaggccaggaagaggaagagcaatgagatggaggaggacctggtgaagtgtgagaacaagaagaatgccacccccaggaccaacctgaagttccccatcagtgatgacaggaacagctctgtgaagaaggagcagaaggtggccatccggcccagcagcaagaagacctacagcctgcggagccaggccagcatcattggagtgaacctggccaccaagaagaaggagggcaccctgcagaagtttggagacttcctgcagcacagccccagcatcctgcagagcaaggccaagaagatcatcgagaccatgagcagcagcaagctgagcaatgtggaggccagcaaagaaaatgtgtcccagcccaagagggccaagaggaagctgtacaccagcgagatcagcagccccatcgacatcagcggccaggtgatcctgatggaccagaagatgaaggagagtgaccaccagatcatcaagaggcggctgcggaccaagacagccaagtag

SEQ ID NO: 103537 - DNA, 5241 bp, Artificial Sequence
  derived and/or modified sequence
attgtttgaatttgaaaacggtaacatcgcagtgctgctcgcgggtctggctagtcaggcgaagtttgcagaatggaatctaattttaatcaagagggagtacctcgaccatcttatgtttttagtgctgacccaattgcaaggccttcagaaataaatttcgatggcattaagcttgatctgtctcatgaattttccttagttgctccaaatactgaggcaaacagtttcgaatctaaagattatctccaggtttgtcttcgaataagaccatttacacagtcagaaaaagaacttgagtctgagggctgtgtgcatattctggattcacagactgttgtgctgaaagagcctcaatgcatccttggtcggttaagtgaaaaaagctcagggcagatggcacagaaattcagtttttccaaggtttttggcccagcaactacacagaaggaattctttcagggttgcattatgcaaccagtaaaagacctcttgaaaggacagagtcgtctgatttttacttacgggctaaccaattcaggaaaaacatatacatttcaagggacagaagaaaatattggcattctgcctcgaactttgaatgtattatttgatagtcttcaagaaagactgtatacaaagatgaaccttaaaccacatagatccagagaatacttaaggttatcatcagaacaagagaaagaagaaattgctagcaaaagtgcattgcttcggcaaattaaagaggttactgtgcataatgatagtgatgatactctttatggaagtttaactaactctttgaatatctcagagtttgaagaatccataaaagattatgaacaagccaacttgaatatggctaatagtataaaattttctgtgtgggtttctttctttgaaatttacaatgaatatatttatgacttatttgttcctgtatcatctaaattccaaaagagaaagatgctgcgcctttcccaagacgtaaagggctattcttttataaaagatctacaatggattcaagtatctgattccaaagaagcctatagacttttaaaactaggaataaagcaccagagtgttgccttcacaaaattgaataatgcttccagtagaagtcacagcatattcactgttaaaatattacagattgaagattctgaaatgtctcgtgtaattcgagtcagtgaattatctttatgtgatcttgctggttcagaacgaactatgaagacacagaatgaaggtgaaaggttaagagagactgggaatatcaacacttctttattgactctgggaaagtgtattaacgtcttgaagaatagtgaaaagtcaaagtttcaacagcatgtgcctttccgggaaagtaaactgactcactattttcaaagtttttttaatggtaaagggaaaatttgtatgattgtcaatatcagccaatgttatttagcctatgatgaaacactcaatgtattgaagttctccgccattgcacaaaaagtttgtgtcccagacactttaaattcctctcaagagaaattatttggacctgtcaaatcttctcaagatgtatcactagacagtaattcaaacagtaaaatattaaatgtaaaaagagccaccatttcatgggaaaatagtctagaagatttgatggaagacgaggatttggttgaggagctagaaaacgctgaagaaactcaaaatgtggaaactaaacttcttgatgaagatctagataaaacattagaggaaaataaggctttcattagccacgaggagaaaagaaaactgttggacttaatagaagacttgaaaaaaaaactgataaatgaaaaaaaggaaaaattaaccttggaatttaaaattcgagaagaagttacacaggagtttactcagtattgggctcaacgggaagctgactttaaggagactctgcttcaagaacgagagatattagaagaaaatgctgaacgtcgtttggctatcttcaaggatttggttggtaaatgtgacactcgagaagaagcagcgaaagacatttgtgccacaaaagttgaaactgaagaaacacataattatgtaggatttgaagatattattgattctcttcaagataatgttgctgatattaagaaacaggctgaaattgctcacttatatattgcatctcttcctgacccccaggaagctactgcttgtttagaactaaagtttaatcaaattaaagctgaattagctaaaaccaaaggagaattaatcaaaaccaaagaagagttaaaaaagagagaaaatgaatcagattcattgattcaagagcttgagacatctaataagaaaataattacacagaatcaaagaattaaagaattgataaatataattgatcaaaaagaagatactatcaacgaatttcagaacctaaagtctcatatggaaaacacatttaaatgcaatgacaaggctgatacatcttctttaataataaacaataaattgatttgtaatgaaacagttgaagtacctaaggacagcaaatctaaaatctgttcagaaagaaaaagagtaaatgaaaatgaacttcagcaagatgaaccaccagcaaagaaagggtctatccatgttagttcagctatcactgaagaccaaaagaaaagtgaagaagtgcgaccgaacattgcagaaattgaagacatcagagttttacaagaaaataatgaaggactgagagcatttttactcactattgagaatgaacttaaaaatgaaaaggaagaaaaagcagaattaaataaacagattgttcattttcagcaggaactttctctttctgaaaaaaagaatttaactttaagtaaagaggtccaacaaattcagtcaaattatgatattgcaattgctgaattacatgtgcagaaaagtaaaaatcaagaacaggaggaaaagatcatgaaattgtcaaatgagatagaaactgctacaagaagcattacaaataatgtttcacaaataaaattaatgcacacgaaaatagacgaactacgtactcttgattcagtttctcagatttcaaacatagatttgctcaatctcagggatctgtcaaatggttctgaggaggataatttgccaaatacacagttagaccttttaggtaatgattatttggtaagtaagcaagttaaagaatatcgaattcaagaacccaatagggaaaattctttccactctagtattgaagctatttgggaagaatgtaaagagattgtgaaggcctcttccaaaaaaagtcatcagattgaggaactggaacaacaaattgaaaaattgcaggcagaagtaaaaggctataaggatgaaaacaatagactaaaggagaaggagcataaaaaccaagatgacctactaaaagaaaaagaaactcttatacagcagctgaaagaagaattgcaagaaaaaaatgttactcttgatgttcaaatacagcatgtagttgaaggaaagagagcgctttcagaacttacacaaggtgttacttgctataaggcaaaaataaaggaacttgaaacaattttagagactcagaaagttgaatgtagtcattcagccaagttagaacaagacattttggaaaaggaatctatcatcttaaagctagaaagaaatttgaaggaatttcaagaacatcttcaggattctgtcaaaaacaccaaagatttaaatgtaaaggaactcaagctgaaagaagaaatcacacagttaacaaataatttgcaagatatgaaacatttacttcaattaaaagaagaagaagaagaaaccaacaggcaagaaacagaaaaattgaaagaggaactctctgcaagctctgctcgtacccagaatctgaaagcagatcttcagaggaaggaagaagattatgctgacctgaaagagaaactgactgatgccaaaaagcagattaagcaagtacagaaagaggtatctgtaatgcgtgatgaggataaattactgaggattaaaattaatgaactggagaaaaagaaaaaccagtgttctcaggaattagatatgaaacagcgaaccattcagcaactcaaggagcagttaaataatcagaaagtggaagaagctatacaacagtatgagagagcatgcaaagatctaaatgttaaagagaaaataattgaagacatgcgaatgacactagaagaacaggaacaaactcaggtagaacaggatcaagtgcttgaggctaaattagaggaagttgaaaggctggccacagaattggaaaaatggaaggaaaaatgcaatgatttggaaaccaaaaacaatcaaaggtcaaataaagaacatgagaacaacacagatgtgcttggaaagctcactaatcttcaagatgagttacaggagtctgaacagaaatataatgctgatagaaagaaatggttagaagaaaaaatgatgcttatcactcaagcgaaagaagcagagaatatacgaaataaagagatgaaaaaatatgctgaggacagggagcgtttttttaagcaacagaatgaaatggaaatactgacagcccagctgacagagaaagatagtgaccttcaaaagtggcgagaagaacgagatcaactggttgcagctttagaaatacagctaaaagcactgatatccagtaatgtacagaaagataatgaaattgaacaactaaaaaggatcatatcagagacttctaaaatagaaacacaaatcatggatatcaagcccaaacgtattagttcagcagatcctgacaaacttcaaactgaacctctatcgacaagttttgaaatttccagaaataaaatagaggatggatctgtagtccttgactcttgtgaagtgtcaacagaaaatgatcaaagcactcgatttccaaaacctgagttagagattcaatttacacctttacagccaaacaaaatggcagtgaaacaccctggttgtaccacaccagtgacagttaagattcccaaggctcggaagaggaagagtaatgaaatggaggagagcgcctctcctcctccaaaggaatgcagttcctcaccagcaatggaacaaagctggaaggagaatgactttgacaaattgagagaagaaggcttcagacgatcaaactactccgagctacaggaggaaattcaaaccaaaggcaaagaagttgaaaactttgaaaaaaatttagactaa

SEQ ID NO: 103538 - DNA, 5463 bp, Artificial Sequence
  derived and/or modified sequence
atggagagcaacttcaaccaggagggcgtgccccggcccagctacgtcttttctgcagatcccatcgcccggccatcagaaattaatttcgacggtatcaaactggacctgtctcatgagttctctctagtggcgcctaacaccgaagcaaattccttcgagtccaaagattatctgcaggtctgcctcaggattcgaccatttacccaaagcgaaaaagaactggagagcgaaggatgtgtccacattctcgattcccaaaccgtggtgttaaaagaaccgcagtgcatacttggcagattatccgagaaatccagtgggcagatggcccagaagttctcattttcaaaggtgttcggcccggctacaacccagaaggaatttttccaggggtgtatcatgcagcctgttaaagacctccttaaaggccaatcaagattaattttcacctatgggctaacaaattcaggtaagacttacacattccagggcactgaggagaacattgggattcttccaaggaccctgaacgtgcttttcgacagtctgcaggagcggttatatactaagatgaacttgaaaccccaccgcagccgtgagtatctcagactgtctagtgaacaagagaaggaggaaatcgcctcaaagtccgccctcttgcgccagatcaaggaagtaaccgtgcacaatgactccgacgatactctgtatggtagcctcactaactccttgaacatttctgagttcgaggagtcaatcaaggattatgagcaagccaacctcaacatggcaaattctattaagttcagtgtttgggtttctttcttcgagatttacaatgaatatatctatgacttgttcgtgccagtatcctctaagttccagaagcggaagatgttgcgcctgagccaggatgtgaagggctactcgttcatcaaggatctgcagtggatacaggtgagcgactccaaagaagcttatcggttactgaagctcggtattaagcatcaaagcgtggccttcacgaagttaaacaacgcctctagcaggtcacactctattttcacggttaagatattacagattgaagactccgagatgtcgcgcgtgatccgagtcagcgaactgagtctgtgcgatttggccgggtccgagcgcacaatgaaaactcagaacgaaggtgagaggctgcgggagacaggcaacatcaatacgagcctgttgaccttaggaaagtgtatcaatgtcttaaagaactcagagaaaagtaaattccagcaacacgtcccatttagagaaagcaaattaacccactatttccaatcatttttcaatggcaagggaaaaatctgcatgatcgtcaacattagtcagtgttatttggcatatgatgaaacgctgaatgtgctcaaattcagcgccatcgctcagaaggtttgtgtgcctgacaccctaaatagcagtcaggagaaactcttcggacctgtgaagagctcgcaggatgtgtcactggacagtaattctaattccaagattctaaacgtaaagcgagccacaatcagttgggaaaacagtctggaagacttaatggaagacgaggacttggtggaggagttagaaaatgccgaggaaacacaaaacgtggaaaccaagctgctggacgaggacctggacaaaacactcgaagaaaacaaggccttcatttctcacgaagagaaacgaaagctgctggatttaatagaggatcttaaaaagaaactgatcaacgaaaagaaggagaagcttaccctcgagttcaagattagagaggaggtgacacaggaatttacgcaatattgggcccagagagaggcagactttaaagagacgcttctgcaggagcgcgaaattctcgaggaaaacgcagaacgtagattagccattttcaaggatcttgtggggaaatgtgacacaagagaggaagctgcaaaagacatttgtgctactaaggtggagacggaggagactcacaattatgtcgggttcgaagatatcatagattctcttcaggataacgttgccgacataaaaaaacaggccgagatcgctcatctctacattgcgtctctcccagaccctcaggaggctactgcctgcttagagctgaagttcaatcagataaaagctgagctcgccaaaaccaagggcgagctcataaagactaaggaagaactgaagaaaagggagaacgagtcagattcactaatccaggagctagagactagtaataagaagattatcactcagaatcagaggatcaaagagctgattaatataatcgaccaaaaagaggacactatcaacgagttccagaatctgaagtcccatatggaaaacacctttaagtgtaatgataaagccgatacttcctccctgatcattaacaataagttgatatgtaacgagactgtggaagtgcccaaagattctaagtcgaagatttgtagcgagagaaaaagggtgaacgagaatgagctgcagcaagatgaaccgccggcaaagaaggggtctattcacgtctcctcggccattactgaggaccagaagaaatcagaggaagtccgccctaacattgccgagatagaggatatccgcgtcctacaggagaataatgaagggctccgtgctttcttacttaccatcgagaatgagctgaaaaatgaaaaggaggagaaggccgaattgaataagcagattgtgcactttcagcaagaactgtccctctctgaaaagaaaaacctcacgctctcaaaagaggttcagcaaatccagtccaattatgacatagctattgcagaactccatgtgcagaagtcgaagaatcaagagcaggaggagaagatcatgaaactttctaatgagatcgaaacggcaacacggtccattacgaataatgttagtcagatcaaattgatgcacaccaagatagacgagctgagaaccctggattctgtttcgcagatatctaatatagacctcctgaacctgcgggacctctcaaatggctccgaagaagataaccttcccaacactcagctggacctactgggaaatgattaccttgtttctaagcaggtaaaggaatatcggatccaagagcccaacagggagaacagttttcacagctctattgaggcgatttgggaggagtgtaaggagatagtcaaagcatcgtcgaaaaaatcgcaccagatcgaagagctagagcagcagatcgagaaattacaggccgaggtaaagggatacaaagacgagaacaaccgcctgaaagagaaagagcacaagaaccaggacgatcttctgaaggaaaaagaaactcttatacagcaactcaaagaagagctgcaggaaaagaatgtgacactagacgtccagatccagcatgtcgtggagggtaagagggccctctcggaactcacgcagggtgtcacctgttacaaagctaagatcaaggagttggagactattctggagacccaaaaggtcgaatgttcacatagcgctaagctcgaacaggacattctcgaaaaagaaagcatcattctcaaacttgaacgaaatctgaaagaattccaggaacatcttcaggattccgtgaaaaacaccaaggaccttaatgttaaagaactcaaactgaaagaagagataacccagctcaccaataaccttcaggatatgaagcacctgctgcaactgaaggaagaagaggaagagaccaataggcaggaaactgagaaactgaaagaggagctcagcgcttcgtctgcccggactcagaacctaaaggcggatcttcaacgtaaggaggaggactatgcagatctcaaagagaagctgacggatgctaagaagcagatcaaacaagtgcagaaggaggtgtcagtcatgcgggatgaagataagctcctccggattaagatcaacgagctggaaaaaaagaagaaccagtgtagccaggaattggacatgaagcagagaacaatccaacagttgaaggagcagctcaataatcaaaaggtggaggaggctatccagcagtatgagcgggcctgtaaagacctcaatgtgaaggaaaagattatagaggatatgagaatgacactggaagaacaagagcagacacaggtggaacaagatcaggtgttggaagccaagctcgaggaggtagagcggctggccaccgagcttgagaagtggaaagaaaaatgtaatgatctggagacaaagaacaaccagcgctctaataaggagcatgagaacaatactgacgtgctcggaaagctgacgaacttgcaagatgagctccaggagtccgaacaaaagtataacgctgataggaaaaaatggctcgaagaaaaaatgatgctcattactcaggccaaagaagccgaaaacattcgcaataaggagatgaaaaaatacgccgaggatagggaacgcttttttaaacagcagaatgagatggagattttgacagcccagctgactgaaaaagatagcgatctgcaaaaatggcgggaggaacgggaccaactcgtggcagcccttgagatacaactaaaggctcttatcagctcaaacgtgcagaaagataacgaaatcgagcagctgaaacgcatcatatcagaaacatccaagatagaaacgcaaatcatggatatcaagccaaagcggatttctagtgccgacccggacaaactgcaaaccgaacctctcagtacatccttcgagatttctaggaacaaaatagaagatggttcggtggttcttgatagttgcgaggtctcaaccgaaaatgaccagagcacccggttccccaagcccgagctcgagatccagtttacgccactgcagcccaacaagatggccgtcaaacacccaggctgcaccactccagtgaccgtcaagattccaaaagctcgcaaacggaaaagcaacgagatggaagaggatcttgttaagtgtgaaaataagaagaacgctaccccaagaactaacttgaaatttcctatttcagatgaccggaattccagcgttaagaaggagcagaaagttgccattcgaccttcctctaaaaaaacatatagcctgagatctcaagcctccataatcggggtgaatctcgctaccaagaaaaaggagggcacgctgcagaaatttggagatttcctgcagcacagtcccagtatcctccagtctaaagccaagaagatcatcgagacgatgagcagcagcaagctcagcaatgtggaggccagcaaggagaatgtgagccaacctaagcgcgccaagcgaaagctatacacgtctgaaatatccagccctatcgacatcagtggtcaagtgattctgatggatcagaaaatgaaggagtccgatcaccaaattatcaagaggcgcctgcggaccaagaccgccaaatag

SEQ ID NO: 103539 - DNA, 5169 bp, Artificial Sequence
  derived and/or modified sequence
atggagagcaacttcaaccaggagggcgtgccccggcccagctacgtgttctctgctgatccaatcgctcgcccttctgaaataaacttcgacggaattaaattggacctgtcacacgaattttccttggtggcccccaataccgaggctaacagctttgagtctaaagactacctgcaggtgtgcctgaggattagacccttcacacagagcgagaaagagctcgaatcagaggggtgcgtgcacatactggacagtcagacagtggtgctgaaggagcctcaatgtatcctggggaggctctcagaaaaatcttccggccaaatggcgcagaagttctcctttagtaaggtgttcggtcctgctactacccagaaggagtttttccaggggtgtataatgcaaccagtaaaagacttgcttaagggacagtctcgccttatttttacttacggacttacaaacagtggcaagacatacacgtttcagggaaccgaggagaatattggcatactgccgcggactttaaatgtcctcttcgactcgctgcaggagcgtctttataccaaaatgaacctgaaacctcaccgctcaagagagtacctaagactcagcagcgagcaggaaaaagaggaaatagcttccaagtcagctttacttcgccagatcaaggaggtaaccgtgcacaacgactcggatgataccctttatggctctttaactaattctctgaatatctctgaatttgaggagtcaatcaaggattacgagcaagccaacttgaacatggcgaatagtataaagttctcagtctgggtctctttcttcgaaatctataatgagtacatctacgacctgtttgtacccgtcagtagcaagttccagaagagaaagatgcttcgcttatcccaggacgtgaaaggctactcttttattaaagacctgcagtggatacaggtgtctgacagcaaggaggcgtaccggctacttaaattagggatcaagcatcagtccgttgcatttacaaagttgaacaatgcatcttctcgttcacatagcatctttaccgtgaagatcctacagattgaagattccgaaatgtcgcgggtgattcgagtgtccgagctgagcctgtgcgacctggcaggtagtgagcggaccatgaagacccagaacgaaggagagaggttacgggagaccgggaatatcaatacttctctgctaaccctaggaaagtgtattaacgttctcaagaatagcgagaaatctaaattccagcaacacgtgccattccgcgaatcaaaacttacccactactttcagtctttctttaatggaaaggggaagatatgtatgattgtcaatatttctcagtgctatctagcctatgacgaaactctcaatgtgctgaagttttctgctatcgcccagaaggtctgcgtccccgacaccctcaactcgtctcaggaaaaattgttcggcccagtgaaatcctctcaggatgtctctctcgacagcaacagtaattctaagattctgaatgtgaagcgcgcaaccatcagctgggagaactcgttggaggatctcatggaggatgaagatctcgtggaggaattagagaacgccgaggaaacccaaaacgttgaaaccaagctgcttgatgaagatctggacaagactctcgaagaaaataaggcatttatttctcatgaggagaaacggaaactgctggatctgatcgaagatcttaagaagaaactgattaacgaaaagaaggagaagctcactctggagttcaaaatacgcgaagaggtgacccaggaatttacccaatattgggcccaaagggaagcagacttcaaggaaacccttctccaggaaagggagatcttggaagagaacgctgagcgccgtctggccatcttcaaggacctcgtagggaaatgcgataccagggaggaggctgctaaagatatttgtgctaccaaggtcgaaactgaagaaacacacaactatgttgggtttgaggacatcatcgattcacttcaggacaacgtggccgacatcaagaaacaggcagagattgcacatctgtacattgcctcactcccagatcctcaggaggctaccgcttgtctggaactgaaatttaaccagatcaaagcagaactggccaagacaaagggagaactgatcaaaaccaaggaggaactcaagaagagggagaatgagtccgattctctcatccaagagctagagaccagcaataagaaaatcattactcagaatcagcgtataaaggagctcataaatatcattgatcagaaggaggataccataaacgaatttcagaatctgaagtcccatatggagaacactttcaagtgtaatgacaaggccgacacttctagcttaatcatcaacaacaagttgatctgtaatgaaacagtagaggttccgaaggactcaaaaagtaaaatttgttcagagaggaagcgcgttaatgaaaacgagctccagcaggacgagccaccagcaaaaaagggttctattcacgtctccagcgcgattactgaggaccagaaaaagtctgaagaagtgcgtcccaacattgctgagattgaggatatacgggtcctacaggagaacaatgaaggcctgagagccttcctgctgaccattgaaaatgagctgaagaatgaaaaggaggagaaagctgaactcaataagcaaattgtgcactttcaacaggagctgtccttaagtgaaaaaaagaacctcacattaagcaaggaagtccagcagatccagagtaattacgatatcgcgattgctgagctccacgtgcagaagtctaaaaaccaggaacaagaggagaaaattatgaagctgtcgaatgagatagagacagcaacacggtctataacaaacaatgtttcacagattaaactgatgcatacgaaaatcgatgaacttaggaccttggattccgtgtctcaaatctctaacatcgaccttcttaaccttagagatctgagtaacggatcagaagaagacaacctccccaatacccagctggacctcctcggaaatgattatctggtgtcaaaacaggtaaaggaatataggatccaggagcccaaccgtgaaaacagcttccattcctcaatagaagctatttgggaggagtgtaaggaaatcgtcaaagcttcatcaaagaaatctcatcagattgaggaactggagcagcaaatcgaaaaactgcaggctgaggtgaaggggtataaggacgaaaataatcgtttgaaagaaaaagaacacaagaaccaggacgacttactcaaagagaaggaaacccttatccagcagctcaaagaggaactgcaggaaaaaaacgtgaccctagatgtacaaatccagcatgtggtagaagggaaacgcgctctatcggagctcacccagggagtgacgtgttacaaagcgaagatcaaagagctcgaaactattcttgagacacagaaggtggaatgcagccatagcgccaagctcgaacaggatattctggaaaaggagtcaattatcctgaagctggagcgcaatcttaaagagtttcaggagcatcttcaggacagcgtgaagaacaccaaggatctgaacgtcaaagaactgaaacttaaggaagaaattacccagctgacaaataatttgcaggacatgaagcaccttcttcagcttaaagaggaagaggaggagacaaatcgacaggaaactgaaaaactgaaagaagagctctctgcttcaagtgcacggacacagaacctgaaggccgatctacagaggaaggaagaggactacgcggacctgaaggaaaaactgacagacgccaagaagcagattaagcaggttcagaaagaagtgagtgtaatgagagacgaggataagctcctgcgaatcaagattaatgaactggaaaaaaaaaaaaatcagtgctcccaggaactggacatgaaacagagaacgatccagcagttgaaagaacagctcaataaccaaaaggtggaggaagcgattcaacaatacgaaagagcttgtaaggatctgaacgtgaaggagaagatcatcgaggatatgcggatgacattagaggagcaggagcagacccaagttgagcaggaccaggtgctcgaagccaaactggaagaagtggagagactggccacagaacttgagaaatggaaagagaagtgtaacgaccttgaaacgaagaacaatcagcgcagtaacaaagagcatgaaaacaacacagacgtgttgggcaagttgacgaacctgcaagatgagctgcaggagtcggagcaaaaatataacgccgacaggaagaagtggctggaggaaaaaatgatgctcattacacaggcaaaggaagcggagaatatccgcaataaggaaatgaagaagtacgcagaggaccgagagaggttttttaaacagcaaaacgaaatggaaattttaacagctcaactcacagagaaggacagcgatctgcagaaatggcgagaggagagagaccagctagtggccgcgcttgaaattcagcttaaagccctgatctcctctaacgtgcaaaaagataatgagatcgaacagttgaagcggatcatttccgagacatcaaagatcgagactcagattatggatattaagccgaaacgcatatctagtgctgatccggataaacttcagacagagcccctttcaacatccttcgagatttccaggaataagatcgaggacggcagcgtagtgctggattcctgtgaggtctctactgagaatgatcaatccacacggtttccgaagccggagctggagatccagtttacaccactacagcccaacaagatggcggtcaagcatccaggctgcacaacacctgtgactgtcaagattcccaaagctcgcaaaagaaaaagtaacgaaatggaggagtccgcctctcctcctccaaaggaatgctcctccagtccagccatggaacagtcctggaaagagaatgacttcgacaagttgcgcgaggagggctttaggaggagtaattatagcgagctacaggaagaaatccagaccaagggcaaggaggtggagaacttcgaaaagaacctggactag

SEQ ID NO: 103540 - DNA, 5553 bp, Artificial Sequence
  derived and/or modified sequence
atggagagcaacttcaaccaggagggcgtgccccggcccagctacgtattttcagcggacccaattgcccggcctagtgagatcaacttcgatggaataaaactggatctgtctcacgagttttccctcgtggcgcccaatacagaagctaattcatttgaaagcaaggattacctgcaagtttgcctgaggatccggccgttcacacagagcgaaaaggaactggaatccgagggttgcgtccacatccttgacagccaaaccgtcgtactcaaggaacctcagtgcatcttaggcaggctgtcagagaaatcctcaggacagatggcacagaaattctcattttctaaagtattcggcccagccacaacccagaaagagtttttccaggggtgtatcatgcaaccagtgaaggacttgttgaaaggtcagtcccgcctaatctttacctacgggctgactaattccggaaagacctatacgtttcagggaaccgaagagaatattgggattctccccaggaccctcaatgtcctgttcgatagcttgcaagaacgactgtacacaaagatgaatctgaagccacaccgtagcagagagtatctgcggctatcctctgagcaagagaaagaggagatagctagcaaatctgccctgctccggcagataaaggaggtcaccgttcataatgattccgacgatacgctctacgggtccctgaccaactcgctgaatatctccgaatttgaagaatccatcaaagattacgagcaggcgaatctgaacatggctaactctattaaattcagcgtgtgggtgtctttttttgagatatataacgaatacatttacgacctgtttgtgccagtgtcttccaagttccaaaagagaaaaatgctgagactgtcccaggacgtcaaaggctacagcttcattaaggacctccagtggattcaagtatccgattccaaggaggcatatcgcctgcttaagctcggcataaaacaccaaagcgttgcattcactaagcttaacaatgctagtagccggtcccattctatcttcacagttaagatcttacaaattgaggattctgagatgtccagggtgatccgcgttagtgagctgagcctctgcgaccttgcaggatccgagagaaccatgaaaacccaaaatgagggggagaggctgcgggaaacaggaaatattaatacgtctctgttaactcttggcaagtgcataaatgtgctaaagaatagtgagaagtctaaattccagcaacacgtgccgttccgcgaaagcaagctgacccactactttcagtcgtttttcaatggtaaggggaagatatgcatgatcgtcaacatctctcagtgctatctcgcttatgatgagaccctaaatgttctaaagttcagtgcaatcgctcaaaaggtctgtgtgcccgacaccctaaactcatcccaggagaaactcttcggtccggtgaaatcctcacaggacgtcagtctggattctaactccaactccaaaatcctgaacgttaaaagggctaccataagctgggaaaatagcctggaggatctgatggaagacgaagatctggtggaggagcttgagaatgctgaggagactcagaatgtggaaacaaagctgctggatgaggatctcgataaaacacttgaggaaaataaggccttcatatcccatgaggagaaacgcaaactgttggaccttatagaggatctgaaaaaaaagctcattaacgagaagaaggagaagcttaccctggaatttaaaatccgggaagaagtaactcaagaattcacccagtattgggctcagcgcgaagccgacttcaaagaaaccttgctgcaggagagggagatactcgaggaaaatgctgaacgaaggttagctatatttaaggacctagttggtaagtgtgatactagagaggaagcagccaaggacatttgcgcaaccaaggtagagacagaagagacacacaactacgtcggatttgaggacattatcgatagcttacaagataacgtggcagatatcaaaaagcaggcggaaatagcacatctgtatatagcctctctgccagatccacaggaggctaccgcctgtttagaactgaaattcaatcagatcaaggcggagttggccaagacgaaaggcgaattgattaagacaaaggaggagttgaagaaacgggagaatgaaagcgattcccttatccaagaactggagacttcaaacaagaaaatcataacgcagaatcagcgaattaaggaactcattaatattatcgaccagaaggaggatactataaatgagtttcagaatctgaagagtcacatggagaatacatttaagtgcaacgacaaggctgacacctcttctctcatcatcaacaataagctgatttgtaacgaaacagtggaagtgccaaaagactctaagtctaaaatttgcagtgaaaggaagcgagttaacgaaaatgaacttcagcaagacgaacctccggctaagaagggcacgacatccgcggcttcaagtaggcggctcaggaagctgatctccaagccggttaacagaaccagacagactgaggggcacagcctggtttcaattcacgtttcaagtgccatcaccgaggaccaaaagaagtccgaggaggtgcgaccaaacattgctgagattgaggatattagagtcctgcaggagaacaatgagggtctccgggcattcctgttaacaatcgaaaatgaactaaaaaacgaaaaggaggagaaagctgagctgaataagcagattgtgcatttccaacaggagttgagcttgtcagaaaaaaaaaatcttacactgagcaaggaggttcagcagattcaatcgaactacgacatcgccatcgccgagctgcatgttcagaaatcgaagaaccaggagcaggaggaaaagatcatgaagttatccaatgaaattgaaacagccactcgctcaatcacaaacaacgtgtcacaaattaaactaatgcatacaaaaatcgacgagctcaggaccctggactctgtgagccaaatcagcaacattgacctgttaaaccttcgggacctgtctaatggtagtgaggaagataacttgccgaacacccaattggacctgctggggaatgactacctggtgagcaagcaggtgaaggagtaccgtatccaggaacctaacagagaaaacagctttcatagctctatcgaagccatatgggaggagtgcaaggagattgtcaaggcaagctcaaagaaaagccaccagatcgaagagcttgaacagcagatcgagaagttacaggccgaggtgaaaggctataaagacgaaaataaccgtctcaaagaaaaagagcacaaaaatcaagatgacctcttaaaggagaaagagacattaattcaacaacttaaagaggaacttcaggagaagaacgtgacattggacgttcagatccagcacgtagttgaggggaagcgcgccctctcagaactcacacagggtgtcacatgttacaaagccaaaattaaagagttggagacaatcctggagactcagaaagtagaatgctcgcatagcgcaaaactagagcaagatattctagagaaggagtccatcatcctgaaactggagcgtaacctgaaagagtttcaggagcacctgcaagatagtgtaaaaaataccaaagacctcaatgtgaaggagctgaaactgaaggaagagatcacgcaactgaccaataatctgcaggatatgaaacacctgcttcagctcaaagaggaggaggaagagacaaacagacaagagaccgagaaactgaaggaagagctcagtgcaagcagcgcccggacccagaatcttaaggctgatttacaaagaaaagaagaggactatgccgacttgaaagagaagcttaccgacgcaaaaaaacagattaagcaggtgcagaaggaggtcagtgtaatgagggatgaagacaaattgctgcgaataaagatcaacgaactcgaaaaaaaaaagaaccagtgtagccaagagctcgacatgaaacaaagaacaattcaacagctgaaggaacagctgaataaccaaaaggtggaagaagctatccaacagtacgagcgagcctgtaaggacttgaacgtgaaagaaaagatcattgaggacatgcggatgaccctggaagagcaggaacaaacacaggtggagcaggaccaggtgcttgaagcaaaattggaagaagtggaacggcttgcgaccgaactcgagaaatggaaggaaaagtgtaacgatttggagactaagaataaccaacgatctaataaagagcatgagaataataccgacgtcctgggaaaactcactaacctccaggacgagctgcaagagtcagagcagaagtacaacgctgaccgaaaaaaatggctcgaggagaaaatgatgctgataacccaggcgaaagaggctgaaaacatccgtaacaaggagatgaaaaagtatgcggaggaccgagagcgattcttcaagcagcagaacgaaatggagattctcacagcacagctgacagagaaggattcagacctacagaagtggcgggaagaacgggaccagctggtggctgccctagagatccagctcaaagctctaatctcctcaaatgtgcagaaggacaacgaaatcgagcagctgaagcgtattatatctgaaactagtaagattgagacacagattatggatattaagcctaaaagaatatcctctgctgatcctgataaacttcagaccgagccgttgagtacgtcatttgaaatatcgagaaacaagattgaggacgggtctgtggtcctggacagttgtgaggtgtccactgaaaatgatcagagcaccagatttccaaagcccgagcttgagattcaatttacaccattgcaacccaacaagatggcggtcaaacaccccgggtgcacaacgcctgtgaccgtcaaaataccaaaagcccgtaagcgaaaatcgaacgaaatggaggaggacttggtcaagtgtgaaaataagaaaaatgccacgccccggaccaatttaaagtttcccatttctgacgatcgaaattcttcagtgaagaaagaacagaaggtggctatacggccatccagcaagaaaacatatagcttgcgctcccaggcttctataattggggtgaatctggccaccaaaaagaaagaaggtacgttgcagaagttcggcgactttctgcagcacagcccctccattctacaatccaaagcaaagaaaattattgaaacaatgtctagctccaaattaagtaatgtggaggctagtaaggaaaatgtgagccaaccaaagagggccaagcggaaactgtacacttccgagatctcctcccccatcgacatcagcggccaggttattctgatggatcaaaaaatgaaggaatcagaccaccagatcataaagaggcgtttaaggacgaagacagccaaatag

SEQ ID NO: 103541 - DNA, 6520 bp, Artificial Sequence
  derived and/or modified sequence
attgtttgaatttgaaaacggtaacatcgcagtgctgctcgcgggtctggctagtcaggcgaagtttgcagaatggaatctaattttaatcaagagggagtacctcgaccatcttatgtttttagtgctgacccaattgcaaggccttcagaaataaatttcgatggcattaagcttgatctgtctcatgaattttccttagttgctccaaatactgaggcaaacagtttcgaatctaaagattatctccaggtttgtcttcgaataagaccatttacacagtcagaaaaagaacttgagtctgagggctgtgtgcatattctggattcacagactgttgtgctgaaagagcctcaatgcatccttggtcggttaagtgaaaaaagctcagggcagatggcacagaaattcagtttttccaaggtttttggcccagcaactacacagaaggaattctttcagggttgcattatgcaaccagtaaaagacctcttgaaaggacagagtcgtctgatttttacttacgggctaaccaattcaggaaaaacatatacatttcaagggacagaagaaaatattggcattctgcctcgaactttgaatgtattatttgatagtcttcaagaaagactgtatacaaagatgaaccttaaaccacatagatccagagaatacttaaggttatcatcagaacaagagaaagaagaaattgctagcaaaagtgcattgcttcggcaaattaaagaggttactgtgcataatgatagtgatgatactctttatggaagtttaactaactctttgaatatctcagagtttgaagaatccataaaagattatgaacaagccaacttgaatatggctaatagtataaaattttctgtgtgggtttctttctttgaaatttacaatgaatatatttatgacttatttgttcctgtatcatctaaattccaaaagagaaagatgctgcgcctttcccaagacgtaaagggctattcttttataaaagatctacaatggattcaagtatctgattccaaagaagcctatagacttttaaaactaggaataaagcaccagagtgttgccttcacaaaattgaataatgcttccagtagaagtcacagcatattcactgttaaaatattacagattgaagattctgaaatgtctcgtgtaattcgagtcagtgaattatctttatgtgatcttgctggttcagaacgaactatgaagacacagaatgaaggtgaaaggttaagagagactgggaatatcaacacttctttattgactctgggaaagtgtattaacgtcttgaagaatagtgaaaagtcaaagtttcaacagcatgtgcctttccgggaaagtaaactgactcactattttcaaagtttttttaatggtaaagggaaaatttgtatgattgtcaatatcagccaatgttatttagcctatgatgaaacactcaatgtattgaagttctccgccattgcacaaaaagtttgtgtcccagacactttaaattcctctcaagagaaattatttggacctgtcaaatcttctcaagatgtatcactagacagtaattcaaacagtaaaatattaaatgtaaaaagagccaccatttcatgggaaaatagtctagaagatttgatggaagacgaggatttggttgaggagctagaaaacgctgaagaaactcaaaatgtggaaactaaacttcttgatgaagatctagataaaacattagaggaaaataaggctttcattagccacgaggagaaaagaaaactgttggacttaatagaagacttgaaaaaaaaactgataaatgaaaaaaaggaaaaattaaccttggaatttaaaattcgagaagaagttacacaggagtttactcagtattgggctcaacgggaagctgactttaaggagactctgcttcaagaacgagagatattagaagaaaatgctgaacgtcgtttggctatcttcaaggatttggttggtaaatgtgacactcgagaagaagcagcgaaagacatttgtgccacaaaagttgaaactgaagaaacacataattatgtaggatttgaagatattattgattctcttcaagataatgttgctgatattaagaaacaggctgaaattgctcacttatatattgcatctcttcctgacccccaggaagctactgcttgtttagaactaaagtttaatcaaattaaagctgaattagctaaaaccaaaggagaattaatcaaaaccaaagaagagttaaaaaagagagaaaatgaatcagattcattgattcaagagcttgagacatctaataagaaaataattacacagaatcaaagaattaaagaattgataaatataattgatcaaaaagaagatactatcaacgaatttcagaacctaaagtctcatatggaaaacacatttaaatgcaatgacaaggctgatacatcttctttaataataaacaataaattgatttgtaatgaaacagttgaagtacctaaggacagcaaatctaaaatctgttcagaaagaaaaagagtaaatgaaaatgaacttcagcaagatgaaccaccagcaaagaaaggtactacttcagctgccagcagcaggcgtttaagaaagctaatttctaaaccagtaaatagaacaaggcaaacagaggggcattcacttgtgtctatccatgttagttcagctatcactgaagaccaaaagaaaagtgaagaagtgcgaccgaacattgcagaaattgaagacatcagagttttacaagaaaataatgaaggactgagagcatttttactcactattgagaatgaacttaaaaatgaaaaggaagaaaaagcagaattaaataaacagattgttcattttcagcaggaactttctctttctgaaaaaaagaatttaactttaagtaaagaggtccaacaaattcagtcaaattatgatattgcaattgctgaattacatgtgcagaaaagtaaaaatcaagaacaggaggaaaagatcatgaaattgtcaaatgagatagaaactgctacaagaagcattacaaataatgtttcacaaataaaattaatgcacacgaaaatagacgaactacgtactcttgattcagtttctcagatttcaaacatagatttgctcaatctcagggatctgtcaaatggttctgaggaggataatttgccaaatacacagttagaccttttaggtaatgattatttggtaagtaagcaagttaaagaatatcgaattcaagaacccaatagggaaaattctttccactctagtattgaagctatttgggaagaatgtaaagagattgtgaaggcctcttccaaaaaaagtcatcagattgaggaactggaacaacaaattgaaaaattgcaggcagaagtaaaaggctataaggatgaaaacaatagactaaaggagaaggagcataaaaaccaagatgacctactaaaagaaaaagaaactcttatacagcagctgaaagaagaattgcaagaaaaaaatgttactcttgatgttcaaatacagcatgtagttgaaggaaagagagcgctttcagaacttacacaaggtgttacttgctataaggcaaaaataaaggaacttgaaacaattttagagactcagaaagttgaatgtagtcattcagccaagttagaacaagacattttggaaaaggaatctatcatcttaaagctagaaagaaatttgaaggaatttcaagaacatcttcaggattctgtcaaaaacaccaaagatttaaatgtaaaggaactcaagctgaaagaagaaatcacacagttaacaaataatttgcaagatatgaaacatttacttcaattaaaagaagaagaagaagaaaccaacaggcaagaaacagaaaaattgaaagaggaactctctgcaagctctgctcgtacccagaatctgaaagcagatcttcagaggaaggaagaagattatgctgacctgaaagagaaactgactgatgccaaaaagcagattaagcaagtacagaaagaggtatctgtaatgcgtgatgaggataaattactgaggattaaaattaatgaactggagaaaaagaaaaaccagtgttctcaggaattagatatgaaacagcgaaccattcagcaactcaaggagcagttaaataatcagaaagtggaagaagctatacaacagtatgagagagcatgcaaagatctaaatgttaaagagaaaataattgaagacatgcgaatgacactagaagaacaggaacaaactcaggtagaacaggatcaagtgcttgaggctaaattagaggaagttgaaaggctggccacagaattggaaaaatggaaggaaaaatgcaatgatttggaaaccaaaaacaatcaaaggtcaaataaagaacatgagaacaacacagatgtgcttggaaagctcactaatcttcaagatgagttacaggagtctgaacagaaatataatgctgatagaaagaaatggttagaagaaaaaatgatgcttatcactcaagcgaaagaagcagagaatatacgaaataaagagatgaaaaaatatgctgaggacagggagcgtttttttaagcaacagaatgaaatggaaatactgacagcccagctgacagagaaagatagtgaccttcaaaagtggcgagaagaacgagatcaactggttgcagctttagaaatacagctaaaagcactgatatccagtaatgtacagaaagataatgaaattgaacaactaaaaaggatcatatcagagacttctaaaatagaaacacaaatcatggatatcaagcccaaacgtattagttcagcagatcctgacaaacttcaaactgaacctctatcgacaagttttgaaatttccagaaataaaatagaggatggatctgtagtccttgactcttgtgaagtgtcaacagaaaatgatcaaagcactcgatttccaaaacctgagttagagattcaatttacacctttacagccaaacaaaatggcagtgaaacaccctggttgtaccacaccagtgacagttaagattcccaaggctcggaagaggaagagtaatgaaatggaggaggacttggtgaaatgtgaaaataagaagaatgctacacccagaactaatttgaaatttcctatttcagatgatagaaattcttctgtcaaaaaggaacaaaaggttgccatacgtccatcatctaagaaaacatattctttacggagtcaggcatccataattggtgtaaacctggccactaagaaaaaagaaggaacactacagaaatttggagacttcttacaacattctccctcaattcttcaatcaaaagcaaagaagataattgaaacaatgagctcttcaaagctctcaaatgtagaagcaagtaaagaaaatgtgtctcaaccaaaacgagccaaacggaaattatacacaagtgaaatttcatctcctattgatatatcaggccaagtgattttaatggaccagaaaatgaaggagagtgatcaccagattatcaaacgacgacttcgaacaaaaacagccaaataaatcacttatggaaatgtttaatataaattttatagtcatagtcattggaacttgcatcctgtattgtaaatataaatgtatatattatgcattaaatcactctgcatatagattgctgttttatacatagtataattttaattcaataaatgagtcaaaatttgtatatttttataaggcttttttataatagcttctttcaaactgtatttccctattatctcagacattggatcagtgaagatcctaggaaagaggctgttattctcatttattttgctatacaggatgtaataggtcaggtatttggtttacttatatttaacaatgtcttatgaattttttttactttatctgttatacaactgattttacatatctgtttggattatagctaggatttggagaataagtgtgtacagatcacaaaacatgtatatacattatttagaaaagatctcaagtctttaattagaatgtctcacttattttgtaaacattttgtgggtacatagtacatgtatatatttacggggtatgtgagatgttttgacacaggcatgcaatgtgaaatacgtgtatcatggagaatgaggtatccatcccctcaagcatttttcctttgaattacagataatccaattacattctttagatcatttaaaaatatacaagtaagttattattgattatagtcactctattgtgctatcagatagtagatcattctttttatcttatttgtttttgtacccattaaccatccccacctccccctgcaaccgtcagtacccttaccagccactggtaaccattcttctactctgtatgcccatgaggtcaattgattttatttttagatcccataaataaatgagaacatgcagtctttgtc

SEQ ID NO: 103542 - DNA, 5462 bp, Artificial Sequence
  derived and/or modified sequence
atggagtccaattttaatcaggagggcgtgcccaggccctcctacgtattctccgccgatcccatcgccaggccaagcgagatcaacttcgacgggataaaattggacctctcccatgaattctcgttggtggctcccaacacggaggccaactccttcgaatctaaggattacttgcaggtgtgcctgcggatcagacctttcactcaatcagaaaaggagctcgaaagtgaagggtgtgtacacatcttggattcgcagacagtcgtgctgaaagaaccacagtgtatactgggccgactatcggaaaaatcatctggacagatggctcaaaaattctcatttagcaaggtcttcggccctgccaccactcagaaggaattttttcaggggtgcattatgcagcctgtcaaagacttgctgaagggtcagtccagactaatcttcacctacgggctgacaaatagtggtaagacctacacctttcagggaacggaagagaatattgggatcctaccacgcaccctgaacgtcctgtttgactcgctgcaggaacgactgtacaccaagatgaacctgaagccgcacagatctcgggagtatttgcggttatcctcagagcaggaaaaggaagaaatcgccagcaagagcgcccttctgagacagatcaaggaggtaactgtgcataacgacagtgatgacacactatacggcagcttaacaaactccctgaacatttccgaatttgaagagtcgattaaggactacgagcaggcaaaccttaacatggcaaacagcatcaaattcagcgtatgggtctcgtttttcgagatttacaatgagtacatctacgatctgttcgtcccagtgagtagtaagttccaaaaaagaaagatgctccggctgagccaagacgttaaagggtacagcttcatcaaggacctgcagtggattcaggtgtccgactcaaaagaggcctatcggctgctcaagctggggatcaaacaccagagcgtggctttcaccaagctgaacaatgcctccagcaggagccactccatctttactgtgaagattcttcagatcgaggacagcgaaatgtcgagggtgatccgtgtgtccgagctgagcctatgcgacttggccggaagcgaaaggaccatgaagacgcagaacgagggggagaggcttcgtgagactggcaacattaatacatcactgcttactcttgggaagtgcatcaatgttctaaagaattcagagaagtctaagtttcagcaacacgtaccttttagagagtcgaagcttactcactattttcaatcgttcttcaacgggaaaggaaagatttgcatgatcgttaacatttctcagtgttacctggcttatgatgagacgctgaacgtgttgaaattttccgcaatcgctcagaaggtctgcgtccctgacactctgaattcatcgcaagagaagctctttggtcctgtaaaatcctcccaggacgtcagtctggacagcaacagcaactcaaaaatcctaaatgtgaagagggccaccatatcttgggagaacagtctcgaagacttaatggaggacgaggatttagtggaagagctggagaatgctgaggagacccaaaatgtggaaactaaacttctggatgaggatttagataagacactggaagagaacaaggcttttatttcccatgaggaaaaacgaaagctcctggatctgattgaggacctcaagaaaaaactgataaatgaaaaaaaagaaaaactgactctggagtttaagatccgtgaggaggtgacccaggagttcactcagtattgggctcagagagaggccgactttaaagagaccttacttcaggaacgcgagatcctcgaggagaacgcggagaggaggttggcgatattcaaagacctggtgggcaaatgtgacacgagggaagaagccgctaaagatatctgcgcgaccaaggtggaaaccgaggagacacataattacgtaggttttgaagatataatcgactcactacaggataacgtggctgacatcaaaaaacaggcagagatcgcgcacttatatatcgcatcactgcccgacccacaggaggcgaccgcctgcctggagttaaaatttaaccagattaaggcagaattggctaaaaccaagggtgagctgattaaaactaaagaggagctgaagaagcgagagaacgaatcagatagtctgatccaggaactcgaaactagtaacaagaaaattataacgcagaaccaaaggatcaaggagttgataaacattatcgatcagaaggaagataccatcaatgagttccagaacctgaaatcacacatggagaatacctttaagtgcaatgacaaagccgacacctcctccctaattatcaacaacaagctcatttgtaatgagactgtggaggtcccaaaagatagcaaatcaaaaatttgctctgagcgcaagcgcgttaatgaaaatgagttgcagcaggacgagccgcctgccaaaaagggctccatacacgtgagttctgcgattaccgaggatcagaagaaatcagaagaagtgcggcctaatatcgccgagatcgaagatataagggtactgcaagagaacaacgaggggttgagagcatttttattaacaatcgaaaacgagttgaaaaatgagaaagaagagaaagcagaactgaacaagcagatcgttcattttcaacaagagttgtctctgagcgagaaaaagaatttgaccttgagcaaggaggtgcagcaaatccagtcgaattacgatattgccatcgctgagctgcatgtacagaagtctaaaaatcaggaacaagaggaaaagatcatgaaactcagtaatgagatcgagaccgcaacacgcagcatcaccaacaacgtgtcacagatcaagcttatgcacacaaaaatcgacgagctcagaaccctggactcagtgtcacaaatcagcaacatcgatttacttaatctacgagacctgtctaacggatctgaggaagataacctacccaatacccagttggatctccttgggaatgactatctggtgtctaaacaggtgaaagagtaccggattcaagagcccaatcgagagaactcctttcattcttccatcgaagcaatttgggaagagtgcaaggagatcgtcaaagcctctagtaagaaaagccatcagattgaggaactcgagcaacagatcgagaagctccaggcggaagtcaagggttataaagacgagaacaatagacttaaagagaaggaacacaagaaccaggacgatctgctgaaggagaaagagaccctgattcagcagctcaaagaggagttgcaggaaaaaaacgtaaccttggatgtacaaatccaacatgttgtggaggggaagagagcactcagcgagttaacacagggggtaacgtgctacaaggctaagataaaagaactcgagaccattctggaaacccagaaagttgaatgctcccactccgctaaactggagcaggacattcttgagaaagaatctatcatcctgaagctggagcgcaatctaaaggagtttcaggaacatctgcaggattctgtcaaaaacacgaaggacctgaacgtgaaagagctgaagctgaaggaggaaataacgcagctaaccaacaacctccaggacatgaaacatttgctccagctgaaagaggaggaagaagaaaccaatagacaggaaaccgagaagctcaaagaagaattgtctgcgtctagcgcccgaacccaaaacctgaaggcggatctccaacgaaaggaagaggattacgctgacctgaaagagaagctcacagatgctaagaagcaaattaaacaagttcagaaggaagtgagtgtgatgcgggatgaagacaagctactccgaattaagattaatgagctggaaaaaaaaaagaatcagtgctcgcaggagctggatatgaagcaaaggaccattcagcaactgaaggagcagctgaataatcagaaagttgaagaggctatccagcagtacgaaagggcatgtaaagacctgaatgtgaaagagaaaatcattgaggacatgagaatgaccctcgaggagcaggaacagactcaggtggaacaggaccaggtacttgaggccaagctggaggaggttgaacgcctcgctacagagctggaaaaatggaaggagaagtgcaacgacctcgagaccaaaaacaatcaaaggtcaaacaaggaacacgagaacaataccgatgtgctgggcaaactaaccaacctgcaggatgaactccaagagagtgaacagaaatacaacgcagatagaaaaaagtggcttgaggagaagatgatgcttatcacgcaggcgaaggaagctgagaacatccggaacaaagaaatgaagaagtacgcagaggatcgtgaacggttctttaagcaacagaacgaaatggagatcctgactgcacagctgacagaaaaggacagcgacctgcagaagtggcgcgaggagcgcgatcagctggtggccgcactggagattcagcttaaggcgctgatcagctccaatgttcagaaggataatgagatagagcagctcaagcgtattatctcagaaacaagtaaaattgaaacgcagattatggacatcaagccgaagagaatttcaagtgccgatcctgacaagctgcagacagagcctctgagcacctcatttgagatttcacgcaataagatagaagacggcagtgtggtgctggactcctgtgaggtctctactgaaaacgatcaaagtacccgcttccctaagcctgaactggagatccagttcacacccctgcagcctaataaaatggccgtcaaacatcctggctgcactacgcctgtgactgtgaagatcccaaaagctaggaaacggaagtcaaacgaaatggaggaagatttggtcaaatgtgagaacaagaagaatgccactcccagaactaatttaaaatttccaatctcagatgacagaaattcgtctgtgaaaaaagagcagaaggtcgctattcgcccatcctccaaaaagacttactcactgaggtcccaggcgagtattatcggcgttaatctggccaccaagaagaaagagggaactcttcagaaattcggagattttctgcagcatagccccagcatcctgcagagcaaggccaaaaagattattgagactatgtcttcctccaaactctcaaacgtggaagccagtaaagaaaacgtttctcagcccaagagagcgaaacggaaactatacacatccgaaatcagcagccccattgacatcagcgggcaggtcattctgatggaccagaagatgaaggagtccgaccaccagataatcaaaagacgtctgcgaacaaagacagccaagta

SEQ ID NO: 103543 - DNA, 5168 bp, Artificial Sequence
  derived and/or modified sequence
atggagagcaactttaatcaggaaggagtgcccaggcctagctacgtatttagcgccgacccaattgccagaccaagtgagatcaatttcgacggtatcaagctggatctcagtcatgagttctcgctggtggcaccgaacacggaggcaaattcctttgaatccaaggattatcttcaagtgtgtctgcgaattaggccatttacgcagtccgaaaaggagttggagtcagaggggtgcgtccacatactcgattctcagacagtcgtcttaaaggagccccagtgtatcctgggcaggctgtcagaaaaatcttccggccaaatggctcagaagttttccttctccaaggtattcggccctgccactacccagaaggagttttttcagggctgcatcatgcagccagtcaaggacctgctgaagggccaatcaaggctgatctttacgtatggcctgactaacagcgggaagacatacacattccagggcacagaggagaacattggtattctgcctcggactctcaatgtgttatttgattctcttcaggagagactttacacaaaaatgaatctgaagccccaccgaagcagagaatacctccgcctgtcctctgagcaagaaaaggaagaaatcgccagcaagtccgcgctgcttcggcagatcaaggaggtcacggtgcacaacgatagtgacgatacgctttatggatccttgacaaactcgctgaatattagcgagttcgaagaaagcattaaggattacgaacaggctaatcttaatatggccaactctataaagtttagtgtgtgggtgagcttcttcgagatatataatgagtatatctatgatctgttcgtccccgtgtcaagtaagtttcagaagcgaaaaatgctgcgcctcagccaggatgttaaggggtatagctttatcaaggatcttcagtggatccaggtctcggactcaaaggaagcctaccgcttactgaagcttggaattaagcatcagtcagtggctttcactaagctgaataacgctagcagccgctcacactcaattttcaccgttaaaatattgcagatagaggacagcgaaatgagccgcgtgattcgcgtttcggagctgtccctgtgtgatcttgctgggagcgagcgcaccatgaagacacagaatgagggcgagcgactgagagagacgggcaacatcaacacatcacttctgaccttgggcaagtgtatcaacgtattgaaaaactccgagaagtcaaagtttcagcagcacgtccccttcagggaatccaagttgacccactatttccaatcatttttcaacggtaaggggaagatctgtatgatagtgaacatctcacagtgttatcttgcatatgacgaaaccctcaacgtattgaaattcagcgcaatcgcacagaaggtgtgtgttcctgacacactcaattcatctcaggagaaactgttcggtcccgtgaagagctcacaagacgtatcgcttgactctaattcaaattctaagatcctgaacgtgaaacgggcaaccattagctgggagaatagtctggaggatttgatggaagacgaggacctggtggaagaactcgagaatgccgaagaaacacagaatgtggagaccaagctactggatgaagacctagataagaccctagaagagaacaaggcttttattagccacgaagaaaagcggaagctgctcgatctcatcgaagatctcaaaaagaaactgattaatgaaaagaaagaaaagctcacgctggagtttaaaatccgcgaggaagtaacccaggagtttactcagtactgggcccagagggaggccgacttcaaagagacgctgctgcaagaacgcgagattctggaggaaaacgccgagaggagactcgcgatattcaaggacctcgtaggcaagtgtgataccagagaggaggccgcaaaggacatatgcgcaactaaggtggaaactgaggagacccataactacgtcggtttcgaagatatcatagactcactgcaggataacgtcgcagacattaagaagcaggcggagatcgcccatctgtatatcgcatccctacccgatccccaggaggcgacagcttgtctggagcttaaattcaatcagatcaaagcagagctagccaaaacaaaaggggagcttatcaagacgaaggaggagctgaagaagcgggaaaacgagtctgattctcttattcaggagcttgaaacttcgaataagaaaattatcacacagaaccagcgtatcaaggagctaattaacataatcgaccagaaggaagacactatcaacgagtttcagaatcttaagtctcacatggagaatactttcaagtgtaacgacaaggcggatacgtcaagcctgattattaacaacaagctgatttgcaacgaaaccgtagaggttcctaaagacagcaagtccaaaatctgttccgaacggaagagagtcaacgaaaacgaactgcagcaggacgaaccacctgccaagaagggatccattcacgtgtcaagcgctatcaccgaagatcagaagaaaagcgaagaagtccgtcccaacattgccgagattgaagatattcgcgtgttgcaggagaacaatgaggggcttcgggctttcttactcacaattgagaacgaattgaaaaacgagaaggaagagaaagccgaactcaataagcagattgtacactttcaacaagagctaagcttgtcagaaaaaaaaaatttgaccctgtccaaggaggtccaacagattcagtcaaactatgatattgcaatcgccgaactgcacgtgcagaagtcaaaaaaccaggaacaggaagagaaaatcatgaagctgtctaacgagatcgagacagcaaccagaagcatcacaaacaatgtgtctcagatcaaacttatgcacaccaagatagatgagttgcgtacattggatagcgtatcacaaatctcaaatatagatctgctgaacctgcgagacctgtccaacgggtcagaggaagacaatctgcccaacacacagctggaccttctcggaaatgattacttggtttccaaacaggtaaaggaataccgtatccaagaacccaacagggaaaattctttccactcttcaattgaggcaatttgggaggaatgcaaagagatcgtgaaagcatctagcaagaagtctcatcagatcgaggaactggagcagcagatcgaaaagctgcaagcagaggtaaagggctacaaggacgagaacaatagattgaaagagaaggagcataagaaccaggatgacctgctgaaagagaaggagaccctaatccagcaactcaaggaagaactgcaggaaaagaatgtaactctggatgtccagattcaacatgttgtcgaagggaagcgagctttatctgagttaactcaaggagtgacttgttacaaagcgaagataaaggagttagagacgatcctggagacacagaaggtggagtgctcccatagtgcaaaactggagcaggacattctggagaaagagagtatcattctaaagctggaacggaacctcaaggaattccaggaacacttgcaggactccgttaaaaatacaaaagatcttaacgttaaagagctgaaactgaaggaggaaatcacccagcttaccaacaatctacaggacatgaagcatctgttgcaactcaaggaggaagaggaggaaaccaacagacaggaaacggagaaactcaaggaagagctgtctgcttctagtgctaggactcagaaccttaaggccgatttgcagcggaaagaggaggattacgctgacctgaaggaaaagctgaccgatgccaaaaaacagattaaacaggttcaaaaggaggtatccgttatgagggacgaggataagctgctgcgcatcaagataaatgagctggagaagaaaaaaaaccagtgcagccaggaactggacatgaagcagcggacaatccagcagctgaaagagcagttgaacaatcagaaagtggaggaggccatacaacagtatgaacgagcatgtaaagatctgaatgtcaaggaaaaaatcattgaagacatgcgaatgacgcttgaggagcaggaacagacacaggttgaacaggatcaggtcctggaggctaaactggaagaggtcgaaaggctggccaccgagctagaaaagtggaaggagaagtgcaacgatcttgaaactaaaaataaccagcggtccaataaggagcacgagaataacaccgatgtgcttggcaagctaaccaacctgcaggacgaactgcaagagagtgaacaaaagtacaatgctgatcgcaaaaaatggctcgaagaaaaaatgatgctgataacgcaggcgaaagaagcagaaaacatccgcaataaggagatgaagaagtatgccgaggatcgtgagaggttctttaaacagcagaacgagatggaaattttaaccgcccagctgaccgaaaaagatagcgatctccagaaatggcgagaggaaagagaccagctggtcgcagccctggagattcagctaaaggctctgatcagttctaatgttcagaaggacaatgaaattgagcagttgaaaagaatcatcagtgaaacttccaaaatcgaaacacagatcatggacattaagcctaaaaggatttccagcgccgatcctgataaactgcagaccgaacccctcagcacatccttcgagatctcccggaataagattgaggacggcagcgtggtgttagattcgtgcgaggtgtccacagagaacgaccaatcgaccaggttcccaaaacctgaactagagatacagttcactccattgcagcccaataaaatggccgtcaaacatccaggctgtaccaccccggtcactgtaaagatacccaaggcacgaaagcggaaatcgaatgagatggaggagtcagcatctcccccacctaaggagtgttcatcatcccccgctatggagcaatcttggaaagaaaatgactttgacaagctccgtgaagagggatttagacgcagcaattatagtgaactgcaggaggaaatccagaccaaaggaaaggaagtcgaaaactttgaaaagaacctggacta

SEQ ID NO: 103544 - DNA, 5553 bp, Artificial Sequence
  derived and/or modified sequence
atggagagcaacttcaaccaggagggggtgcccaggccttcctacgtgttttccgcagacccaatagcacgcccttcagaaataaattttgatgggatcaaactcgatctgagtcatgagttctccctggtagcgcctaatactgaggccaattcgtttgaatctaaagattatctgcaggtatgtctgagaattcgcccttttacccagtccgagaaagagctcgagagcgaggggtgcgtgcatatattggactctcaaacagttgtccttaaggagccccagtgtatcttgggaaggctgtctgagaaatcaagcggtcaaatggcacagaagttctccttcagcaaagtgttcggaccagcaacgacacagaaggagttctttcaggggtgcatcatgcagccagtcaaagatcttcttaaaggacagtcccgactgattttcacatacgggctgaccaactcaggaaaaacatatacgtttcaggggaccgaagaaaacatcggcattcttccaagaacccttaatgtgttgtttgattctctgcaggagcgtctgtacactaaaatgaacctcaagcctcataggtcaagggagtacttgcggttgtcctctgaacaggagaaagaggaaatcgcctctaaatctgcgcttcttcggcagattaaggaggtgaccgtgcacaacgactctgacgacactctctatggtagtttgaccaacagcttgaacatctcagagttcgaggagagtatcaaggattacgaacaggctaatctcaacatggccaactctatcaagttcagcgtgtgggtctcttttttcgaaatctataacgaatacatttacgacctcttcgtgcctgtctctagtaagttccagaagcggaagatgctgcggctgtcgcaggatgtaaaggggtactcttttatcaaggacctccagtggatccaggtttccgacagtaaggaggcttatcgactcctgaaattaggtatcaagcaccagtcagtagcctttacaaaactcaacaatgcgtcatccaggagtcactctatttttaccgttaagatcctacagatcgaagatagcgaaatgtcacgagttattcgcgtatctgaactgagtttatgcgacctagctgggtccgagcggaccatgaaaacccagaacgagggtgagcgtcttcgcgagacggggaacatcaatacctcattgctcaccctggggaagtgcattaatgttttgaaaaattcagaaaagtcaaaattccagcaacacgtgccattccgcgaatccaagcttacgcactactttcaatcattcttcaatgggaaaggtaagatttgcatgatcgtaaatatttcccagtgttatttggcatatgacgaaaccctgaacgtgctgaaattctccgcgattgctcaaaaggtgtgtgtgccggatacactgaactcaagccaagaaaagttatttggtccagtaaaatctagccaggacgtaagcctggacagcaattctaactcaaagatccttaatgtgaagcgagctacaatttcttgggagaactcccttgaggatcttatggaggatgaagatttggtggaggagctagaaaatgcagaggagacccagaacgtggagaccaaactcttagatgaggatcttgacaagaccctggaggaaaacaaagcctttatttctcatgaggagaaacggaagttgctggacctcatcgaagatctcaaaaagaaactcattaatgaaaagaaggagaaattgaccctggagtttaagatacgggaggaagtgactcaggaattcacccagtactgggcccagagggaagcggatttcaaagagaccctccttcaggagcgggagatcctagaagagaatgcagagaggaggcttgctatatttaaggatcttgtgggcaaatgcgacacacgagaagaggctgcgaaggacatctgcgctaccaaagtggaaacagaggaaactcacaattacgtaggatttgaagacatcattgatagccttcaggataacgtggccgacatcaaaaagcaggctgagatagcacacctgtatatagcgtctcttcccgacccccaggaggctactgcctgcctcgaactcaagtttaaccagatcaaagccgaactcgccaaaaccaaaggggagctgatcaagaccaaggaggagctgaaaaaacgtgagaacgagagcgatagcttgattcaagagcttgagacatcaaacaaaaaaattattacccaaaaccagcggataaaggagctgataaatattatcgaccagaaggaggacactatcaacgaattccagaacttgaagtctcacatggaaaatacatttaagtgtaacgacaaagccgacacgtcaagcctgatcataaacaacaaactgatctgcaacgaaaccgtcgaagtgcctaaggattccaagagcaaaatctgtagcgaacgcaaacgagtgaatgagaacgagctacagcaggatgagcctcctgccaagaagggcacaactagtgcagccagtagccgtcgcttgcgaaaactaatcagcaagcccgtgaaccggacacgccaaactgagggccacagtcttgtctctatccacgtttcatctgccataactgaggatcagaagaaatctgaggaagttcgtcccaatattgccgagatcgaagatatcagggtgttacaggagaacaacgagggcctacgcgctttcctcttaacgatcgaaaacgagctgaagaacgaaaaagaggagaaggccgaactgaacaaacagattgtgcactttcaacaggagctttctctttctgagaaaaaaaacctgaccctgtccaaagaagtgcagcaaattcaatccaactacgatattgctattgctgagctccatgttcagaaaagcaagaaccaggagcaagaggagaagatcatgaagctgtccaatgagatcgaaacagcaacgcgcagcattacaaacaatgtctcccagatcaaactaatgcatacaaaaattgatgagctcaggaccctcgactcggtgtcacagatatccaacatagacttattgaacctaagggatttgtccaacggaagcgaggaggataaccttcctaatacccagctggatctcctaggaaatgattatttagtgtccaagcaggtgaaggagtacagaatccaggagcccaatcgggaaaattccttccatagctccatcgaagctatctgggaggaatgtaaggagattgtcaaggcgagtagtaagaagtctcatcagatcgaagagctggaacagcaaatcgagaaactacaggcagaggttaaaggctacaaagacgaaaacaaccgcctcaaagaaaaggaacacaagaaccaagatgacctactgaaggaaaaagagacactgattcagcaactgaaagaggaattacaagaaaaaaatgttacgttagacgttcagattcagcatgttgtcgaaggcaaacgtgccctttccgagttaactcagggggtgacctgttacaaagccaaaatcaaagagttagaaaccatactggagactcagaaggtcgagtgctcacatagtgcgaaactggagcaggacatcctcgaaaaggagtctatcattctgaagctagagcggaacttgaaggaattccaggagcacttgcaggactccgttaagaacactaaggaccttaacgtgaaagaactgaagctcaaggaagaaatcacccaactgacaaacaatctgcaggatatgaagcacctgcttcaactgaaggaagaggaggaggagacgaaccgccaggagaccgagaagctgaaggaagaactgtccgcgagcagtgcaagaacccagaatctcaaagccgacctgcaaaggaaagaggaggattatgcagaccttaaggaaaagctgaccgacgcgaagaagcagatcaagcaagtacaaaaagaggtgtccgtgatgcgcgatgaagacaaattgctacggatcaagattaacgagcttgaaaagaagaaaaatcagtgctcacaggagctggacatgaaacagaggaccattcagcagctgaaagaacaactgaacaaccagaaggtcgaggaagccatccagcaatatgaacgcgcttgtaaggacctgaacgtcaaagagaagattattgaagacatgcggatgactctggaggagcaggaacagactcaggtggagcaagatcaagtactggaagcaaagctcgaggaggtggaaaggctcgctaccgaactggagaaatggaaagaaaaatgtaacgatttggaaacaaagaacaaccaaaggtcaaataaggagcacgagaacaacacggatgtactgggtaagctgactaacctccaggacgagctccaggagtcagagcagaaatacaacgccgacagaaaaaagtggctggaggaaaaaatgatgctcattactcaggccaaggaggcagaaaatatcaggaataaggagatgaagaagtacgcggaggaccgtgaaagattcttcaagcagcaaaacgagatggaaatcctcaccgctcagttgactgagaaggattcagacttacaaaaatggcgtgaggaacgagatcagctagtggcagccttagaaattcagctcaaagcactgataagttccaacgtccagaaagacaacgagatagagcagctcaagcggatcatcagcgaaacgtccaagatcgagactcaaatcatggatattaagccaaagaggatctcctcagcggatccggacaagctgcagacagaacctctgagcacttcctttgagatatcaaggaacaagattgaggatggctccgttgtgcttgattcctgcgaagtgagcaccgagaatgaccagagtacaagatttcctaaaccagagctcgagatccagtttactcccttacagcctaataagatggccgtgaaacaccctggatgcactacccccgtgacggtaaagatcccaaaggctcgaaaacggaaatcaaatgaaatggaagaggacttagtcaaatgcgagaataagaaaaatgcaacaccgagaaccaacctgaagtttcccatatccgatgaccggaatagttctgtcaagaaagagcaaaaagttgcaatcagaccctcaagtaaaaagacttatagcctacgcagtcaggccagtataataggagtcaatttggcaacgaaaaaaaaagagggcacactccaaaagtttggggattttctgcagcacagcccctctatcttgcagagtaaagccaagaaaataatagagactatgtcctcatccaagttaagtaatgtggaggccagtaaggagaatgtcagccagcccaaacgagctaaacgtaagctgtatacctcagaaatatcttcccctatcgatatcagtggccaggtgatcctcatggaccagaagatgaaagaatccgaccatcaaatcataaagcgcagacttcgtaccaaaactgctaagtac

SEQ ID NO: 103545 - DNA, 834 bp, Artificial Sequence
  derived and/or modified sequence
atgagcagagagttcagaggccacagaaactgcgtgctgaccctggcctacagcgccccctgggacctgcccagcaccccctgcgccgaggaggccgccgccggcggcctgctggtgaccggcagcaccgacggcaccgccaaggtgtggcaggtggccagcggctgctgccaccagaccctgagaggccacaccggcgccgtgctgtgcctggtgctggacacccccggccacaccgccttcaccggcagcaccgacgccaccatcagagcctgggacatcctgagcggcgagcagctgagagtgttcagagagcacagaggcagcgtgatctgcctggagtgcagcagagccgccggcaccctggcccccggccccagcaccagaagcctggagagctgcggcggctgcagcggcgccacccacagcagcagcaccgccagcagatgcaccgccagatgcagcaccccccccagaaccaccgccccctgcgccagcggcacctgcgccggcagcgaggtgcccagaggccccctgagaccctgcgccgccagcagaggcagcagcgccaccagatgggccgccccccccagaccctgcagcagacccgaccccgccggccccctgcagacccccgcccagacccccagcggcagccagagcgcccccccctgctaccccagatggtggagacccatggccggcgagggcagaggcgccagaaagcccggcagagaggagagccccagccaggccagcggcttcagcctggtggccagaagaagatgggagagagagtgcagcccctggggccccccccccttccccttctag

SEQ ID NO: 103546 - DNA, 834 bp, Artificial Sequence
  derived and/or modified sequence
atgagccgggagttcagaggccaccggaactgcgtgctaacactggcctacagcgccccatgggacctgccatctactccttgcgctgaagaggcagccgcaggcggtctgttagtgactggatccaccgacgggacagccaaagtctggcaagtggccagtggctgctgtcaccaaactctcaggggccataccggcgctgtgctgtgtctggtgcttgacacgccagggcatactgcattcactggatccacggatgcgacaataagagcctgggatatcctctctggggaacagctccgtgtttttagagaacataggggaagtgtgatttgtctggagtgttctcgagccgctggtactctggccccagggccaagcactagatctctggaatcttgcgggggttgttctggcgcaacacactcgagctcaacagcctcacgatgtactgcccgttgcagcactcctccgaggacgacagctccttgtgcgagtggcacgtgtgcgggaagtgaggtccccaggggccccctgagaccttgcgctgcctcacgtggctctagtgccacacgctgggctgctccgcctcgaccttgtagtcggcctgaccctgccggcccacttcagacgcctgctcagacgccctctgggtctcagagcgccccaccttgctacccccgctggtggaggccaatggcaggcgagggcagaggagctcgcaagcctggaagagaggaaagcccaagtcaggcatcaggcttttcgctcgtcgcacgaaggcggtgggaacgagaatgtagcccatggggaccacccccgttcccattttag

SEQ ID NO: 103547 - DNA, 834 bp, Artificial Sequence
  derived and/or modified sequence
atgagccgggagttccggggccacaggaactgtgtgctgaccctggcctacagcgccccctgggacctgcccagcaccccctgtgccgaggaggccgccgccggcggcctgctggtgacaggcagcacagatggaacagccaaggtgtggcaggtggccagcggctgctgccaccagaccctgcggggccacactggagctgtgctgtgcctggtgctggacaccccaggccacacagccttcaccggcagcacagatgccaccatccgggcctgggacatcctgagcggggagcagctgcgggtcttccgggagcaccggggcagcgtcatctgcctggagtgcagcagagctgctggcaccctggcccctggccccagcaccaggagcctggagagctgtggcggctgcagcggggccacccacagcagcagcacagccagccgctgcacagcccgctgcagcaccccacccaggaccacagccccctgtgccagcggcacctgtgccggcagcgaggtgccccggggccccctgcggccctgtgccgccagccggggcagcagcgccacccgctgggccgccccaccccggccctgcagcaggccagaccctgctggccccctgcagaccccagcccagaccccatctggcagccagagcgccccaccctgctacccccgctggtggaggcccatggccggggagggccgcggggccaggaagccaggccgggaggagagccccagccaggccagcggcttcagcctggtggcccggcggcgctgggagcgggagtgcagcccctggggccccccacccttccccttctag

SEQ ID NO: 103548 - DNA, 834 bp, Artificial Sequence
  derived and/or modified sequence
atgagccgggagttccggggccaccggaactgcgtgctgaccctggcttattctgcaccctgggacctcccaagtacaccgtgcgccgaagaggccgccgctgggggacttctggttacgggctctaccgacggcacagccaaggtttggcaggttgctagtggatgttgccaccagacacttcggggccacactggggcagtgctttgcctggtgctggacacacctggacacactgcattcacagggtcaaccgacgccactattagagcttgggatatactgagtggggagcagctgcgagtattccgagaacaccgaggctccgtcatatgtctggaatgttcacgagccgccggtaccttagcacccggtccctccacgcgctcacttgaaagctgcggtgggtgctccggcgccactcatagttctagtacggcgtcacggtgcaccgcccgatgctccacccctcctcgtactacggccccttgcgccagtggaacttgtgcggggagcgaggtgcctcggggcccgctccgcccatgtgccgcgtctagggggtcttctgctactcgctgggctgccccccctaggccttgctcaagacccgatccagcaggtccactacagacaccagcgcagactccaagtggcagccagtccgcccccccttgttaccctcgctggtggcggccaatggcaggggaagggcgcggagcgcgaaaaccaggaagggaggaaagccccagccaggcaagtgggtttagcctcgtcgcccgcaggcgctgggagagagagtgctccccatgggggcccccgccttttcctttctag

SEQ ID NO: 103549 - DNA, 834 bp, Artificial Sequence
  derived and/or modified sequence
atgtctcgagagttcagaggacaccggaactgcgttctgacactggcttactccgctccatgggatctgcccagtacgccatgtgccgaggaagccgcagcagggggactcctggtgacagggtctactgatggcaccgcaaaggtatggcaagtggcctcgggatgctgtcaccagacattgaggggtcatactggtgcggtgttgtgtttggtgctagacactcccggacacacagcctttacaggttcaacggacgccaccatcagagcttgggacatcctgagtggcgagcagcttagagtgttccgtgaacaccggggatctgtgatttgtctggagtgtagtagagccgctggaacattagcaccgggaccctccacaaggtcgctcgagtcatgtggcggttgtagcggcgctacccactcttcttcgaccgcttcacgatgtacagccagatgctcaacgccccctcgcaccaccgccccatgtgccagcggtacctgcgctggaagtgaggtgccccgtggcccactgcggccatgtgccgcttcgaggggctcgtccgctacccgttgggcagctccgcctaggccttgttctaggcccgacccggctggaccactgcaaacacccgctcagactccctctggcagccagtcggcacctccttgttacccacggtggtggaggccaatggctggagaaggaagaggggctagaaagcctggccgagaagaatccccatctcaggcctcgggcttctccctcgtggctcgcaggcgctgggagagagaatgtagtccctggggtcctccaccttttcccttttag

SEQ ID NO: 103550 - DNA, 663 bp, Artificial Sequence
  derived and/or modified sequence
tggggctcggttgttgtagtcgcgatgttcttctccgaggccagagccaggtcgcggacgtgggaagccagtccctcggaacacaggaagtgggtggaagtatttaaagcatgtgatgaagatcacaaaggatatctcagcagagaggactttaaaactgctgttgtaatgctgtttgggtacaagccctccaagatagaagtggattctgtgatgtcttcaataaatccaaatacttctggtatattactcgaggggtttttaaatattgtcaggaaaaagaaggaagctcaacgatatcggaacgaagtaagacacatcttcacagcctttgacacctactatcgtggatttttaactttggaagatttcaaaaaagcatttaggcaggtggctcccaaattaccggaaaggactgttcttgaggtattcagaggcctaaggattttcagcaagtgtttactctgccatattgaccagaagtctaaaaacccctcctctggcctcttagcagctgactccatcattcaggcacacccctcacctgtgcagattctcaggcaaatgtacattaataatgagctagaagggagaggttttatttgggattcatcaatttcctggaggttcatgtggaacatctatggcacaggggagtactga

SEQ ID NO: 103551 - protein, 149 aa, Artificial Sequence
  derived and/or modified sequence
MSSINPNTSGILLEGFLNIVRKKKEAQRYRNEVRHIFTAFDTYYRGFLTLEDFKKAFRQVAPKLPERTVLEVFRGLRIFSKCLLCHIDQKSKNPSSGLLAADSIIQAHPSPVQILRQMYINNELEGRGFIWDSSISWRFMWNIYGTGEY

SEQ ID NO: 103552 - protein, 118 aa, Artificial Sequence
  derived and/or modified sequence
MVFKACDEDHKGYLSREDFKTAVVMLFGYKPSKIEVDSVMSSINPNTSGILLEGFLNIVRKKKEAQRYRNEVRHIFTAFDTYYRGFLTLEDFKKAFRQVAPKLPERTVLEVFRGIFSA

SEQ ID NO: 103553 - DNA, 450 bp, Artificial Sequence
  derived and/or modified sequence
atgagcagcatcaaccccaacaccagcggcatcctgctggagggcttcctgaacatcgtgagaaagaagaaggaggcccagagatacagaaacgaggtgagacacatcttcaccgccttcgacacctactacagaggcttcctgaccctggaggacttcaagaaggccttcagacaggtggcccccaagctgcccgagagaaccgtgctggaggtgttcagaggcctgagaatcttcagcaagtgcctgctgtgccacatcgaccagaagagcaagaaccccagcagcggcctgctggccgccgacagcatcatccaggcccaccccagccccgtgcagatcctgagacagatgtacatcaacaacgagctggagggcagaggcttcatctgggacagcagcatcagctggagattcatgtggaacatctacggcaccggcgagtactag

SEQ ID NO: 103554 - DNA, 357 bp, Artificial Sequence
  derived and/or modified sequence
atggtgttcaaggcctgcgacgaggaccacaagggctacctgagcagagaggacttcaagaccgccgtggtgatgctgttcggctacaagcccagcaagatcgaggtggacagcgtgatgagcagcatcaaccccaacaccagcggcatcctgctggagggcttcctgaacatcgtgagaaagaagaaggaggcccagagatacagaaacgaggtgagacacatcttcaccgccttcgacacctactacagaggcttcctgaccctggaggacttcaagaaggccttcagacaggtggcccccaagctgcccgagagaaccgtgctggaggtgttcagaggcatcttcagcgcctag

SEQ ID NO: 103555 - DNA, 450 bp, Artificial Sequence
  derived and/or modified sequence
atgagcagcatcaaccccaatactagcgggatcctgctcgagggtttcttaaatattgtgaggaagaagaaggaagcccagaggtaccgtaatgaggtcagacatattttcaccgcttttgacacctattacagaggttttttaacccttgaggattttaagaaagcgtttaggcaggtagccccaaagttgcctgagcggacagtgctggaagtcttcagaggtctgaggatattctctaagtgcctgctttgtcacatcgatcaaaagtccaaaaatccgagtagtggtcttctggcggccgactctattatacaggcccaccctagcccggttcagatcttaagacaaatgtatatcaataacgagctggaaggacgtggtttcatttgggatagctctattagctggcggtttatgtggaacatctacgggaccggagaatactag

SEQ ID NO: 103556 - DNA, 357 bp, Artificial Sequence
  derived and/or modified sequence
atggtgttcaaagcatgcgatgaggaccacaagggctacttgagccgtgaagactttaagacagcagtggtgatgttgttcgggtataaaccttctaaaattgaggttgattccgtgatgagttcgatcaaccctaacacaagcggaattctcctggagggatttttgaacattgtgcggaagaagaaagaggcacaacggtacaggaatgaggtgaggcatattttcaccgcttttgacacctattaccggggattccttactctggaagactttaagaaggcctttcgccaggtggcaccaaagctgcccgaacgaactgtgttagaggtatttaggggcatcttttcggcttag

SEQ ID NO: 103557 - DNA, 1856 bp, Artificial Sequence
  derived and/or modified sequence
tcccgtgtctgggtctcactctgccgggtgtgcagataagacctgggctgcctgtccaaagggtcgtggttaatgactgatcctggagctgcagggctcctggctccccgtccaggactacggctacctccaagttccatctcctttctctctatatagtctattaatggtatttaaagcatgtgatgaagatcacaaaggatatctcagcagagaggactttaaaactgctgttgtaatgctgtttgggtacaagccctccaagatagaagtggattctgtgatgtcttcaataaatccaaatacttctggtatattactcgaggggtttttaaatattgtcaggaaaaagaaggaagctcaacgatatcggaacgaagtaagacacatcttcacagcctttgacacctactatcgtggatttttaactttggaagatttcaaaaaagcatttaggcaggtggctcccaaattaccggaaaggactgttcttgaggtattcagaggcattttcagtgcatgatttaacttcggctgtcatcaggaagctgacttaaagttctttcttgactttgcctgccatcaacaccctgtggtatttctggctggcatttttctctgcatggatatgtttacttctccatgcctaggaaccttctccatctcattgtaagcactgctatttgtacattcccaccacctgtcagttggcaaaaagctctgggaagctgcttttgcttcccagtcatgagatgaaatgtgaatgtgcataaggtccatgccctgacccagcgtccaagatcctgagtgcacaggcagattgccacatgatgatgtaaagtggcaatatcgaggcaccaaatgctcccatcatgactggagacgtttaaagttatatcctgatatttttggtgtaagaatccctttcttcatattacacaagggaaggtcaaaggacataggacatctaactctccttttttgaatattagaaattgggtgaaaatgagaatgtcattgcttgttgaataagatattttcaaaatcagagtattagtgggggctgggtcttaggaatgcaattgtaaaagggagtgatggatattcccttggcagaaaaattatatagatgttatatcacagccattataggggtaaggactgtcaccagcttgggtaaaacaaataggctcttctgttatgctgattggaagagtcttacagagctgagggcctaaaggaaagtgatttcagagaacatttactttttcaagtcatttgcgtctcttttgaaatgttatttctcactgtaatttttagcttcccataattcctttctgccagcagccaacttgtggagtatcattttcctggtccatctctaacaagagaaaatttccagtcattattttgtgcttcagaatgattctgtgtatgatcatgcaacttcagtaagatcacagttattaaaatgagtacctaatttagtgactatgactattggtctttgagtatctgcctgcttccaggtatagaaacatccataaaaacacctacaaatcatatttcattctttgtagccatacatagataacagtcatcagctataccttctgtgtgaatggcatgaccgaagaagtagacttcttgaggtcccaacttttatttcatgaaattttgtgtcttctctggaatggaaatgctttagtttttatttcaatggttttgtttcaaaattatattgtcagagattcccttttctgattgtcctgttgcacatgcttataagatggggagtatgaatgtgtgtaagcttttcaagctgacctcagaatttcctctctgagggacttcta

SEQ ID NO: 103558 - DNA, 450 bp, Artificial Sequence
  derived and/or modified sequence
atgagcagcatcaaccccaacaccagcggcatcctgctggagggcttcctgaacatcgtgaggaagaagaaggaggcccagcgctacagaaatgaggtgcgccacatcttcaccgcctttgacacctactaccggggcttcctgaccctggaggacttcaagaaggccttccggcaggtggcccccaagctgcctgagaggacagtgctggaggtgttccggggcctgcgcatcttcagcaagtgcctgctgtgccacatcgaccagaagagcaagaaccccagcagcggcctgctggccgctgacagcatcatccaggcccaccccagccctgtgcagatcctgcggcagatgtacatcaacaatgagctggagggccggggcttcatctgggacagcagcatctcctggaggttcatgtggaacatctacggcaccggggagtactag

SEQ ID NO: 103559 - DNA, 357 bp, Artificial Sequence
  derived and/or modified sequence
atggtgttcaaggcctgtgatgaggaccacaagggctacctgagccgggaggacttcaagacagctgtggtgatgctgtttggctacaagcccagcaagattgaggtggacagcgtgatgagcagcatcaaccccaacaccagcggcatcctgctggagggcttcctgaacatcgtgaggaagaagaaggaggcccagcgctacagaaatgaggtgcgccacatcttcaccgcctttgacacctactaccggggcttcctgaccctggaggacttcaagaaggccttccggcaggtggcccccaagctgcctgagaggacagtgctggaggtgttccggggcatcttcagcgcctag

SEQ ID NO: 103560 - DNA, 450 bp, Artificial Sequence
  derived and/or modified sequence
atgagcagcatcaaccccaacaccagcggcatcctgctggagggcttcttgaacatcgtgagaaaaaagaaggaagctcaaagatatcggaacgaagtcaggcacatattcactgcctttgacacttattaccgcggctttcttacccttgaagattttaaaaaggcattcagacaggtggcccctaagttacccgagcggaccgtccttgaggttttccgcggcctgcggatcttctcaaagtgcctgctatgccacatcgaccagaaatcgaagaaccctagtagtggactcctggctgctgactccattatacaggcacacccgtcccccgtgcaaatcttacgacagatgtacatcaacaacgagctggaagggcggggcttcatttgggattcttcaatctcttggaggtttatgtggaatatttacggtactggcgagtactag

SEQ ID NO: 103561 - DNA, 357 bp, Artificial Sequence
  derived and/or modified sequence
atggtgttcaaggcctgcgacgaggaccacaagggctacctgagcagggaagactttaagaccgctgttgtcatgctcttcgggtataaaccgagtaaaattgaggttgacagcgtcatgagttctatcaaccccaacacctcgggaattctcctggagggtttcctcaacatagtccgaaaaaagaaagaggcccaacggtacagaaacgaggtgcgtcacatattcactgcatttgacacctactatagagggtttcttacattagaagactttaagaaagccttccggcaagtcgccccaaaactccccgagcgaacagtcctcgaggtttttcgcggcatttttagcgcctag

SEQ ID NO: 103562 - DNA, 450 bp, Artificial Sequence
  derived and/or modified sequence
atgtcaagcatcaacccaaacacctctggaattctgctcgagggatttcttaacatcgtccgcaagaaaaaagaagctcagagataccggaatgaggtgcgtcatatctttactgcctttgacacctactaccggggttttctgacattagaggatttcaagaaggctttccgccaggtcgccccaaagctccccgaaaggacagtgctggaggttttccgtggattgaggattttctccaagtgcctactctgccatatagatcagaaatccaagaacccctcaagcggactgcttgctgccgactcgatcatccaggctcacccatcccctgtgcagattctccggcagatgtacataaacaacgagctagaggggcgtggcttcatctgggatagttctatctcatggcgctttatgtggaacatttatggaactggagagtactag

SEQ ID NO: 103563 - DNA, 357 bp, Artificial Sequence
  derived and/or modified sequence
atggtgttcaaagcctgcgatgaggaccacaagggctacctatcaagggaggacttcaagactgccgtggtcatgctctttgggtacaagccatctaagattgaagtggacagtgtgatgtcttccatcaatccgaatacgtcaggcattttactagaaggtttccttaatatagtcaggaagaaaaaggaagcccagcgctaccgaaacgaagtgagacacatcttcacagccttcgacacgtattatagagggtttctgacactcgaggattttaaaaaagcttttcgacaggtggcaccaaaactgcctgagcgaaccgtgcttgaagtgttcaggggtattttcagtgcttag

SEQ ID NO: 103564 - protein, 139 aa, Artificial Sequence
  derived and/or modified sequence
MVFKACDEDHKGYLSREDFKTAVVMLFGYKPSKIEVDSVMSSINPNTSGILLEGFLNIVRKKKEAQRYRNEVRHIFTAFDTYYRGFLTLEDFKKAFRQVAPKLPERTVLEVFREVDRDSDGHVSFRDFEYALNYGQKEA

SEQ ID NO: 103565 - DNA, 420 bp, Artificial Sequence
  derived and/or modified sequence
atggtgttcaaggcctgcgacgaggaccacaagggctacctgagcagagaggacttcaagaccgccgtggtgatgctgttcggctacaagcccagcaagatcgaggtggacagcgtgatgagcagcatcaaccccaacaccagcggcatcctgctggagggcttcctgaacatcgtgagaaagaagaaggaggcccagagatacagaaacgaggtgagacacatcttcaccgccttcgacacctactacagaggcttcctgaccctggaggacttcaagaaggccttcagacaggtggcccccaagctgcccgagagaaccgtgctggaggtgttcagagaggtggacagagacagcgacggccacgtgagcttcagagacttcgagtacgccctgaactacggccagaaggaggcctag

SEQ ID NO: 103566 - DNA, 420 bp, Artificial Sequence
  derived and/or modified sequence
atggtgtttaaggcttgtgacgaggatcacaagggatatttgtcacgggaggactttaagaccgcagttgttatgctgttcggctataagccctccaagatagaggtcgacagcgtcatgagcagtattaaccccaatacttccggaattttgctggagggattcctcaatatagtacggaagaaaaaggaggcccaacgctaccgaaacgaggtgcgccatatcttcacagccttcgacacttactaccgggggttcttaaccctcgaggattttaagaaagccttccgacaggtcgctcccaagcttcccgaacggactgtcttggaggtgtttagggaggttgatcgggattccgacgggcatgtgtcgttcagagacttcgaatacgccttgaactatggtcagaaagaggcctag

SEQ ID NO: 103567 - DNA, 2716 bp, Artificial Sequence
  derived and/or modified sequence
ggacttcagcttggcctgggcctctcgcttcctctcccgtgtctgggtctcactctgccgggtgtgcagataagacctgggctgcctgtccaaagggtcgtggttaatgactgatcctggagctgcagggctcctggctccccgtccaggactacggctacctccaagttccatctcctttctctctatatagtctattaatggtatttaaagcatgtgatgaagatcacaaaggatatctcagcagagaggactttaaaactgctgttgtaatgctgtttgggtacaagccctccaagatagaagtggattctgtgatgtcttcaataaatccaaatacttctggtatattactcgaggggtttttaaatattgtcaggaaaaagaaggaagctcaacgatatcggaacgaagtaagacacatcttcacagcctttgacacctactatcgtggatttttaactttggaagatttcaaaaaagcatttaggcaggtggctcccaaattaccggaaaggactgttcttgaggtattcagggaagtagatcgagattcagatggtcacgtcagctttagagactttgaatatgccctgaactatggacagaaggaagcctaactattgtgaactacttttggtaactctggggagatcaatagattgtaatgtcagcagactcgactctactaatgatgtcatgctacagacttgtgattaaacatttaaaaatttttaatttttgtgggtacatagtaggtgcatatgtatacatacacacacatatatgggttacgggagatattttggcacaggcatgcaataagtaattgactaaatttttaatcataatttttggatgctgatgatagacttgcatctcagaatcctagagatggttgctgccgggggtctccttctgtgtggccagcagccctgagtcaggccgccattgctagagctggggctagggatggcactggtggtcctcctcctcctcactcttcttgccccctaccctctccacactgcaggccacggtgctctactcactcacttcattgtcctcaccatcccaccctgaatctcatcatctcctaatatctgcagaggggcagacttttcctgccaatggtgccagtttccttcatttgctcaacattggttgaacaaataatagcacctacacatacagaatacttactatgttccaagcaatcagccaggccttgggaagcataggcttaagacttctctaagataggctcatgcctacaatcccagcactttgggaggccaaagcaggaggatcacttgagcctaggaattggagactagcctgggcaacataccgagaccccatccctaccaaaaaattaataataaaaaattatctggatttagtggtgtgtacctgtagtcccagctacttgggaggctgaggtggaaggatcatttgagcccaggggtttgaagcttcagtgagccatgattgcactgtcgcactccagcctggatgatagagcaagaccctgtctctaaaaaaacactttcaattaaaaaaaaacatataaagacttctctaagataatgtccctgagtccaaatcatcactgtaaagtggtcccagggcactgtctgtgcaagacaaagaaatcggcttgggctaacatgagcaagccctctcgggctatatacagaggaagaacagggtgatgagggtactgggggcaagagacatgtttgcagaaccctttaggatggtctaggcttgggagtctcactgtggagaagcaagccttgagctgctcagctgccctctgctccataccccctggtttctagcagtcacgtcctgcacccagacacttagccatgtgtgttcacgttccccatgccttgcctgtcctgctgggctccagtaactgctatactggagcaagaacagcaatgctggacactcagcatttagtgaaggtaattccaaaatactggtatcagtactcttatttataagtgtacggaatgcataacatgaacattagtcaaagaacttttaatataattcactttttaagtgttaaaatttaaaggtcaagtaaaattgtaaatttgtaatatggaaacattaagcgtcattatcatacaaattattagcagataaccttaataaaaataaacgtttgcgggttttttttgagacagagtctcactttgtcacctaagctggagtacagtgcgcgatctcggctcactgcaacttccgcctcctgggatcaagtgattctcctgccttagcctcctgagtatctgggtttacaggtgtgtaccgccacacccggctaatttttagtagagaaggggtttcaccatgttggccaggctggtcttgaactcctgacctcaagtgatccgtctgcctcggcctcccaaagtgctgggattacaggcgtgagccaccatgcctggccaataaaaataaagttttaaactgtcaaataagaggagcctaacaagatgtgacaactaaatgtcatttggtatcctggatgagatcacggaataaaaaataaacattggccggacacagtgactcagcctgtaatcccagcacttcgggaggccgaggcgggtggatcacgaggtcgggagatcgagaccatcctggctaacacggtgaaaccccgtctctactaaaaatacaaaaaacaaaaaaa

SEQ ID NO: 103568 - DNA, 420 bp, Artificial Sequence
  derived and/or modified sequence
atggtgttcaaggcctgtgatgaggaccacaagggctacctgagccgggaggacttcaagacagctgtggtgatgctgtttggctacaagcccagcaagattgaggtggacagcgtgatgagcagcatcaaccccaacaccagcggcatcctgctggagggcttcctgaacatcgtgaggaagaagaaggaggcccagcgctacagaaatgaggtgcgccacatcttcaccgcctttgacacctactaccggggcttcctgaccctggaggacttcaagaaggccttccggcaggtggcccccaagctgcctgagaggacagtgctggaggtgttccgggaggtggaccgggacagtgatggccacgtgtccttccgggactttgaatatgccctgaactacggccagaaggaggcctag

SEQ ID NO: 103569 - DNA, 420 bp, Artificial Sequence
  derived and/or modified sequence
atggtgttcaaggcctgcgacgaggaccacaagggctacctgagccgggaggatttcaaaacggccgtggtcatgctgttcggttataagccatccaagattgaagtggactccgtgatgagcagcatcaatccaaatacgtctggtatactgctcgagggttttttgaatatcgtgaggaaaaagaaagaggcacaacgttaccgaaatgaggtgcgacatatctttactgcattcgatacgtattatagagggttcctgaccttggaggactttaagaaggcctttagacaggttgcgccaaaactgccagaacggactgtcctggaggtatttcgggaagtggatagggactcggatgggcatgtcagcttccgtgacttcgaatacgcactcaattatggccagaaggaggcttag

SEQ ID NO: 103570 - DNA, 420 bp, Artificial Sequence
  derived and/or modified sequence
atggtgtttaaagcctgcgacgaggaccacaaggggtatctgtctagggaagacttcaagacagcagtagtgatgttgtttgggtataagccaagtaagatcgaggttgactctgtgatgtcctccatcaatccaaatacgagcggcatcctgctggaggggttcctgaatattgttcgcaaaaagaaagaggcccagagatatcggaacgaggtcagacatatctttactgcctttgatacttactatcgcggatttctgaccttggaggatttcaaaaaagccttcagacaagtggccccaaagttaccagagcggaccgttttagaggtgtttagggaggtcgacagagactcagatggacatgtgtccttccgggattttgagtatgccctcaactacggccaaaaggaggcttag

SEQ ID NO: 103571 - protein, 176 aa, Artificial Sequence
  derived and/or modified sequence
MALPRLTGALRSFSNVTKQDNYNEEVADLKIKRSKLHEQVLDLGLTWKKIIKFLNEKLEKSKMQSINEDLKDILHAAKQIVGTDNGREAIESGAAFLFMTFHLKDSVGHKETKAIKQMFGPFPSSSATAACNATNRIISHFSQDDLTALVQMTEKEHGDRVFFGKNLAFSFDMHDL

SEQ ID NO: 103572 - DNA, 531 bp, Artificial Sequence
  derived and/or modified sequence
atggctctgccgcggctgacaggagcactgcggagcttctcgaatgttacaaagcaagacaactataacgaggaagttgctgaccttaagatcaagaggtccaagcttcacgaacaggtcctcgatctggggttgacctggaagaaaatcattaagttcctgaacgaaaagctggagaaatccaagatgcagagcatcaatgaggaccttaaagacatcctacatgctgctaagcaaattgtgggcacagacaacgggagggaggctatcgagtcgggcgctgcattcctgttcatgacgttccatctgaaagactcagtcggccacaaggagaccaaggccattaagcagatgttcggacctttcccctcttcttctgctaccgcagcctgtaacgctacaaataggattatttcacactttagccaagacgacctgaccgcgctcgtgcagatgaccgaaaaagaacacggagacagggtgttttttgggaaaaatctagctttctcgttcgatatgcatgatctgtag

SEQ ID NO: 103573 - DNA, 531 bp, Artificial Sequence
  derived and/or modified sequence
atggccctgccccggctgactggagccctgcggagcttcagcaatgtgaccaagcaggacaactacaatgaggaggtggccgacctgaagatcaagaggagcaagctgcacgagcaggtgctggacctgggcctgacctggaagaagatcatcaagttcctgaatgagaagctggagaagagcaagatgcagagcatcaatgaagacctgaaggacatcctgcacgccgccaagcagatcgtgggcacagacaatggccgggaggccatcgagagcggggccgccttcctgttcatgaccttccacctgaaggacagcgtgggccacaaggagaccaaggccatcaagcagatgtttggccccttccccagcagcagcgccacagctgcctgcaatgccaccaaccgcatcatcagccacttcagccaggatgacctgacagccctggtgcagatgacagagaaggagcacggggacagagtcttcttcggcaagaacctggccttctcctttgacatgcatgacctgtag

SEQ ID NO: 103574 - DNA, 531 bp, Artificial Sequence
  derived and/or modified sequence
atggccctgccccggctgaccggcgccctgcggagcttcagcaacgtcaccaaacaagacaattataatgaagaggtggctgacctgaagataaaacggagcaagctccatgagcaggtccttgaccttgggctgacgtggaagaagatcatcaagtttctcaatgagaaacttgagaaaagtaagatgcagtccatcaacgaggacctgaaggacatattgcatgcggccaaacagattgtcggcacagataatggtagagaagctatcgagtctggagctgccttcctgtttatgacctttcatcttaaagattcagttggccataaagaaaccaaagccatcaagcagatgttcgggccatttccctcatcctctgctacagccgcatgtaacgccacaaataggataatttcacacttttcacaggacgatctgacagctttggttcagatgaccgagaaagagcatggcgatagggtgttctttggcaagaacctggcattcagctttgacatgcacgacctgtag

SEQ ID NO: 103575 - DNA, 531 bp, Artificial Sequence
  derived and/or modified sequence
atggcgctcccccgtcttaccggcgctctgaggtccttttccaacgtgactaagcaggacaactataacgaggaggtcgcagacctaaaaatcaagagatctaagcttcacgaacaagtgctcgacttaggcctgacgtggaagaaaataattaagtttcttaatgagaaactggaaaaatcaaagatgcagtccattaacgaagatctgaaagatatactgcacgctgctaagcagatcgttggcactgataacggaagagaagccattgaatctggtgcagctttcttattcatgacatttcacctgaaggacagcgtgggacacaaagagacaaaggcgataaagcagatgttcggcccattcccgtcatccagcgctacagccgcatgcaatgccacaaacagaataatatctcatttctcacaggatgatttgaccgcgctggtgcagatgacagagaaagagcacggcgacagggtgttcttcggcaagaatttggcctttagcttcgacatgcacgatctgtag

SEQ ID NO: 103576 - DNA, 852 bp, Artificial Sequence
  derived and/or modified sequence
gtaggccggcgccagctccactctgtccctcctcgccgggtctgtgcgtctttgcgtctgtctgtctgactgatggtcctcacacgcggttccctgtgactgggcgcgaccccggcaagcgcggcttggagggcggacggggcgcggcgatacagctgcccgctcgcatctttggccctgcgctcagctcctcacccggcgtgggaagttaaagtaaaaccgaaagggaagaaggcgcggtggcaggagctgacagagtgatgggaaacgcgtgagccaggccgagaggtttcttgctgtatggatcactgattgaataatagatggctttacctcgtctcacaggagccttgcgttccttttcaaatgtcaccaagcaagataattataatgaagaagtggctgacttaaagataaagcgatctaaacttcatgaacaagttttagatttgggcctgacatggaagaagataataaaatttttgaatgaaaaactggagaagagtaaaatgcaaagtataaatgaagacttaaaagatatattacatgctgcaaagcagatagttggaactgataatgggagagaagcaattgaaagtggggctgcatttctcttcatgacatttcacttgaaggactctgttggtcacaaggaaacaaaggctatcaaacagatgtttggcccctttccttcatcatctgccactgcagcttgtaatgctactaatcgaattatttctcattttagtcaagatgatcttactgctcttgtgcagatgacagaaaaagaacatggcgatagggttttttttggtaaaaatttagcattttcatttgacatgcatgatttgg

SEQ ID NO: 103577 - DNA, 531 bp, Artificial Sequence
  derived and/or modified sequence
atggccctgcccagactgaccggcgccctgagaagcttcagcaacgtgaccaagcaggacaactacaacgaggaggtggccgacctgaagatcaagagaagcaagctgcacgagcaggtgctggacctgggcctgacctggaagaagatcatcaagttcctgaacgagaagctggagaagagcaagatgcagagcatcaacgaggacctgaaggacatcctgcacgccgccaagcagatcgtgggcaccgacaacggcagagaggccatcgagagcggcgccgccttcctgttcatgaccttccacctgaaggacagcgtgggccacaaggagaccaaggccatcaagcagatgttcggccccttccccagcagcagcgccaccgccgcctgcaacgccaccaacagaatcatcagccacttcagccaggacgacctgaccgccctggtgcagatgaccgagaaggagcacggcgacagagtgttcttcggcaagaacctggccttcagcttcgacatgcacgacctgtag

SEQ ID NO: 103578 - protein, 147 aa, Artificial Sequence
  derived and/or modified sequence
LSQKRFKQLVERLLQFISLRLFPAKPEEFPPITKCSWWIPSAAKVLALLNTANNLVHPPLIPYTDFYNSTLDHIDLMEEYHTWQNFGNSHRMAVRIKRNYTHTIILYMVKHNPKVMFYIATRGTLDSLSIILLKIHHFAFSFFHLLS

SEQ ID NO: 103579 - protein, 780 aa, Artificial Sequence
  derived and/or modified sequence
MSEAVRVPSPATPLVVAAPAPEERKGKESEREKLPPIVSAGAGATAGLDRGAKGQISTFSSFISAVSPKKEAAENRSSPAHLVFPNIKNVREPPPICLDVRQKQRTSMDASSSEMKAPVLPEPILPIQPKTVKDFQEDVEKVKSSGDWKAVHDFYLTTFDSFPELNAAFKKDATASFNTIEDSGINAKFVNAVYDTLLNTPQDVQKTVLKGIINSLLREWKGPRTKDDLRAYFILLQNPQFNNTSTYVIYAHLLRQIATLVEADHHFLVHWFKKQYSRLSQKRFKQLVERLLQFISLRLFPAKPEEFPPITKCSWWIPSAAKVLALLNTANNLVHPPLIPYTDFYNSTLDHIDLMEEYHTWQNFGNSHRFSFCQYPFVISVAAKKIIIQRDSEQQMINIARQSLVDKVSRRQRPDMNILFLNMKVRRTHLVSDSLDELTRKRADLKKKLKVTFVGEAGLDMGGLTKEWFLLLIRQIFHPDYGMFTYHKDSHCHWFSSFKCDNYSEFRLVGILMGLAVYNSITLDIRFPPCCYKKLLSPPIIPSDQNIPVGICNVTVDDLCQIMPELAHGLSELLSHEGNVEEDFYSTFQVFQEEFGIIKSYNLKPGGDKISVTNQNRKEYVQLYTDFLLNKSIYKQFAAFYYGFHSVCASNALMLLRPEEVEILVCGSPDLDMHALQRSTQYDGYAKTDLTIKYFWDVVLGFPLDLQKKLLHFTTGSDRVPVGGMADLNFKISKNETSTNCLPVAHTCFNQLCLPPYKSKKDLKQKLIIGISNSEGFGLE

SEQ ID NO: 103580 - protein, 365 aa, Artificial Sequence
  derived and/or modified sequence
MNILFLNMKVRRTHLVSDSLDELTRKRADLKKKLKVTFVGEAGLDMGGLTKEWFLLLIRQIFHPDYGMFTYHKDSHCHWFSSFKCDNYSEFRLVGILMGLAVYNSITLDIRFPPCCYKKLLSPPIIPSDQNIPVGICNVTVDDLCQIMPELAHGLSELLSHEGNVEEDFYSTFQVFQEEFGIIKSYNLKPGGDKISVTNQNRKEYVQLYTDFLLNKSIYKQFAAFYYGFHSVCASNALMLLRPEEVEILVCGSPDLDMHALQRSTQYDGYAKTDLTIKYFWDVVLGFPLDLQKKLLHFTTGSDRVPVGGMADLNFKISKNETSTNCLPVAHTCFNQLCLPPYKSKKDLKQKLIIGISNSEGFGLE

SEQ ID NO: 103581 - DNA, 2343 bp, Artificial Sequence
  derived and/or modified sequence
atgagcgaggccgtgagagtgcccagccccgccacccccctggtggtggccgcccccgcccccgaggagagaaagggcaaggagagcgagagagagaagctgccccccatcgtgagcgccggcgccggcgccaccgccggcctggacagaggcgccaagggccagatcagcaccttcagcagcttcatcagcgccgtgagccccaagaaggaggccgccgagaacagaagcagccccgcccacctggtgttccccaacatcaagaacgtgagagagcccccccccatctgcctggacgtgagacagaagcagagaaccagcatggacgccagcagcagcgagatgaaggcccccgtgctgcccgagcccatcctgcccatccagcccaagaccgtgaaggacttccaggaggacgtggagaaggtgaagagcagcggcgactggaaggccgtgcacgacttctacctgaccaccttcgacagcttccccgagctgaacgccgccttcaagaaggacgccaccgccagcttcaacaccatcgaggacagcggcatcaacgccaagttcgtgaacgccgtgtacgacaccctgctgaacaccccccaggacgtgcagaagaccgtgctgaagggcatcatcaacagcctgctgagagagtggaagggccccagaaccaaggacgacctgagagcctacttcatcctgctgcagaacccccagttcaacaacaccagcacctacgtgatctacgcccacctgctgagacagatcgccaccctggtggaggccgaccaccacttcctggtgcactggttcaagaagcagtacagcagactgagccagaagagattcaagcagctggtggagagactgctgcagttcatcagcctgagactgttccccgccaagcccgaggagttcccccccatcaccaagtgcagctggtggatccccagcgccgccaaggtgctggccctgctgaacaccgccaacaacctggtgcacccccccctgatcccctacaccgacttctacaacagcaccctggaccacatcgacctgatggaggagtaccacacctggcagaacttcggcaacagccacagattcagcttctgccagtaccccttcgtgatcagcgtggccgccaagaagatcatcatccagagagacagcgagcagcagatgatcaacatcgccagacagagcctggtggacaaggtgagcagaagacagagacccgacatgaacatcctgttcctgaacatgaaggtgagaagaacccacctggtgagcgacagcctggacgagctgaccagaaagagagccgacctgaagaagaagctgaaggtgaccttcgtgggcgaggccggcctggacatgggcggcctgaccaaggagtggttcctgctgctgatcagacagatcttccaccccgactacggcatgttcacctaccacaaggacagccactgccactggttcagcagcttcaagtgcgacaactacagcgagttcagactggtgggcatcctgatgggcctggccgtgtacaacagcatcaccctggacatcagattccccccctgctgctacaagaagctgctgagcccccccatcatccccagcgaccagaacatccccgtgggcatctgcaacgtgaccgtggacgacctgtgccagatcatgcccgagctggcccacggcctgagcgagctgctgagccacgagggcaacgtggaggaggacttctacagcaccttccaggtgttccaggaggagttcggcatcatcaagagctacaacctgaagcccggcggcgacaagatcagcgtgaccaaccagaacagaaaggagtacgtgcagctgtacaccgacttcctgctgaacaagagcatctacaagcagttcgccgccttctactacggcttccacagcgtgtgcgccagcaacgccctgatgctgctgagacccgaggaggtggagatcctggtgtgcggcagccccgacctggacatgcacgccctgcagagaagcacccagtacgacggctacgccaagaccgacctgaccatcaagtacttctgggacgtggtgctgggcttccccctggacctgcagaagaagctgctgcacttcaccaccggcagcgacagagtgcccgtgggcggcatggccgacctgaacttcaagatcagcaagaacgagaccagcaccaactgcctgcccgtggcccacacctgcttcaaccagctgtgcctgcccccctacaagagcaagaaggacctgaagcagaagctgatcatcggcatcagcaacagcgagggcttcggcctggagtag

SEQ ID NO: 103582 - DNA, 2343 bp, Artificial Sequence
  derived and/or modified sequence
atgtccgaggcggtaagggtaccatctcctgctacccccttagttgttgccgctcctgccccggaggagcggaagggcaaggagtccgagagggagaaattgccgcctattgtgagcgccggcgccggcgccactgccggtttagatagaggcgccaaggggcagatctcaactttctccagcttcatatctgcagtgtcccctaagaaggaagccgcagagaataggagctctcctgcccacctcgtgttcccgaacataaagaacgtcagagagccaccgcctatctgcttggacgtcagacagaaacaaaggacaagcatggatgcctccagcagcgagatgaaagcccctgtgctaccggaaccaatcctcccaatccagcccaagaccgtgaaagacttccaggaggacgtggaaaaggtgaagtcctccggggattggaaagccgtgcacgatttctaccttaccactttcgacagctttcctgagctcaacgccgccttcaagaaggacgctaccgcgtcctttaacacaattgaagatagcggaataaacgctaagtttgttaacgcagtgtacgacacactcttgaatacccctcaggacgtgcagaagaccgtgctaaaagggatcatcaactccctcttgagggagtggaaagggcccagaaccaaagatgacttgcgggcctattttatactactgcagaatccccagtttaacaatacaagcacgtatgtgatttacgctcacttgctaaggcagatcgcgacactagttgaggctgaccaccactttctggtgcattggttcaagaaacagtatagccgcctaagccaaaaacgcttcaaacagcttgtcgaaagactcctccagtttattagtctccggctctttcccgcaaagccagaggaattcccgcccattacaaagtgttcatggtggatcccaagcgctgcgaaggtgttggctctgctgaacacggccaataacctggtgcacccccctctgatcccatacaccgacttttataatagcactctcgaccatatcgatctgatggaagagtaccacacatggcagaacttcgggaatagccatcgattttctttttgtcagtacccttttgtgataagcgtcgctgctaagaaaattatcatccagagggactctgaacagcagatgatcaatattgctcgacagtctctggtggataaagtatcccggcgccagcggcctgatatgaatattctgttcctgaatatgaaggtgcgtcggacacaccttgtgagtgacagcctcgacgagctcacccggaagcgagcggacctgaagaagaaattaaaagttacatttgttggagaggccggcctggacatggggggactgactaaggagtggtttctgctgctcattcgacaaatcttccaccccgactatggcatgttcacctatcacaaagactcccattgccactggttcagcagtttcaagtgtgataattatagtgagttccgcttggtcgggattctaatgggcctggcagtatacaactccattactctggacatccgctttcccccgtgctgctataagaaacttttgtcgcccccaattatacccagcgatcagaacattcccgtgggtatttgcaacgtcacagtggacgacctttgccaaataatgcccgagctagcacacggcctgtcagaactgctcagccacgaagggaacgttgaggaggatttctattctacgttccaggtcttccaggaagagttcggcattattaagagttataaccttaagccaggcggcgataagatctccgtaactaaccagaacaggaaggaatacgtccaactatataccgacttcctcctgaacaagtccatatataaacaatttgctgcgttttactatggctttcatagcgtttgtgcctccaatgctctgatgctgctgcggcctgaagaagtagaaatattagtttgtggaagccccgacctagacatgcacgcactgcaaagaagcacacaatatgacggatacgcgaaaaccgatcttactatcaagtatttttgggacgtggtgctgggttttcctctcgacctgcagaagaagctcctacatttcacaacgggttcagatcgcgtccctgttggcggtatggctgatctcaatttcaaaatcagtaagaacgagacaagcacgaattgtcttcccgtggcacatacctgtttcaaccagttgtgcctgccaccctataaatctaagaaggacctgaaacagaagctcatcataggaatttcaaactcggaggggtttggcttggaatag

SEQ ID NO: 103583 - DNA, 2343 bp, Artificial Sequence
  derived and/or modified sequence
atgtctgaggccgtgcgggtgcccagccctgccacccccctggtggtggccgccccagcccctgaggagaggaagggcaaggagagcgagcgggagaagctgccccccatcgtgtctgctggggccggggccacagctggcctggacagaggagccaagggccagatcagcaccttcagcagcttcatctctgctgtgagccccaagaaggaggccgctgagaacagaagcagccctgcccacctggtgttccccaacatcaagaatgtgcgggagcccccacccatctgcctggatgtgcggcagaagcagaggacctccatggatgccagcagcagcgagatgaaggcccctgtgctgcctgagcccatcctgcccatccagcccaagacagtgaaggacttccaggaggatgtggagaaggtgaagagcagcggggactggaaggctgtgcatgacttctacctgaccacctttgacagcttccctgagctgaatgctgccttcaagaaggatgccacagccagcttcaacaccattgaagattctggcatcaatgccaagtttgtgaatgctgtgtatgacaccctgctgaacaccccccaggatgtgcagaagacagtgctgaagggcatcatcaacagcctgctgcgggagtggaagggccccaggaccaaggatgacctgcgggcctacttcatcctgctgcagaacccccagttcaacaacaccagcacctacgtgatctatgcccacctgctgcggcagatcgccaccctggtggaggccgaccaccacttcctggtgcactggttcaagaagcagtacagccggctgagccagaagcgcttcaagcagctggtggagcggctgctgcagttcatcagcctgcggctcttccctgccaagccagaggagttcccccccatcaccaagtgctcctggtggatccccagcgctgccaaggtgctggccctgctgaacacagccaacaacctggtgcaccccccactcatcccctacacagacttctacaacagcaccctggaccacatcgacctgatggaggagtaccacacctggcagaactttggaaacagccaccgcttctccttctgccagtacccctttgtgatctctgtggccgccaagaagatcatcatccagagggacagcgagcagcagatgatcaacatcgcccggcagagcctggtggacaaggtgtcccggcggcagaggccagacatgaacatcctcttcctgaacatgaaggtgcggaggacccacctggtgtctgacagcctggatgagctgaccaggaagagagctgacctgaagaagaagctgaaggtgacctttgtgggggaggccggcctggacatgggcggcctgaccaaggagtggttcctgctgctgatccggcagatcttccacccagactatggcatgttcacctaccacaaggacagccactgccactggttcagcagcttcaagtgtgacaactacagcgagttccggctggtgggcatcctgatgggcctggccgtgtacaacagcatcaccctggacatccgcttccccccctgctgctacaagaagctgctgagcccccccatcatccccagcgaccagaacatccctgtgggcatctgcaatgtgacagtggatgacctgtgccagatcatgcctgagctggcccacggcctgtctgagctgctgagccatgagggcaatgtggaggaggacttctacagcaccttccaggtgttccaggaggagtttggcatcatcaagagctacaacctgaagccaggaggagacaagatctctgtgaccaaccagaacaggaaggagtatgtgcagctgtacacagacttcctgctgaacaagagcatctacaagcagtttgctgccttctactacggcttccacagcgtgtgtgccagcaatgccctgatgctgctgcggcctgaggaggtggagatcctggtgtgtggcagcccagacctggacatgcacgccctgcagaggagcacccagtatgatggctacgccaagacagacctgaccatcaagtacttctgggatgtggtgctgggcttccccctggacctgcagaagaagctgctgcacttcaccactggaagtgacagagtgcctgtgggcggcatggctgacctgaacttcaagatcagcaagaatgagaccagcaccaactgcctgcctgtggcccacacctgcttcaaccagctgtgcctgcccccctacaagagcaagaaggacctgaagcagaagctgatcatcggcatcagcaacagcgagggcttcggcctggagtag

SEQ ID NO: 103584 - DNA, 4354 bp, Artificial Sequence
  derived and/or modified sequence
gacctcagctggaaatgtgcatgtcaggagactaacatctttcacatgtccccaaatgaccatgaaaacacaagtattgatttggggattaacaattaaattttaccaagtaggcaaatttggaaatatagaatctgtgaataatgaagactgaatattgaaagtctttaaaatgtttgttactaactttatagtaattttggtgtttatttctcatttaacgaagacagtattcaaggtaagattttgtatcttttcaaatgtttggcaatttaagaaatagaatttgggggaatagtctaaaattttgtggcttaggatgtagtttaatatctaacagataattttggaaatagaaaatgtgaattttgattgcaattattttgaaatctttaccagattgtcccagaagaggttcaaacaattggtagagagattgctgcaatttatttctttacgcctgtttcctgcaaagcctgaagaatttccacctataacaaagtgttcctggtggattccatcagccgctaaagtgttggctttacttaatactgcaaacaatttagttcaccctccccttattccttatactgatttctataattctacattggatcacattgatctcatggaagaatatcatacttggcaaaactttggaaactctcacaggttttccttctgtcagtacccattcgttatttctgtagctgcaaaaaaaatcattattcagagagactcagagcaacagatgataaacatcgcaaggcaaagtctggtggataaagtatctcgaagacagagacctgatatgaatatattatttctaaatatgaaagtaagacggacacatctggttagcgattcacttgatgagctaacccggaaaagagccgatttgaaaaagaagttaaaagttacatttgtaggggaagctggtttggatatgggtggtttgactaaagaatggttccttcttctaattcgccaaatttttcatccagattatggcatgtttacatatcacaaggattcacactgccattggtttagcagctttaaatgtgataactattctgaattccgattggttggaattcttatgggactagctgtttataacagcatcaccttggatattcgtttccctccctgctgttacaagaaattattgagccctcccatcattcctagtgatcaaaatataccagtaggcatctgcaatgttaccgtggacgacttatgtcaaattatgcctgagttggcccatggattaagtgaactcttatcacatgaaggcaatgttgaagaagatttctattcaacatttcaggtttttcaagaagaatttggaataatcaagtcctataatttaaagcccggtggtgataaaatttcagttaccaatcaaaatagaaaagaatatgtacagctttatactgacttccttctgaacaaatccatctataagcagtttgctgcattttattatggatttcatagtgtgtgtgcttcaaatgccctaatgctgcttcgtccagaagaggttgaaattttggtctgtggaagtcctgacctggatatgcatgctctgcagagaagtactcagtatgatggctatgcaaaaacggacttaactataaaatacttttgggatgttgtgcttggatttcctcttgatcttcaaaagaagttgctacattttactacagggagtgacagagtacctgtaggagggatggctgatttgaactttaaaatctcaaagaatgaaacttctactaactgcttacctgtggcccatacctgcttcaatcaactttgccttcccccctacaagagcaaaaaggatctgaaacagaaattgatcattggaatttcaaattcagaaggttttggacttgagtaacctagaagacttgaaatataatcttttatatgtagcattcacttccctcttactgtgcctttagccttttcatgtttctgtctcaaaacactttgacaaagctcaccaactttaaaatattaagtttttaaaaaatcaaatatgaagtatgttcagcaaaggcataattttctaaaaacacacacagaaatcgcttgagtgaggaaaagtccacatggcagagacaggtatggtccagttcctcttttatatagcactttatcattctccacaagtagtttgtcacaggcattccactgggaaagcaaagtacagtgaagaatgaatttatggtatagttgaacccagtggcagattgtacactgctagcactgctagcacacagtagcaaagcaaacagctacattatctttaacataaggcatgtagccatattttcatatagtggtatacaacacagtatcattgcaaatgcagtttacagggatttttgatatactggcttgggacctataagattcttctcagcagttgctgaaaagcatgtaaataactacataatagcctgagaataatgggattttgatagtgccatttattgttaaagatttatttttacaaagtaaattcagggttttagatgtgtacacagcttttacaaatcaataaagatgattgtacaagagtattttcagactaattggattcaaggttatattcttttaagtgttgttagtctgcatgcacattggcagtaaactagttacttgtgtactctgtaatatttgtataatgatcatttcttcttaaggctcaagatattagaaaagaaatcagacctaaataatcattgatgaagtatgtcagttacaagcacaaaagaatataactgcttttataaatcttttgaatcatgtacaagacttatatctacattttttgatcaccagttgtaccaaaacactaatttttgaaaaagataggttaaagtatttgacaaaagtgaatacaataataacacttgtgtcaaaatgatatagcttagtataaaaataaaattcaacgttttggccaaaatgtttgtttttcactggattctgaatataataaattcaaagtaccctttttttagagtttctaataaagtagtatgtaaaaagaaactgcattttaagtcagacagtaaatgttttttttaatttacagcaaatgaagcagttttattagcatgttacaaatattgccaaaccaagacttctctaccatactttaacagctttccttcagaaaactctgaagttatatttgcaataataatgaaaccagcatttagtaccagcatatggttcatatgcaaataatactttccccaaaatctttctgggctaggctattttcttgctatgcttcctgcacccaaccagcagaattcttccagggtggaggaactaatcagcttgttctccaacagttctgaagccaacccacaaatctttgaggaaaaggggtcactttgtttactattctcttggagatggaagtgattctgctcttccatttgggtatattatttcaagggtatttcttcttaaaaatcttggaaagcctaagagagttaaaggcatcctggttttgtttcattttgctctgttttaaatccatatgcaaataaaactgcttctctcttacactgcttgaactagaaaatcagctttttaatgtaggttaccacttataagcacaaaagaaacatgtataagaaaccagatttaagtgttttaaataaaatgtaaacagtttttatttggtagagatgactcatggaaaaattgtgttggcttggtctgcatgtttaatgatgtgcttgtatatcgattagctgtgtcacttttaaataagaagtccacacaagcaagccaaatttttagatgacgaagtccataaataactagagaatttttgttatctgttgttaagttgaaatgtataatcatttatcactaaattgcacattgcctttatttatttgtgctctgtttttggtttacagtgtaataatacctcatttaaaaaataaaaaccactactgttacattttattaatttaaaaagctagaaaattcatgtagttactttttttacatatataatctgttaatgaattattgatttttgtatctgccacagtaaattaaagcattacacagtatttatcagtattttttaaacatcctgtccttttttaaaatctttgcttagtcagtcatatttttgtctgtatgattagaagtttttacgtccttccttttttgtacaaatctgtattgtattaatttctggatgcaatttttcaaatattaaaattatacagtcagtcaggcttcagtttattttttgaacacttgggcaattaattaaagccatatgtttaaaatattttataaa

SEQ ID NO: 103585 - DNA, 1372 bp, Artificial Sequence
  derived and/or modified sequence
cagagccctctcgcggccgcggcggcagcagcagcgccagccccagcaacactgaggccgccgccgccgcctggcgctcccgccgcccggcccgacatgagtgaggcggttcgggtaccctcgcccgccactccgctggtggtggcggcgcccgcgcctgaggagaggaaagggaaggagtcagagcgcgagaagctgccgcccatcgtatcggcgggcgccggcgcgaccgcgggtttggacagaggagccaaaggccaaatttccactttcagcagttttatttcagctgttagcccgaagaaagaagctgctgaaaacagaagttcacctgcacatcttgttttccctaacatcaagaatgtgagagaaccaccaccaatttgccttgatgttagacaaaaacagcgtacatctatggatgcatcatcatccgaaatgaaggccccagtccttccagaacctattcttcctatccagcccaaaactgtgaaagactttcaggaagatgtagaaaaagttaagtcatcaggagattggaaagcagtacatgatttttatctaacaacgtttgattctttcccagaattaaatgctgcatttaagaaagatgccactgcctcatttaacaccattgaagactctgggattaatgctaaatttgtgaatgctgtgtatgataccttacttaatactcctcaagacgttcagaagacagtattaaagggaatcattaacagcctgttacgagaatggaaaggtccacgaacaaaagatgatcttagagcatattttatacttttacagaatcctcagtttaataacacatctacgtatgtcatctatgctcacttgctacgacagatagctaccttagtggaagctgaccatcatttcctagttcactggtttaaaaaaaatctttaccagattgtcccagaagaggttcaaacaattggtagagagattgctgcaatttatttctttacgcctgtttcctgcaaagcctgaagaatttccacctataacaaagtgttcctggtggattccatcagccgctaaagtgttggctttacttaatactgcaaacaatttagttcaccctccccttattccttatactgatttctataattctacattggatcacattgatctcatggaagaatatcatacttggcaaaactttggaaactctcacaggatggctgtgagaattaaaagaaattatacacatacaatcattttgtatatggtaaaacacaatccaaaagtaatgttttatattgctacaaggggtaccttagattcccttagtataattttgttaaaaatacaccattttgctttttctttttttcacttgttgagc

SEQ ID NO: 103586 - DNA, 4820 bp, Artificial Sequence
  derived and/or modified sequence
agcccagagccctctcgcggccgcggcggcagcagcagcgccagccccagcaacactgaggccgccgccgccgcctggcgctcccgccgcccggcccgacatgagtgaggcggttcgggtaccctcgcccgccactccgctggtggtggcggcgcccgcgcctgaggagaggaaagggaaggagtcagagcgcgagaagctgccgcccatcgtatcggcgggcgccggcgcgaccgcgggtttggacagaggagccaaaggccaaatttccactttcagcagttttatttcagctgttagcccgaagaaagaagctgctgaaaacagaagttcacctgcacatcttgttttccctaacatcaagaatgtgagagaaccaccaccaatttgccttgatgttagacaaaaacagcgtacatctatggatgcatcatcatccgaaatgaaggccccagtccttccagaacctattcttcctatccagcccaaaactgtgaaagactttcaggaagatgtagaaaaagttaagtcatcaggagattggaaagcagtacatgatttttatctaacaacgtttgattctttcccagaattaaatgctgcatttaagaaagatgccactgcctcatttaacaccattgaagactctgggattaatgctaaatttgtgaatgctgtgtatgataccttacttaatactcctcaagacgttcagaagacagtattaaagggaatcattaacagcctgttacgagaatggaaaggtccacgaacaaaagatgatcttagagcatattttatacttttacagaatcctcagtttaataacacatctacgtatgtcatctatgctcacttgctacgacagatagctaccttagtggaagctgaccatcatttcctagttcactggtttaaaaaacagtattcaagattgtcccagaagaggttcaaacaattggtagagagattgctgcaatttatttctttacgcctgtttcctgcaaagcctgaagaatttccacctataacaaagtgttcctggtggattccatcagccgctaaagtgttggctttacttaatactgcaaacaatttagttcaccctccccttattccttatactgatttctataattctacattggatcacattgatctcatggaagaatatcatacttggcaaaactttggaaactctcacaggttttccttctgtcagtacccattcgttatttctgtagctgcaaaaaaaatcattattcagagagactcagagcaacagatgataaacatcgcaaggcaaagtctggtggataaagtatctcgaagacagagacctgatatgaatatattatttctaaatatgaaagtaagacggacacatctggttagcgattcacttgatgagctaacccggaaaagagccgatttgaaaaagaagttaaaagttacatttgtaggggaagctggtttggatatgggtggtttgactaaagaatggttccttcttctaattcgccaaatttttcatccagattatggcatgtttacatatcacaaggattcacactgccattggtttagcagctttaaatgtgataactattctgaattccgattggttggaattcttatgggactagctgtttataacagcatcaccttggatattcgtttccctccctgctgttacaagaaattattgagccctcccatcattcctagtgatcaaaatataccagtaggcatctgcaatgttaccgtggacgacttatgtcaaattatgcctgagttggcccatggattaagtgaactcttatcacatgaaggcaatgttgaagaagatttctattcaacatttcaggtttttcaagaagaatttggaataatcaagtcctataatttaaagcccggtggtgataaaatttcagttaccaatcaaaatagaaaagaatatgtacagctttatactgacttccttctgaacaaatccatctataagcagtttgctgcattttattatggatttcatagtgtgtgtgcttcaaatgccctaatgctgcttcgtccagaagaggttgaaattttggtctgtggaagtcctgacctggatatgcatgctctgcagagaagtactcagtatgatggctatgcaaaaacggacttaactataaaatacttttgggatgttgtgcttggatttcctcttgatcttcaaaagaagttgctacattttactacagggagtgacagagtacctgtaggagggatggctgatttgaactttaaaatctcaaagaatgaaacttctactaactgcttacctgtggcccatacctgcttcaatcaactttgccttcccccctacaagagcaaaaaggatctgaaacagaaattgatcattggaatttcaaattcagaaggttttggacttgagtaacctagaagacttgaaatataatcttttatatgtagcattcacttccctcttactgtgcctttagccttttcatgtttctgtctcaaaacactttgacaaagctcaccaactttaaaatattaagtttttaaaaaatcaaatatgaagtatgttcagcaaaggcataattttctaaaaacacacacagaaatcgcttgagtgaggaaaagtccacatggcagagacaggtatggtccagttcctcttttatatagcactttatcattctccacaagtagtttgtcacaggcattccactgggaaagcaaagtacagtgaagaatgaatttatggtatagttgaacccagtggcagattgtacactgctagcactgctagcacacagtagcaaagcaaacagctacattatctttaacataaggcatgtagccatattttcatatagtggtatacaacacagtatcattgcaaatgcagtttacagggatttttgatatactggcttgggacctataagattcttctcagcagttgctgaaaagcatgtaaataactacataatagcctgagaataatgggattttgatagtgccatttattgttaaagatttatttttacaaagtaaattcagggttttagatgtgtacacagcttttacaaatcaataaagatgattgtacaagagtattttcagactaattggattcaaggttatattcttttaagtgttgttagtctgcatgcacattggcagtaaactagttacttgtgtactctgtaatatttgtataatgatcatttcttcttaaggctcaagatattagaaaagaaatcagacctaaataatcattgatgaagtatgtcagttacaagcacaaaagaatataactgcttttataaatcttttgaatcatgtacaagacttatatctacattttttgatcaccagttgtaccaaaacactaatttttgaaaaagataggttaaagtatttgacaaaagtgaatacaataataacacttgtgtcaaaatgatatagcttagtataaaaataaaattcaacgttttggccaaaatgtttgtttttcactggattctgaatataataaattcaaagtaccctttttttagagtttctaataaagtagtatgtaaaaagaaactgcattttaagtcagacagtaaatgttttttttaatttacagcaaatgaagcagttttattagcatgttacaaatattgccaaaccaagacttctctaccatactttaacagctttccttcagaaaactctgaagttatatttgcaataataatgaaaccagcatttagtaccagcatatggttcatatgcaaataatactttccccaaaatctttctgggctaggctattttcttgctatgcttcctgcacccaaccagcagaattcttccagggtggaggaactaatcagcttgttctccaacagttctgaagccaacccacaaatctttgaggaaaaggggtcactttgtttactattctcttggagatggaagtgattctgctcttccatttgggtatattatttcaagggtatttcttcttaaaaatcttggaaagcctaagagagttaaaggcatcctggttttgtttcattttgctctgttttaaatccatatgcaaataaaactgcttctctcttacactgcttgaactagaaaatcagctttttaatgtaggttaccacttataagcacaaaagaaacatgtataagaaaccagatttaagtgttttaaataaaatgtaaacagtttttatttggtagagatgactcatggaaaaattgtgttggcttggtctgcatgtttaatgatgtgcttgtatatcgattagctgtgtcacttttaaataagaagtccacacaagcaagccaaatttttagatgacgaagtccataaataactagagaatttttgttatctgttgttaagttgaaatgtataatcatttatcactaaattgcacattgcctttatttatttgtgctctgtttttggtttacagtgtaataatacctcatttaaaaaataaaaaccactactgttacattttattaatttaaaaagctagaaaattcatgtagttactttttttacatatataatctgttaatgaattattgatttttgtatctgccacagtaaattaaagcattacacagtatttatcagtattttttaaacatcctgtccttttttaaaatctttgcttagtcagtcatatttttgtctgtatgattagaagtttttacgtccttccttttttgtacaaatctgtattgtattaatttctggatgcaatttttcaaatattaaaattatacagtcagtc

SEQ ID NO: 103587 - DNA, 2377 bp, Artificial Sequence
  derived and/or modified sequence
aatgctaaatttgtgaatgctgtgtatgataccttacttaatactcctcaagacgttcagaagacagtattaaagggaatcattaacagcctgttacgagaatggaaaggtccacgaacaaaagatgatcttagagcatattttatacttttacagaatcctcagtttaataacacatctacgtatgtcatctatgctcacttgctacgacagatagctaccttagtggaagctgaccatcatttcctagttcactggtttaaaaaattgtcccagaagaggttcaaacaattggtagagagattgctgcaatttatttctttacgcctgtttcctgcaaagcctgaagaatttccacctataacaaagtgttcctggtggattccatcagccgctaaagtgttggctttacttaatactgcaaacaatttagttcaccctccccttattccttatactgatttctataattctacattggatcacattgatctcatggaagaatatcatacttggcaaaactttggaaactctcacagcaaagtctggtggataaagtatctcgaagacagagacctgatatgaatatattatttctaaatatgaaagtaagacggacacatctggttagcgattcacttgatgagctaacccggaaaagagccgatttgaaaaagaagttaaaagttacatttgtaggggaagctggtttggatatgggtggtttgactaaagaatggttccttcttctaattcgccaaatttttcatccagattatggcatgtttacatatcacaaggattcacactgccattggtttagcagctttaaatgtgataactattctgaattccgattggttggaattcttatgggactagctgtttataacagcatcaccttggatattcgtttccctccctgctgttacaagaaattattgagccctcccatcattcctagtgatcaaaatataccagtaggcatctgcaatgttaccgtggacgacttatgtcaaattatgcctgagttggcccatggattaagtgaactcttatcacatgaaggcaatgttgaagaagatttctattcaacatttcaggtttttcaagaagaatttggaataatcaagtcctataatttaaagcccggtggtgataaaatttcagttaccaatcaaaatagaaaagaatatgtacagctttatactgacttccttctgaacaaatccatctataagcagtttgctgcattttattatggatttcatagtgtgtgtgcttcaaatgccctaatgctgcttcgtccagaagaggttgaaattttggtctgtggaagtcctgacctggatatgcatgctctgcagagaagtactcagtatgatggctatgcaaaaacggacttaactataaaatacttttgggatgttgtgcttggatttcctcttgatcttcaaaagaagttgctacattttactacagggagtgacagagtacctgtaggagggatggctgatttgaactttaaaatctcaaagaatgaaacttctactaactgcttacctgtggcccatacctgcttcaatcaactttgccttcccccctacaagagcaaaaaggatctgaaacagaaattgatcattggaatttcaaattcagaaggttttggacttgagtaacctagaagacttgaaatataatcttttatatgtagcattcacttccctcttactgtgcctttagccttttcatgtttctgtctcaaaacactttgacaaagctcaccaactttaaaatattaagtttttaaaaaatcaaatatgaagtatgttcagcaaaggcataattttctaaaaacacacacagaaatcgcttgagtgaggaaaagtccacatggcagagacaggtatggtccagttcctcttttatatagcactttatcattctccacaagtagtttgtcacaggcattccactgggaaagcaaagtacagtgaagaatgaatttatggtatagttgaacccagtggcagattgtacactgctagcactgctagcacacagtagcaaagcaaacagctacattatctttaacataaggcatgtagccatattttcatatagtggtatacaacacagtatcattgcaaatgcagtttacagggatttttgatatactggcttgggacctataagattcttctcagcagttgctgaaaagcatgtaaataactacataatagcctgagaataatgggattttgatagtgccatttattgttaaagatttatttttacaaagtaaattcagggttttagatgtgtacacagcttttacaaatcaataaagatgattgtacaagagtattttcagact

SEQ ID NO: 103588 - DNA, 2343 bp, Artificial Sequence
  derived and/or modified sequence
atgagcgaggccgtgcgggtgcccagccccgccacccccctggtggtcgccgcccctgcccccgaggagaggaaaggaaaagagtcagagcgcgaaaagctcccccctattgtgtctgccggggccggcgccacagccggacttgatcgaggcgccaaggggcagatctcaacgtttagctcattcatatcggccgtctctccaaaaaaagaagctgccgagaatcgttccagtcccgcacatctggtttttccaaacattaagaatgttagagaacctccacccatctgtttagatgtaaggcagaagcaacgaaccagtatggacgcctcctcctccgaaatgaaggcacccgtgctgcctgaacctatccttccgattcagcctaagacagttaaagatttccaggaggacgtcgaaaaggtgaagagttcgggagactggaaagctgtgcatgacttttacttgactacattcgattcattccctgaattgaacgcagctttcaaaaaggacgctactgccagttttaacacaatcgaggactctgggataaacgccaaattcgtgaatgccgtttacgacaccctgttgaatacaccccaggacgttcagaaaacagtcctgaaaggcatcattaattcacttcttcgggaatggaagggaccacgtacgaaagatgatctccgagcttatttcatcctgctgcagaatccccagttcaacaataccagcacatatgttatctacgcccacctcctaaggcagatcgcaactctagttgaagctgatcatcattttcttgtacattggtttaaaaagcagtacagcaggcttagtcagaagcgctttaaacagttagtggagaggctacttcaattcatcagcctgaggctgttccccgccaagccagaggaattcccgcccattaccaaatgttcttggtggatcccttcagcggctaaggttctggcattactgaatacagcaaacaacctggtccacccaccccttatcccgtacacagatttttacaattcaacactggatcacattgatctgatggaagagtatcacacatggcagaacttcggaaatagtcaccggtttagtttttgccagtacccttttgtgatcagtgtggcagcgaaaaaaattatcatccagcgtgacagtgagcagcagatgatcaacattgctcggcagagtctggtagataaagtgagccggcgacagaggccagatatgaatatcctgttcctgaacatgaaagtgagacgcacacacctcgtctctgatagcctcgatgagctgactcgcaaacgcgccgacttaaagaagaagctgaaagtgacattcgtaggagaggctggtctggacatggggggcttaactaaggagtggttcctgttactcattaggcagatcttccaccctgattacggtatgtttacgtaccacaaagattcacactgccactggttctcttctttcaagtgcgacaattacagcgaatttagacttgtggggatcctgatggggttagccgtctacaactccataactctggatattagattccccccctgttgttacaagaagctgcttagcccgccgataattcccagcgatcagaatatccccgtgggaatctgcaacgtgactgtagacgatttgtgtcagataatgccggagttagcacatggtctgtccgagctcctgtcccacgagggaaatgttgaggaggacttctactcgacctttcaggtgtttcaggaggaattcgggataatcaagtcctacaatctgaagcctggcggagacaaaatcagtgtgactaaccagaacaggaaagaatatgtccagctgtacacagattttctccttaacaaatccatttacaagcaattcgccgctttttactacggatttcactcagtctgcgcttccaacgctctgatgctgctacgccccgaagaagtggagattctggtttgcggtagtccagatcttgacatgcatgccctccagagatccacccagtatgatgggtatgccaagactgacctgacaattaagtacttttgggacgtggtgcttggattccctctggacttgcaaaaaaagctgctccattttacaaccggtagcgaccgcgtgcccgtgggtggtatggcagacctcaactttaagatcagtaagaacgaaacctccacaaattgtctgccagtggctcatacctgtttcaatcagctgtgcctcccgccttataagtctaaaaaagaccttaagcagaaactaattatcggtatcagtaacagcgagggcttcggactggagtag

SEQ ID NO: 103589 - DNA, 2343 bp, Artificial Sequence
  derived and/or modified sequence
atgagcgaagcagtgagagtgccatctcctgcaaccccccttgttgtagcagcaccagcacccgaggaaagaaaggggaaggagtctgagagggaaaaattgccacccatcgtgtccgctggtgccggagctaccgcgggattggataggggggctaaggggcaaataagcaccttcagttctttcatctctgctgtgtcccctaagaaggaagccgctgagaatcggtccagccctgctcacttggtgttccctaatatcaaaaatgtgcgggaacctcctccaatttgcctggatgtgcgacagaaacagcgtacctccatggacgcctccagctctgaaatgaaagcccctgtgctgcctgaaccaatccttcccatccaacccaagacagtgaaggacttccaagaggacgttgaaaaggtcaaatcttccggcgattggaaagcggtacatgatttctacctgacaaccttcgactctttccctgagctcaacgccgcttttaaaaaggatgccaccgcaagcttcaacaccatcgaggattcggggatcaatgctaaatttgtgaatgcagtctacgacaccctgctcaacacaccccaggacgttcagaaaacagtgcttaaaggaattatcaacagtctcctgagagaatggaaggggcctaggactaaagatgacctaagggcatacttcatcttactgcagaatccccagtttaacaacactagcacctacgtgatctacgctcatctgttacggcagatcgccactctcgtggaggctgaccatcatttcttggtccactggttcaaaaaacaatactcaaggctcagccagaagcggtttaaacaattggtggagagactccttcagtttatctcgctgagactttttccagctaaaccagaggaatttccgccaattactaagtgctcctggtggattcccagcgccgctaaagtcttggcccttctgaacacagccaataatctcgtccatcccccattgattccttacacggacttctacaactctaccctggatcacatcgatctcatggaagagtaccatacttggcaaaactttggtaactcccaccggttcagcttttgccagtacccatttgtcatatctgtcgcagcgaagaagatcatcatccagcgggactccgagcagcaaatgattaacattgcgagacagagcctggtcgacaaagtgagccgcagacagaggcctgacatgaacattctgttccttaatatgaaagtgagaagaacacatctcgtcagtgacagtcttgacgaactcacgaggaagagggccgacctgaagaaaaaattaaaggtcacctttgtgggtgaggcgggacttgatatgggtggcctgaccaaagaatggttcctcttgctgattcgtcagatttttcaccccgattacggcatgtttacttatcacaaggactcccattgtcactggtttagctctttcaagtgcgacaattacagtgagttccgattggtgggcatattaatgggactggcggtttataatagtataacactggacatccgttttccaccatgttgttataagaaactgctctctccacctatcatcccaagcgatcagaacatccctgtcggcatctgcaatgttaccgtcgatgacctgtgccaaatcatgccagaactggcccatggcctgagtgagttactcagccacgaggggaacgtggaggaagacttttattctaccttccaggtttttcaggaagaattcggcatcattaaaagctataacctcaaaccaggcggtgacaagatttctgtgacaaatcagaatagaaaggagtacgtgcagctctacactgactttctcttgaacaagtctatttacaaacaattcgccgctttctactacgggttccattctgtctgtgccagtaatgcactcatgctactgcgacccgaggaggtcgaaattctagtgtgtggtagccccgatttggatatgcacgctctccaacggtccacacagtacgatggctacgcgaaaactgatttgaccatcaagtatttctgggatgtggtgctggggtttcctttagatctccagaagaagctgttgcactttaccacaggcagtgaccgagttcctgtgggtggtatggccgaccttaatttcaagatttccaaaaacgagacctcaactaactgcctacctgtggcacacacatgcttcaatcagctctgtctaccgccttacaagtcgaagaaagacctgaaacagaagctgataatagggatctctaactctgaagggtttggcctggagtag

SEQ ID NO: 103590 - protein, 286 aa, Artificial Sequence
  derived and/or modified sequence
MGSALFVKKELQLQANFLGNVKRLYEAEVFSTDFSNPSIAQARINSHVKKKTQGKVVDIIQGLDLLTAMVLVNHIFFKAKWEKPFHPEYTRKNFPFLVGEQVTVHVPMMHQKEQFAFGVDTELNCFVLQMDYKGDAVAFFVLPSKGKMRQLEQALSARTLRKWSHSLQKRWIEVFIPRFSISASYNLETILPKMGIQNVFDKNADFSGIAKRDSLQVSKATHKAVLDVSEEGTEATAATTTKFIVRSKDGPSYFTVSFNRTFLMMITNKATDGILFLGKVENPTKS

SEQ ID NO: 103591 - protein, 334 aa, Artificial Sequence
  derived and/or modified sequence
MRSAGGRGEIKVRRELQPSKQVSGLTNHARTGQEKRNLQRLVLETPSQNIFFSPVSVSTSLAMLSLGAHSVTKTQILQGLGFNLTHTPESAIHQGFQHLVHSLTVPSKDLTLKMGSALFVKKELQLQANFLGNVKRLYEAEVFSTDFSNPSIAQARINSHVKKKTQGKVVDIIQGLDLLTAMVLVNHIFFKAKWEKPFHPEYTRKNFPFLVGEQVTVHVPMMHQKEQFAFGVDTELNCFVLQMDYKGDAVAFFVLPSKGKMRQLEQALSARTLRKWSHSLQKRWIEVFIPRFSISASYNLETILPKMGIQNVFDKNADFSGIAKRDSLQVSKVS

SEQ ID NO: 103592 - DNA, 1005 bp, Artificial Sequence
  derived and/or modified sequence
atgcggagcgccggcggccggggcgagatcaaggtgcggcgggagttacagcccagcaagcaggtcagcggcctgacaaaccacgccagaaccgggcaggaaaagagaaacttacagaggcttgttctggaaacccctagccaaaacatcttcttctctccagtatctgttagcacctccctcgctatgctgagtctaggcgcccacagcgtcaccaagactcagatcctccagggcctaggattcaatttaacacacacccccgagtccgcaatccaccagggttttcagcacctggtgcattccctcaccgtaccctccaaagaccttacgcttaaaatggggtcggctctgtttgttaagaaggaactccagctacaggcaaactttctcgggaatgttaaacggttatacgaagctgaggtcttctccacggattttagtaatcccagcatagcacaggccaggatcaacagtcatgtgaaaaaaaagacccaggggaaagtcgtggatattatccaaggactggacctgctgacagccatggtattggtgaaccatatcttctttaaagctaaatgggaaaaaccattccaccctgagtacactcgaaaaaatttccctttcctggtgggagaacaggttaccgttcatgtgcctatgatgcaccagaaggaacaattcgcattcggcgtggataccgaactgaattgcttcgtactgcaaatggactacaagggagacgccgtggcttttttcgtgcttccgagcaagggaaagatgaggcaactggaacaggccctgtccgcccgaacacttcgcaagtggtcacactcgctgcagaagaggtggatcgaggtatttatccctcgattttcaatctcagccagctataacctggagactattctgcctaaaatggggatacagaatgtgttcgacaaaaacgctgatttcagcggtatagcgaaaagagacagcctgcaggtcagcaaagttagctag

SEQ ID NO: 103593 - DNA, 1005 bp, Artificial Sequence
  derived and/or modified sequence
atgagatctgccggtggccgtggagaaataaaggtgaggagggaactgcagcccagcaaacaggtgtctggattgactaatcatgcaagaacagggcaggagaaacggaaccttcaaagattggtgttggagactccaagccagaatatcttcttttctcctgtgtcagtaagtacgtccctggccatgctatctttgggagcacacagcgttacaaagacacagattctgcagggactggggttcaacctgactcacaccccagagtcagccatccaccagggctttcagcacttggtccattccctcaccgttcctagtaaagacctgaccctgaagatgggctcagccttgttcgtgaaaaaggaactgcagctgcaggccaatttcctgggtaatgtgaagcgcctctatgaggccgaggtcttctccactgatttcagcaatccctcgatcgcccaagctcgcatcaattctcacgtgaaaaagaagacgcagggcaaagtggtggatattatacagggtcttgacctgctcacagcaatggtcctcgtgaaccacatcttctttaaggcaaaatgggaaaagccatttcatcctgagtacacgcgtaagaatttcccgtttctggtgggggagcaggtgacagtgcatgttccaatgatgcaccagaaagagcagtttgcctttggggtggacacagagcttaattgttttgtgctgcagatggactataagggggacgcagttgcttttttcgtgcttccatcgaaaggcaagatgcggcagctggagcaggcactaagcgcccgaacgctacgcaagtggtcgcactcactgcaaaagcggtggatcgaggtgttcattccaaggtttagcatttccgcaagctataatttggaaaccatcttacccaaaatgggtatccaaaatgttttcgataagaacgcagatttcagcggcattgcgaaaagagacagtctgcaggtatccaaagtatcatag

SEQ ID NO: 103594 - DNA, 1005 bp, Artificial Sequence
  derived and/or modified sequence
atgagatcggccgggggtagaggcgagattaaagttagacgtgaactccaaccaagtaaacaggtttccggtttaacaaatcacgctagaacaggccaggaaaagagaaacctgcagcgacttgtgctagaaacacctagtcagaacatttttttttctcccgtgagtgtgtctacctcacttgccatgctgagtttgggtgcgcactccgtgactaagactcagattttacagggactgggatttaatctgactcatacaccggagagtgctatccaccagggtttccaacacttagtgcactcactaaccgtgccctcgaaggaccttaccttaaaaatgggttccgctctcttcgtgaagaaggagctacaactgcaggctaacttcctggggaatgtgaaaagactctacgaagccgaagtgtttagcacagacttcagcaatccatcaatcgctcaagccaggattaactctcacgtaaaaaagaagactcagggaaaggtggttgacattattcagggtctcgatctgctgactgcaatggtcctggtgaatcacatctttttcaaagccaaatgggagaaaccattccacccagaatacactaggaaaaacttccctttcctcgtaggtgaacaggtaactgtacacgtgccgatgatgcaccagaaggaacagtttgccttcggggtggacaccgaactgaattgctttgtacttcaaatggactacaagggagatgctgtcgctttcttcgtcctgcccagtaagggcaaaatgagacaactggagcaggctctgagcgccagaacactgaggaagtggagtcactcacttcagaaaagatggattgaggtgtttattccaagattttcaatttccgcctcgtataaccttgagactatattgccgaagatgggaattcagaatgtgttcgacaagaacgctgacttctccggcattgccaagcgggactctctgcaggtgtctaaagtctcctag

SEQ ID NO: 103595 - DNA, 1520 bp, Artificial Sequence
  derived and/or modified sequence
taagcaagtgtcagggctcaccaaccatgcaaggacagggcaggagaagaggaacctgcaaaggctggttttggagaccccgagtcagaacatcttcttctcccctgtgagtgtctccacttccctggccatgctctcccttggggcccactcagtcaccaagacccagattctccagggcctgggcttcaacctcacacacacaccagagtctgccatccaccagggcttccagcacctggttcactcactgactgttcccagcaaagacctgaccttgaagatgggaagtgccctcttcgtcaagaaggagctgcagctgcaggcaaatttcttgggcaatgtcaagaggctgtatgaagcagaagtcttttctacagatttctccaacccctccattgcccaggcgaggatcaacagccatgtgaaaaagaagacccaagggaaggttgtagacataatccaaggccttgaccttctgacggccatggttctggtgaaccacattttctttaaagccaagtgggagaagccctttcaccctgaatatacaagaaagaacttcccattcctggtgggcgagcaggtcactgtgcatgtccccatgatgcaccagaaagagcagttcgcttttggggtggatacagagctgaactgctttgtgctgcagatggattacaagggagatgccgtggccttctttgtcctccctagcaagggcaagatgaggcaactggaacaggccttgtcagccagaacactgagaaagtggagccactcactccagaaaaggtggatagaggtgttcatccccagattttccatttctgcctcctacaatctggaaaccatcctcccgaagatgggcatccaaaatgtctttgacaaaaatgctgatttttctggaattgcaaagagagactccctgcaggtttctaaagcaacccacaaggctgtgctggatgtcagtgaagagggcactgaggccacagcagctaccaccaccaagttcatagtccgatcgaaggatggcccctcttacttcactgtctccttcaataggaccttcctgatgatgattacaaataaagccacagacggtattctctttctagggaaagtggaaaatcccactaaatcctaggtgggaaatggcctgttaactgatggcacattgctaatgcacaagaaataacaaaccacatccctctttctgttctgagggtgcatttgaccccagtggagctggattcgctggcagggatgccacttccaaggctcaatcaccaaaccatcaacagggaccccagtcacaagccaacacccattaaccccagtcagtgcccttttccacaaattctcccaggtaactagcttcatgggatgttgctgggttaccatatttccattccttggggctcccaggaatggaaatacgccaacccaggttaggcacctctattgcagaattacaataacacattcaataaaactaaaatatgaattcatctgtcaacaga

SEQ ID NO: 103596 - DNA, 1005 bp, Artificial Sequence
  derived and/or modified sequence
atgaggagcgcaggcgggcgcggagagattaaagtgcggagagaattacagccctctaagcaggtgagcggactgaccaatcacgctcgtactggacaggagaaacgaaacctgcagcggctggtgttagaaaccccttcacagaatatcttctttagtcctgtcagcgtcagtacgtctttagctatgttgtccctgggtgcccatagtgtgacaaaaacacaaatactccagggcctgggatttaacctaactcacacccccgaatccgcgatacaccaaggatttcagcacctggtgcattcactcaccgtaccgtccaaagatttgacactaaagatgggatctgcactgttcgttaaaaaggaactccagcttcaagccaattttttagggaacgtgaaaaggctttacgaggccgaagtgttcagcaccgatttttctaatccctctattgcccaggctcgtattaactctcacgtgaagaagaagacccaggggaaagtagtagacattatccaaggactggatctgcttaccgcgatggtactagtcaatcacatatttttcaaggcaaagtgggaaaagccctttcatccagaatatacaagaaagaatttcccctttctggtcggggaacaggtcacagtgcatgtgccaatgatgcaccagaaggaacaattcgctttcggggtggatacggaacttaactgcttcgtacttcaaatggactataaaggcgacgcggtcgcttttttcgtgctgcctagcaagggtaagatgagacagctggaacaggctctgagcgccaggacactcaggaaatggtcacactcactccagaaaagatggatagaagtctttatccccaggttcagcatttctgcttcatacaatctggagaccatcctgcctaaaatgggaatccaaaacgtgtttgacaaaaatgcagacttctctggaattgccaaaagagactctctccaagtgtccaaagtgagctag

SEQ ID NO: 103597 - DNA, 1156 bp, Artificial Sequence
  derived and/or modified sequence
atcatttgcatgtctagctggagaataaaaataatatatcatttgcatgtcttagtaatgaagtcatgggtgtcgtggcatgagatcagctggagggagaggagagattaaagtgaggagagagctacaaccaagtaagcaagtgtcagggctcaccaaccatgcaaggacagggcaggagaagaggaacctgcaaaggctggttttggagaccccgagtcagaacatcttcttctcccctgtgagtgtctccacttccctggccatgctctcccttggggcccactcagtcaccaagacccagattctccagggcctgggcttcaacctcacacacacaccagagtctgccatccaccagggcttccagcacctggttcactcactgactgttcccagcaaagacctgaccttgaagatgggaagtgccctcttcgtcaagaaggagctgcagctgcaggcaaatttcttgggcaatgtcaagaggctgtatgaagcagaagtcttttctacagatttctccaacccctccattgcccaggcgaggatcaacagccatgtgaaaaagaagacccaagggaaggttgtagacataatccaaggccttgaccttctgacggccatggttctggtgaaccacattttctttaaagccaagtgggagaagccctttcaccctgaatatacaagaaagaacttcccattcctggtgggcgagcaggtcactgtgcatgtccccatgatgcaccagaaagagcagttcgcttttggggtggatacagagctgaactgctttgtgctgcagatggattacaagggagatgccgtggccttctttgtcctccctagcaagggcaagatgaggcaactggaacaggccttgtcagccagaacactgagaaagtggagccactcactccagaaaaggtggatagaggtgttcatccccagattttccatttctgcctcctacaatctggaaaccatcctcccgaagatgggcatccaaaatgtctttgacaaaaatgctgatttttctggaattgcaaagagagactccctgcaggtttctaaagtgagttgaatgaaaatatttgcaaaaaagtccaagctggaagcacctgcagaattaatcacatgctcttatttcgttgat

SEQ ID NO: 103598 - DNA, 1005 bp, Artificial Sequence
  derived and/or modified sequence
atgagaagcgccggcggcagaggcgagatcaaggtgagaagagagctgcagcccagcaagcaggtgagcggcctgaccaaccacgccagaaccggccaggagaagagaaacctgcagagactggtgctggagacccccagccagaacatcttcttcagccccgtgagcgtgagcaccagcctggccatgctgagcctgggcgcccacagcgtgaccaagacccagatcctgcagggcctgggcttcaacctgacccacacccccgagagcgccatccaccagggcttccagcacctggtgcacagcctgaccgtgcccagcaaggacctgaccctgaagatgggcagcgccctgttcgtgaagaaggagctgcagctgcaggccaacttcctgggcaacgtgaagagactgtacgaggccgaggtgttcagcaccgacttcagcaaccccagcatcgcccaggccagaatcaacagccacgtgaagaagaagacccagggcaaggtggtggacatcatccagggcctggacctgctgaccgccatggtgctggtgaaccacatcttcttcaaggccaagtgggagaagcccttccaccccgagtacaccagaaagaacttccccttcctggtgggcgagcaggtgaccgtgcacgtgcccatgatgcaccagaaggagcagttcgccttcggcgtggacaccgagctgaactgcttcgtgctgcagatggactacaagggcgacgccgtggccttcttcgtgctgcccagcaagggcaagatgagacagctggagcaggccctgagcgccagaaccctgagaaagtggagccacagcctgcagaagagatggatcgaggtgttcatccccagattcagcatcagcgccagctacaacctggagaccatcctgcccaagatgggcatccagaacgtgttcgacaagaacgccgacttcagcggcatcgccaagagagacagcctgcaggtgagcaaggtgagctag

SEQ ID NO: 103599 - DNA, 1005 bp, Artificial Sequence
  derived and/or modified sequence
atgagatccgcgggcgggagaggagagattaaggttagacgtgagttgcagccgtcgaagcaggtctcaggtctgacaaatcacgcacgcacaggacaggaaaagaggaatctacaacgccttgtcctcgaaactccatcccagaacatctttttctctcctgtcagcgtgtcgacatccttggcgatgctctccctaggggcccactccgtcaccaaaactcagattctccaggggctgggatttaacctgacccatacacccgagtcagcaattcaccaaggattccagcacctggtccactcactgaccgttcctagcaaagacctgacactgaaaatgggaagtgccttattcgtgaagaaggagctgcagctgcaagcaaatttcctgggcaacgtgaagagactgtatgaagctgaggtctttagtactgacttttcgaaccccagtattgcgcaggcgcgcattaactcccacgtaaaaaaaaagacccaagggaaggtggtcgacatcattcaggggcttgaccttcttaccgctatggttctagtgaaccatatcttcttcaaggcaaaatgggagaagccttttcacccagaatatactcggaaaaattttccttttctggtgggggaacaagtgacggtacacgttcccatgatgcatcagaaggagcagtttgcatttggagtggacacagaattgaattgtttcgtgctccagatggattataagggtgatgccgttgcctttttcgtcttgccatccaaggggaagatgaggcagttggagcaggcactgagtgccagaacactgcgcaagtggagccattccttgcagaagagatggattgaagtgtttatcccccgattctccatctctgcgtcctacaatctagagactatccttccaaaaatgggaatccagaacgtattcgacaagaacgccgacttctccggcattgccaagagagattcgctgcaagtaagcaaggttagctag

SEQ ID NO: 103600 - DNA, 1005 bp, Artificial Sequence
  derived and/or modified sequence
atgaggtctgctgggggccgcggggagatcaaggtgagaagagagctgcagcccagcaagcaggtgtctggcctgaccaaccacgccaggacaggccaggagaagaggaacctgcagaggctggtgctggagacccccagccagaacatcttcttcagccctgtgtctgtgtccaccagcctggccatgctgagcctgggcgcccacagcgtgaccaagacccagatcctgcagggcctgggcttcaacctgacccacaccccagagagcgccatccaccagggcttccagcacctggtgcacagcctgactgtgcccagcaaggacctgaccctgaagatgggcagcgccctgtttgtgaagaaggagctgcagctgcaggccaacttcctgggcaatgtgaagaggctgtatgaggccgaggtgttcagcacagacttcagcaaccccagcatcgcccaggcccgcatcaacagccacgtgaagaagaagacccagggcaaggtggtggacatcatccagggcctggacctgctgacagccatggtgctggtgaaccacatcttcttcaaggccaagtgggagaagcccttccaccctgagtacaccaggaagaacttccccttcctggtgggggagcaggtgacagtgcacgtgcccatgatgcaccagaaggagcagtttgccttcggcgtggacacagagctgaactgctttgtgctgcagatggactacaagggagatgctgtggccttctttgtgctgcccagcaagggcaagatgaggcagctggagcaggccctgagcgcccggaccctgaggaagtggagccacagcctgcagaagcgctggattgaggtgttcatcccccgcttcagcatcagcgccagctacaacctggagaccatcctgcccaagatgggcatccagaatgtgtttgacaagaatgctgacttcagcggcatcgccaagagggacagcctgcaggtgtccaaggtgtcctag

SEQ ID NO: 103601 - RNA, 1005 nt, Artificial Sequence
  derived and/or modified sequence
augagaucggccggggguagaggcgagauuaaaguuagacgugaacuccaaccaaguaaacagguuuccgguuuaacaaaucacgcuagaacaggccaggaaaagagaaaccugcagcgacuugugcuagaaacaccuagucagaacauuuuuuuuucucccgugagugugucuaccucacuugccaugcugaguuugggugcgcacuccgugacuaagacucagauuuuacagggacugggauuuaaucugacucauacaccggagagugcuauccaccaggguuuccaacacuuagugcacucacuaaccgugcccucgaaggaccuuaccuuaaaaauggguuccgcucucuucgugaagaaggagcuacaacugcaggcuaacuuccuggggaaugugaaaagacucuacgaagccgaaguguuuagcacagacuucagcaauccaucaaucgcucaagccaggauuaacucucacguaaaaaagaagacucagggaaaggugguugacauuauucagggucucgaucugcugacugcaaugguccuggugaaucacaucuuuuucaaagccaaaugggagaaaccauuccacccagaauacacuaggaaaaacuucccuuuccucguaggugaacagguaacuguacacgugccgaugaugcaccagaaggaacaguuugccuucgggguggacaccgaacugaauugcuuuguacuucaaauggacuacaagggagaugcugucgcuuucuucguccugcccaguaagggcaaaaugagacaacuggagcaggcucugagcgccagaacacugaggaaguggagucacucacuucagaaaagauggauugagguguuuauuccaagauuuucaauuuccgccucguauaaccuugagacuauauugccgaagaugggaauucagaauguguucgacaagaacgcugacuucuccggcauugccaagcgggacucucugcaggugucuaaagucuccuag

SEQ ID NO: 103602 - RNA, 1005 nt, Artificial Sequence
  derived and/or modified sequence
augaggagcgcaggcgggcgcggagagauuaaagugcggagagaauuacagcccucuaagcaggugagcggacugaccaaucacgcucguacuggacaggagaaacgaaaccugcagcggcugguguuagaaaccccuucacagaauaucuucuuuaguccugucagcgucaguacgucuuuagcuauguugucccugggugcccauagugugacaaaaacacaaauacuccagggccugggauuuaaccuaacucacacccccgaauccgcgauacaccaaggauuucagcaccuggugcauucacucaccguaccguccaaagauuugacacuaaagaugggaucugcacuguucguuaaaaaggaacuccagcuucaagccaauuuuuuagggaacgugaaaaggcuuuacgaggccgaaguguucagcaccgauuuuucuaaucccucuauugcccaggcucguauuaacucucacgugaagaagaagacccaggggaaaguaguagacauuauccaaggacuggaucugcuuaccgcgaugguacuagucaaucacauauuuuucaaggcaaagugggaaaagcccuuucauccagaauauacaagaaagaauuuccccuuucuggucggggaacaggucacagugcaugugccaaugaugcaccagaaggaacaauucgcuuucgggguggauacggaacuuaacugcuucguacuucaaauggacuauaaaggcgacgcggucgcuuuuuucgugcugccuagcaaggguaagaugagacagcuggaacaggcucugagcgccaggacacucaggaaauggucacacucacuccagaaaagauggauagaagucuuuauccccagguucagcauuucugcuucauacaaucuggagaccauccugccuaaaaugggaauccaaaacguguuugacaaaaaugcagacuucucuggaauugccaaaagagacucucuccaaguguccaaagugagcuag

SEQ ID NO: 103603 - DNA, 861 bp, Artificial Sequence
  derived and/or modified sequence
atgggctccgccctatttgttaaaaaagagctgcagctacaggcaaattttctggggaacgtgaaaagactatatgaagccgaagtgttcagtaccgacttttctaaccccagcattgctcaagcccgtataaactcgcatgtcaagaagaagactcaggggaaggtggttgacataatccagggcctagatctccttactgcaatggtgttggtaaaccatatcttttttaaggcgaagtgggagaagcctttccatcctgagtacacgcgcaagaattttccatttcttgtcggcgaacaggtgacagtgcatgttccaatgatgcatcagaaggagcaatttgcattcggggtcgacactgaactgaattgttttgttctgcagatggactataaaggagatgcggttgccttcttcgtactgccttctaaaggcaagatgcggcagttggagcaagcactgagcgctaggactctgcgcaagtggtcacactctctacagaaacgctggattgaggttttcatcccccgtttttcaattagcgccagctataacctggaaaccatcctccccaagatgggaattcagaacgtgtttgacaagaatgccgatttttcaggcatcgccaagcgagactctctccaggtttccaaggctacacataaggccgtcttggacgtttcggaggagggaactgaagccacagccgcaacaaccacaaaattcatcgtgcggagtaaggacggaccaagctatttcactgtctccttcaaccggacctttctgatgatgattaccaacaaggccaccgacggaatactgttcttgggaaaggtagagaaccctaccaaaagctag

SEQ ID NO: 103604 - DNA, 861 bp, Artificial Sequence
  derived and/or modified sequence
atgggctcagcgctgttcgtcaaaaaagaactccagctccaggcaaacttcctgggtaacgtcaaaagactctacgaggctgaagttttctcaacggatttcagcaatccctccatcgcacaggcccgaatcaactctcacgtgaaaaagaaaacccagggcaaggtcgtagacataatccagggactggatctcctaacagctatggtgttagttaaccacattttctttaaggctaagtgggagaaaccttttcaccctgagtatacccgcaaaaacttcccctttctggtaggagagcaggttactgtccatgtgccaatgatgcatcagaaagagcagtttgcctttggggtcgacacagaactaaactgcttcgtcctgcagatggactacaagggcgacgctgtcgctttttttgtcttacccagcaagggtaaaatgcgccagctggagcaggccctgtctgctagaacgttacgtaagtggtctcacagtctacagaaaagatggattgaggtttttatccccaggttttctatcagtgcgagttataatttggaaactattctcccaaaaatgggaattcaaaatgtatttgataaaaatgccgattttagtggcattgccaaaagggattcattgcaggtatccaaagccacccacaaagctgttctggatgtgtccgaggaaggaaccgaagccactgcagccacgacaaccaaatttatagtcagaagcaaggacggaccgtcctactttaccgtgtcatttaatcgaacttttctcatgatgatcaccaataaagccacagatgggatcctcttcttgggcaaggttgaaaaccctaccaaaagttag

SEQ ID NO: 103605 - DNA, 861 bp, Artificial Sequence
  derived and/or modified sequence
atgggttccgccttatttgtaaaaaaggagctgcaactgcaagccaacttcctgggaaatgttaagcggctttacgaagcggaggtctttagcacagattttagcaaccctagtatagcccaggcacgcataaattctcatgtcaagaaaaagacccaaggaaaggtcgtggacataattcagggactggatctactgactgccatggtgctcgtcaaccatatatttttcaaggccaaatgggagaaaccctttcatcccgaatacactcggaaaaatttcccctttctcgttggagagcaggttaccgtacacgtaccaatgatgcaccagaaagaacagttcgcatttggggtagataccgagttaaattgcttcgtgctgcaaatggactacaaaggcgatgcagttgccttttttgttctacctagcaaaggcaaaatgaggcagcttgaacaggcattgtcagcaagaaccttgaggaaatggtcccacagcctacagaagagatggattgaagtgttcatcccaagattctctatctctgcaagctacaacctggaaaccattctaccaaaaatggggattcaaaatgtctttgataaaaacgctgacttctccggcattgccaaacgcgattccttacaagtgtcaaaggcgactcataaagctgttctcgacgtaagcgaggaggggacagaggctaccgcagccactactactaagtttatcgttcgctcaaaggacggcccttcgtattttaccgtgtcatttaacagaacgttccttatgatgataaccaataaagctactgacggcattctgtttctggggaaagttgagaaccctaccaaaagttag

SEQ ID NO: 103606 - DNA, 861 bp, Artificial Sequence
  derived and/or modified sequence
atgggcagcgccctgttcgtgaagaaggagctgcagctgcaggccaacttcctgggcaacgtgaagagactgtacgaggccgaggtgttcagcaccgacttcagcaaccccagcatcgcccaggccagaatcaacagccacgtgaagaagaagacccagggcaaggtggtggacatcatccagggcctggacctgctgaccgccatggtgctggtgaaccacatcttcttcaaggccaagtgggagaagcccttccaccccgagtacaccagaaagaacttccccttcctggtgggcgagcaggtgaccgtgcacgtgcccatgatgcaccagaaggagcagttcgccttcggcgtggacaccgagctgaactgcttcgtgctgcagatggactacaagggcgacgccgtggccttcttcgtgctgcccagcaagggcaagatgagacagctggagcaggccctgagcgccagaaccctgagaaagtggagccacagcctgcagaagagatggatcgaggtgttcatccccagattcagcatcagcgccagctacaacctggagaccatcctgcccaagatgggcatccagaacgtgttcgacaagaacgccgacttcagcggcatcgccaagagagacagcctgcaggtgagcaaggccacccacaaggccgtgctggacgtgagcgaggagggcaccgaggccaccgccgccaccaccaccaagttcatcgtgagaagcaaggacggccccagctacttcaccgtgagcttcaacagaaccttcctgatgatgatcaccaacaaggccaccgacggcatcctgttcctgggcaaggtggagaaccccaccaagagctag

SEQ ID NO: 103607 - DNA, 861 bp, Artificial Sequence
  derived and/or modified sequence
atgggctcagctctgtttgtgaagaaagaactgcagttgcaggccaattttcttggcaacgtgaagcggttgtacgaggccgaggttttcagtactgacttctccaatccgagtattgctcaggcaaggataaatagtcatgtaaaaaagaagacgcaaggcaaggttgttgatataatccagggtctggatcttttaacagccatggtcctcgtgaaccatatattcttcaaggcgaagtgggaaaagccttttcacccggagtacaccaggaaaaacttcccctttctggtcggtgaacaggtgaccgtccacgtcccaatgatgcaccagaaagagcagtttgctttcggagtggatactgagctcaattgctttgtgctgcaaatggattataaaggggacgccgtggccttttttgtgctcccatccaagggtaaaatgagacaactagaacaggcactatccgccagaacccttcgaaagtggtctcattcactccaaaaacgatggatcgaggtctttattcctcgattctctatatctgctagctataacctggaaaccattctccccaaaatgggtatacagaacgtctttgacaaaaacgctgatttttcgggaatcgccaagcgcgactcacttcaagtgtctaaggctacccacaaggccgttttggatgtctctgaggaggggaccgaagcaactgcagctactaccaccaagtttattgtgagatctaaggacggcccgagttacttcaccgtgagctttaatagaaccttcttgatgatgatcaccaataaagctacagacgggattctgtttcttggaaaggttgagaaccccactaaatcctag

SEQ ID NO: 103608 - DNA, 861 bp, Artificial Sequence
  derived and/or modified sequence
atgggcagcgccctgtttgtgaagaaggagctgcagctgcaggccaacttcctgggcaatgtgaagaggctgtatgaagctgaggtgttcagcacagacttcagcaaccccagcatcgcccaggcccgcatcaacagccacgtgaagaagaagacccagggcaaggtggtggacatcatccagggcctggacctgctgacagccatggtgctggtgaaccacatcttcttcaaggccaagtgggagaagcccttccaccctgagtacaccaggaagaacttccccttcctggtgggggagcaggtgacagtgcacgtgcccatgatgcaccagaaggagcagtttgcctttggagtggacacagagctgaactgctttgtgctgcagatggactacaagggagatgctgtggccttctttgtgctgcccagcaagggcaagatgaggcagctggagcaggccctgagcgcccggaccctgaggaagtggagccacagcctgcagaagcgctggattgaggtgttcatcccccgcttcagcatcagcgccagctacaacctggagaccatcctgcccaagatgggcatccagaatgtgtttgacaagaatgctgacttctctggaattgccaagagggacagcctgcaggtgtccaaggccacccacaaggctgtgctggatgtgtctgaggagggcacagaggccacagctgccaccaccaccaagttcatcgtgcgcagcaaggatggccccagctacttcaccgtgtccttcaacagaaccttcctgatgatgatcaccaacaaggccacagatggcatcctcttcctgggcaaggtggagaaccccaccaagagctag

SEQ ID NO: 103609 - DNA, 861 bp, Artificial Sequence
  derived and/or modified sequence
atgggcagcgccctgttcgtgaagaaggagctgcagctgcaggccaatttcctcggaaacgttaaaagactgtacgaagccgaggtattttcaactgattttagtaatccttccatagcccaggctcggatcaatagccatgtaaagaagaagacacagggcaaagtcgttgatattattcagggcctggacctgcttactgctatggtgctggttaaccatatcttttttaaagctaaatgggagaagccattccaccctgagtacaccagaaagaatttccctttcctggttggtgagcaggttacagtccacgtgcccatgatgcatcaaaaagagcagttcgccttcggagttgacaccgaactgaactgcttcgtcctgcagatggattataaaggcgacgctgttgcgttttttgtgctcccgagtaaaggcaagatgaggcaactggagcaggccctctcggccaggaccttgcgcaagtggtcccacagtctgcagaaacgatggatcgaggtcttcatcccccggttctcgatttccgcatcttacaatctagagacgatccttcctaaaatgggcatccagaacgtgttcgataagaacgctgacttctctgggattgcgaaaagagattctctccaggtgtccaaagccacccacaaggctgtcttagacgtgagcgaggaagggaccgaggctacagcagcaactactactaagtttatagtccgcagtaaggacggtcctagttatttcacagtcagcttcaaccggacatttctgatgatgatcaccaacaaagcaacagacgggattctctttctggggaaggtcgagaaccccactaaatcatag

SEQ ID NO: 103610 - RNA, 861 nt, Artificial Sequence
  derived and/or modified sequence
augggcucagcgcuguucgucaaaaaagaacuccagcuccaggcaaacuuccuggguaacgucaaaagacucuacgaggcugaaguuuucucaacggauuucagcaaucccuccaucgcacaggcccgaaucaacucucacgugaaaaagaaaacccagggcaaggucguagacauaauccagggacuggaucuccuaacagcuaugguguuaguuaaccacauuuucuuuaaggcuaagugggagaaaccuuuucacccugaguauacccgcaaaaacuuccccuuucugguaggagagcagguuacuguccaugugccaaugaugcaucagaaagagcaguuugccuuuggggucgacacagaacuaaacugcuucguccugcagauggacuacaagggcgacgcugucgcuuuuuuugucuuacccagcaaggguaaaaugcgccagcuggagcaggcccugucugcuagaacguuacguaaguggucucacagucuacagaaaagauggauugagguuuuuauccccagguuuucuaucagugcgaguuauaauuuggaaacuauucucccaaaaaugggaauucaaaauguauuugauaaaaaugccgauuuuaguggcauugccaaaagggauucauugcagguauccaaagccacccacaaagcuguucuggauguguccgaggaaggaaccgaagccacugcagccacgacaaccaaauuuauagucagaagcaaggacggaccguccuacuuuaccgugucauuuaaucgaacuuuucucaugaugaucaccaauaaagccacagaugggauccucuucuugggcaagguugaaaacccuaccaaaaguuag

SEQ ID NO: 103611 - RNA, 861 nt, Artificial Sequence
  derived and/or modified sequence
auggguuccgccuuauuuguaaaaaaggagcugcaacugcaagccaacuuccugggaaauguuaagcggcuuuacgaagcggaggucuuuagcacagauuuuagcaacccuaguauagcccaggcacgcauaaauucucaugucaagaaaaagacccaaggaaaggucguggacauaauucagggacuggaucuacugacugccauggugcucgucaaccauauauuuuucaaggccaaaugggagaaacccuuucaucccgaauacacucggaaaaauuuccccuuucucguuggagagcagguuaccguacacguaccaaugaugcaccagaaagaacaguucgcauuugggguagauaccgaguuaaauugcuucgugcugcaaauggacuacaaaggcgaugcaguugccuuuuuuguucuaccuagcaaaggcaaaaugaggcagcuugaacaggcauugucagcaagaaccuugaggaaauggucccacagccuacagaagagauggauugaaguguucaucccaagauucucuaucucugcaagcuacaaccuggaaaccauucuaccaaaaauggggauucaaaaugucuuugauaaaaacgcugacuucuccggcauugccaaacgcgauuccuuacaagugucaaaggcgacucauaaagcuguucucgacguaagcgaggaggggacagaggcuaccgcagccacuacuacuaaguuuaucguucgcucaaaggacggcccuucguauuuuaccgugucauuuaacagaacguuccuuaugaugauaaccaauaaagcuacugacggcauucuguuucuggggaaaguugagaacccuaccaaaaguuag

SEQ ID NO: 103612 - protein, 820 aa, Artificial Sequence
  derived and/or modified sequence
MTDTRRRVKVYTLNEDRQWDDRGTGHVSSGYVERLKGMSLLVRAESDGSLLLESKINPNTAYQKQQDTLIVWSEAENYDLALSFQEKAGCDEIWEKICQVQGKDPSVDITQDLVDESEEERFDDMSSPGLELPSCELSRLEEIAELVASSLPSPLRREKLALALENEGYIKKLLELFHVCEDLENIEGLHHLYEIIKGIFLLNRTALFEVMFSEECIMDVIGCLEYDPALSQPRKHREFLTKTAKFKEVIPISDPELKQKIHQTYRVQYIQDMVLPTPSVFEENMLSTLHSFIFFNKVEIVGMLQEDEKFLTDLFAQLTDEATDEEKRQELVNFLKEFCAFSQTLQPQNRDAFFKTLSNMGILPALEVILGMDDTQVRSAATDIFSYLVEYNPSMVREFVMQEAQQNDDDILLINLIIEHMICDTDPELGGAVQLMGLLRTLVDPENMLATANKTEKTEFLGFFYKHCMHVLTAPLLANTTEDKPSKDDFQTAQLLALVLELLTFCVEHHTYHIKNYIINKDILRRVLVLMASKHAFLALCALRFKRKIIGLKDEFYNRYIMKSFLFEPVVKAFLNNGSRYNLMNSAIIEMFEFIRVEDIKSLTAHVIENYWKALEDVDYVQTFKGLKLRFEQQRERQDNPKLDSMRSILRNHRYRRDARTLEDEEEMWFNTDEDDMEDGEAVVSPSDKTKNDDDIMDPISKFMERKKLKESEEKEVLLKTNLSGRQSPSFKLSLSSGTKTNLTSQSSTTNLPGSPGSPGSPGSPGSPGSVPKNTSQTAAITTKGGLVGLVDYPDDDEDDDEDEDKEDTLPLSKKAKFDS

SEQ ID NO: 103613 - DNA, 2463 bp, Artificial Sequence
  derived and/or modified sequence
atgaccgacaccagaagaagagtgaaggtgtacaccctgaacgaggacagacagtgggacgacagaggcaccggccacgtgagcagcggctacgtggagagactgaagggcatgagcctgctggtgagagccgagagcgacggcagcctgctgctggagagcaagatcaaccccaacaccgcctaccagaagcagcaggacaccctgatcgtgtggagcgaggccgagaactacgacctggccctgagcttccaggagaaggccggctgcgacgagatctgggagaagatctgccaggtgcagggcaaggaccccagcgtggacatcacccaggacctggtggacgagagcgaggaggagagattcgacgacatgagcagccccggcctggagctgcccagctgcgagctgagcagactggaggagatcgccgagctggtggccagcagcctgcccagccccctgagaagagagaagctggccctggccctggagaacgagggctacatcaagaagctgctggagctgttccacgtgtgcgaggacctggagaacatcgagggcctgcaccacctgtacgagatcatcaagggcatcttcctgctgaacagaaccgccctgttcgaggtgatgttcagcgaggagtgcatcatggacgtgatcggctgcctggagtacgaccccgccctgagccagcccagaaagcacagagagttcctgaccaagaccgccaagttcaaggaggtgatccccatcagcgaccccgagctgaagcagaagatccaccagacctacagagtgcagtacatccaggacatggtgctgcccacccccagcgtgttcgaggagaacatgctgagcaccctgcacagcttcatcttcttcaacaaggtggagatcgtgggcatgctgcaggaggacgagaagttcctgaccgacctgttcgcccagctgaccgacgaggccaccgacgaggagaagagacaggagctggtgaacttcctgaaggagttctgcgccttcagccagaccctgcagccccagaacagagacgccttcttcaagaccctgagcaacatgggcatcctgcccgccctggaggtgatcctgggcatggacgacacccaggtgagaagcgccgccaccgacatcttcagctacctggtggagtacaaccccagcatggtgagagagttcgtgatgcaggaggcccagcagaacgacgacgacatcctgctgatcaacctgatcatcgagcacatgatctgcgacaccgaccccgagctgggcggcgccgtgcagctgatgggcctgctgagaaccctggtggaccccgagaacatgctggccaccgccaacaagaccgagaagaccgagttcctgggcttcttctacaagcactgcatgcacgtgctgaccgcccccctgctggccaacaccaccgaggacaagcccagcaaggacgacttccagaccgcccagctgctggccctggtgctggagctgctgaccttctgcgtggagcaccacacctaccacatcaagaactacatcatcaacaaggacatcctgagaagagtgctggtgctgatggccagcaagcacgccttcctggccctgtgcgccctgagattcaagagaaagatcatcggcctgaaggacgagttctacaacagatacatcatgaagagcttcctgttcgagcccgtggtgaaggccttcctgaacaacggcagcagatacaacctgatgaacagcgccatcatcgagatgttcgagttcatcagagtggaggacatcaagagcctgaccgcccacgtgatcgagaactactggaaggccctggaggacgtggactacgtgcagaccttcaagggcctgaagctgagattcgagcagcagagagagagacaggacaaccccaagctggacagcatgagaagcatcctgagaaaccacagatacagaagagacgccagaaccctggaggacgaggaggagatgtggttcaacaccgacgaggacgacatggaggacggcgaggccgtggtgagccccagcgacaagaccaagaacgacgacgacatcatggaccccatcagcaagttcatggagagaaagaagctgaaggagagcgaggagaaggaggtgctgctgaagaccaacctgagcggcagacagagccccagcttcaagctgagcctgagcagcggcaccaagaccaacctgaccagccagagcagcaccaccaacctgcccggcagccccggcagccccggcagccccggcagccccggcagccccggcagcgtgcccaagaacaccagccagaccgccgccatcaccaccaagggcggcctggtgggcctggtggactaccccgacgacgacgaggacgacgacgaggacgaggacaaggaggacaccctgcccctgagcaagaaggccaagttcgacagctag

SEQ ID NO: 103614 - DNA, 3894 bp, Artificial Sequence
  derived and/or modified sequence
tgaggggcgaaccaagatggcggcggttttggctgtgtgaggaagacggaagagacggcggcggagggaaaccgacttccactagtccgggtcgcttgggcggccgggggccctcagagtctcccgggcagtggtagcagttgcagcaggatcaggcgcctgtcggcttctgacgtttaaaacagggggagcggaagggagccactggccgcggtggcagggccagggcccctttcctgggcgtctactggcggggcccccgccccggttcccgggcggcacgatgaccgacacccggcggcgggtgaaggtgtacacgctcaacgaggaccggcagtgggacgaccggggcaccgggcatgtgtcgtctggctacgtggagcggctgaagggcatgtccctgcttgtcagggctgagagcgacggttctctacttttagagtcgaaaataaatcctaacactgcataccagaaacaacaggacactctgattgtgtggtctgaagcagaaaattatgacttggcccttagctttcaagaaaaagctggatgtgatgaaatttgggagaaaatatgtcaggttcaaggaaaggacccttccgtggacatcactcaggaccttgtggatgaatctgaagaggagcgttttgatgatatgtcatcgccaggcttagaattgccatcttgtgaattaagtcgccttgaagaaattgcagaacttgtggcatcatctttaccttcacctcttcgtcgtgaaaaacttgcactggcactagaaaatgagggttatattaaaaagctcctggagctttttcatgtgtgtgaagatttggaaaatattgaaggactgcaccacttgtatgaaattatcaaaggcatctttctcttgaatcgaactgctctttttgaagttatgttctctgaagaatgtataatggacgtcattggatgtttagaatatgatcctgctttatcacaaccacgaaaacacagggaatttctaacaaaaacagccaagtttaaagaagtgattcccatatcagatcctgagctgaaacaaaaaattcatcagacatacagagttcagtatatacaagatatggttctaccaactccttcggtctttgaagaaaacatgttatcaacacttcactcttttatctttttcaataaggtagagattgttggcatgttgcaggaagatgaaaaatttctgacagatttgtttgcacaactaacagatgaagcaacagatgaggaaaaaagacaggaattggttaactttttaaaagaattttgtgcgttttcccaaacgctacagcctcaaaacagagatgcttttttcaagactttgtcaaacatgggcatattaccagctttagaagtcatccttggcatggatgatacacaggtgcgaagtgctgctactgatatattctcatacttggttgaatataatccatccatggtacgagagtttgtcatgcaggaggcacaacagaatgatgatgatattttgctcatcaacctcattatagaacatatgatttgtgatacagatcctgaacttggaggagcagtccagcttatgggcctgcttcgaactttagttgacccagagaacatgctagccactgccaataaaacagaaaagactgaatttctgggtttcttctacaagcactgtatgcatgttctcactgctcctttactagcaaatacaacagaagacaaacctagtaaagatgattttcagactgcccaactattggcacttgtattggaattgttaacattttgtgtggagcaccatacctaccacataaagaactacattattaataaggatatcctccggagagtgctagttcttatggcctcgaagcatgctttcttggcattatgtgcccttcgttttaaaagaaagattattggattaaaagatgagttttacaaccgctacataatgaaaagttttttgtttgaaccagtagtgaaagcatttctcaacaatggatcccgctacaatctgatgaactctgccataatagagatgtttgaatttattagagtggaagatataaaatcattaactgctcatgtaattgaaaattactggaaagcactggaagatgtagattatgtacagacatttaaaggattaaaactgagatttgaacaacaaagagaaaggcaagataatcccaaacttgacagtatgcgttccattttgaggaatcacagatatcgaagagatgccagaacactagaagatgaagaagagatgtggtttaacacagatgaagatgacatggaagatggagaagctgtagtgtctccatctgacaaaactaaaaatgatgatgatattatggatccaataagtaaattcatggaaaggaagaaattaaaagaaagtgaggaaaaggaagtgcttctgaaaacaaacctttctggacggcagagcccaagtttcaagctttccctgtccagtggaacgaagactaacctcaccagccagtcatctacaacaaatctgcctggttctccgggatcacctggatccccaggatctccaggctctcctggatccgtacctaaaaatacatctcagacggcagctattactacaaagggaggcctcgtgggtctggtagattatcctgatgatgatgaagatgatgatgaggatgaagataaggaagatacgttaccattgtcaaagaaagcaaaatttgattcataataatggcaacggcctaggatcagtacctgttgaaaaaaactggttctccacccctcccccatacaaaatccacaacaaagcgcagtggtctcttgtgaatgactgacacagatcagcctcttacacttgacttctgctcatcaagtgccaattcaatggagcaggaggaggggatatcatatatttaggggaaagacttaagcctttgagctctccagcttggaccacacattgcccttttctcagggaaggaaatggaaacaaaaagccaacagggcaggggttttgtaagtggaactctggattgactggtcagttgctacaatcagaatatgctttcttggaccatgtttgagactcagaagaatgggcctttctgccataattcttcactagtcaagaatgccagcagtttctttgtataaagagacctgcctttaaaatcatacattctgaacattttagtcaagctacaacaggtttggaaaacctctgtgggggaggggcgagtataaagttttcctcttttttaactgttccctttgcccttcaaactgcagatatttttttttttaagtggggacttctccctacttgattaaagattgagtggaattctagatgtggtcatttgtgtcataatttttttgttttattttgtttttgattttttttttcctcccctgagtgtatgcttagttgttgagtatatatatttgggaccattaaaactttttttgatgtaatataacctaacgttgtgctggtacctgttttaccatgtgtaatttttgttctacatcacagttcttaatttgtttagagttttatgaaagatggtatagtttttattgacaaaagcaaagtaatcttacaactatgtgcatacaaaagcaatactattttgtgactaaatattttatattaaaatttacatcagcaactgtcttgagaattcagggaaatagaatggaatttaaaacttcaacagttttgttaaatctagaaacatgaaattagtattccaaagagattctgaaatttcttttcttggggaaatgacggtacattaaatcaaaattgaggatggatgatttaaaaacatttgacttttgaataataaaaagaaaagtgaagagtaagagaaa

SEQ ID NO: 103615 - DNA, 2463 bp, Artificial Sequence
  derived and/or modified sequence
atgaccgataccagacgcagagtgaaggtctataccctgaacgaggacagacaatgggacgatcgcgggactggccacgtgtcttctgggtatgtcgagcggcttaagggtatgtcactgttggtgcgggctgaatcggacggcagcctcctactagaatctaagataaatccgaacactgcctaccaaaagcaacaggatactctgattgtatggtctgaggctgagaactatgatcttgctttgagttttcaggaaaaagccggctgtgatgagatctgggagaaaatttgtcaagtccagggaaaggatccatcggtagacataactcaagaccttgtggatgagagcgaggaggagcgtttcgacgacatgagcagccctggtctggaactaccctcttgtgagctgtcccgactggaagaaattgcggagttggtcgcaagttctttaccatctcctctgcgccgggagaagctcgccctggcactcgagaatgaaggctacataaaaaagctcctggagctgttccacgtgtgtgaggatctagagaacattgagggcctccatcacctctacgaaattattaaggggatctttctcctcaaccgtactgctctattcgaagtgatgtttagtgaggaatgtatcatggatgtgatcggttgtctggagtacgatcctgctctgagccagcccaggaagcatagggaatttctgaccaaaaccgcaaagtttaaagaagtgatccctataagcgaccctgaactgaagcaaaagattcaccagacctaccgcgtccagtacattcaggacatggtcctgcctaccccatctgttttcgaagagaatatgctcagtacccttcatagcttcatcttttttaacaaggtggagatcgtcggaatgctccaggaggacgaaaagtttctcactgacctcttcgctcagctcactgacgaggcaacagacgaggaaaaacgacaggaactggtcaatttccttaaagagttctgcgctttttcacagaccctgcagccccagaaccgcgacgcattcttcaagaccttaagcaatatggggatccttcccgctcttgaggtcattctgggaatggacgacacgcaggtccgcagcgccgcaaccgacatcttttcctatctagtggagtataatccttcaatggtacgggaattcgtgatgcaggaggcgcaacagaatgacgacgatattctcctcatcaacttgattattgagcacatgatctgcgataccgatcctgaattgggtggagctgtgcagctaatgggacttctaaggaccctcgtagacccagaaaatatgctggcaactgcgaacaagactgagaagacagagttcctcgggtttttttataagcactgcatgcacgtgctcacagctcctctgctggccaacacaacggaagataagccctctaaggatgactttcaaacagcccaactgctggcacttgttctagaactactgacattttgtgtggagcaccacacatatcatataaaaaactacattatcaataaagatattttgaggcgggtattggtgcttatggcctcaaagcacgcctttttggccctgtgcgcactgaggttcaaaagaaagataataggactaaaagatgagttttataaccggtacattatgaaaagcttcttgttcgagccagtggtgaaggcatttcttaacaatggctctcgttacaacctgatgaactctgctatcatcgaaatgttcgagttcatccgcgtagaggatatcaaatcacttactgcacatgtgatcgaaaactattggaaggccttggaagatgtcgactatgttcagaccttcaaaggccttaaacttcgattcgaacagcagcgcgagcgccaggacaatcccaaactggactctatgcggtctatcttacggaaccacaggtacagaagggatgctagaactctcgaagatgaagaggagatgtggtttaacactgatgaagatgatatggaggacggagaggccgtggtttccccttctgacaaaaccaagaatgacgacgacattatggaccccattagcaaatttatggagagaaagaaactaaaagaatccgaagagaaagaggttctgctgaaaacaaatctcagcgggagacagagcccatccttcaagttaagcctttctagtggtaccaagaccaatctcacaagccagtcctcaacaacaaaccttcccggaagtcccggttctcccgggagccctgggagccccggatcgccagggtctgtgcctaaaaatacgagtcagaccgctgccatcaccacaaaaggcggacttgtggggctcgtagactatccagacgacgacgaggacgatgacgaagatgaggacaaggaggatacgctgcccctgtctaaaaaggcgaaatttgatagctag

SEQ ID NO: 103616 - DNA, 2463 bp, Artificial Sequence
  derived and/or modified sequence
atgacagatactcggcgtcgcgtaaaggtttacactttgaatgaggaccggcaatgggatgatcggggtacaggtcacgtgagtagtggctacgtagagcgtctgaaggggatgagcctgctggtgcgggctgagagtgatggttctttgctacttgaaagcaagatcaaccctaacaccgcctatcagaagcaacaggacacgctcatcgtgtggtcagaggccgagaactatgatcttgcactaagtttccaggagaaggcagggtgcgatgagatctgggagaagatctgtcaagtacaggggaaagacccctccgtggacattacccaagatcttgtagacgagagcgaggaagaacgtttcgatgacatgtcgtcaccagggctggagctgccctcttgcgagctaagccgcttggaggagatcgctgaattggtggcctcctcactgccctcccctctgaggcgagagaaactggctctcgccctcgaaaatgagggttatattaagaaattgctggagttattccacgtttgtgaagatctggaaaacatcgaggggttgcatcacctgtacgaaatcatcaagggtatattccttcttaatcggacagctctgtttgaggttatgttctctgaagagtgcattatggatgtgatagggtgtttagagtatgacccagctttgtcacagccaaggaaacaccgcgaatttctgaccaaaaccgcaaagttcaaggaggtgatcccaatttctgatcctgaactgaagcagaaaatacaccagacatacagagtgcaatatatccaggacatggtcctgccaaccccgagcgtgttcgaagaaaatatgctgagcaccttgcactcctttattttctttaacaaagtggaaattgtgggaatgctgcaggaagatgagaagttcctgactgatctgttcgcccaactaacagatgaagccactgacgaagaaaagagacaagagcttgtgaattttctaaaagagttctgtgcattcagtcagacgctccaaccacagaaccgagatgcgttcttcaagaccctgtctaatatggggatcttacctgcattagaggtgattctcggcatggatgatactcaggtgaggtccgccgccactgatatcttttcatatctggtggaatacaatcccagtatggtgcgggagttcgttatgcaggaggcccagcagaacgatgacgatattctccttattaatctgattatcgaacatatgatctgcgacactgatccagaattaggaggggctgtccagctgatggggttgctccggactttggtggacccggagaacatgttggcgactgccaataagacggaaaaaaccgagttcttggggtttttctataaacactgcatgcacgtgctcacagcccccctgctggccaacaccaccgaggataagccaagtaaagatgactttcagactgcccagctcctggccttagtgttggaactgctcaccttttgcgtagagcaccacacgtatcacattaaaaattatattatcaacaaggatattctgcggagggtacttgtccttatggccagtaagcacgccttcctggcactgtgcgcacttagattcaaacgaaaaattataggcctgaaagatgaattttataacagatacatcatgaaaagtttcctgttcgaaccagtggtgaaggctttcctcaataacggctcacggtataatctgatgaatagcgcaatcatcgagatgttcgagtttattcgggtggaagatatcaaatccttgactgcacacgtgatcgaaaattactggaaggcacttgaagacgtcgattatgtccagaccttcaaaggactgaaactgagattcgaacaacagcgcgagagacaagacaatcctaagctagactcaatgcggagcattttgcgtaatcaccgatacagaagagacgcaaggaccctggaggatgaagaggaaatgtggtttaacaccgacgaggacgatatggaggatggtgaagcagtggtgtccccctcggacaagacaaagaatgatgatgacattatggaccccatcagcaagttcatggagcgaaagaaacttaaggagagcgaagagaaagaggttcttctgaaaaccaacctttctgggcgacagtccccaagctttaaactgtctctctccagcggaactaaaaccaatctcaccagccagtcctccactacgaaccttccaggctctcccggctctccgggatcacccggctccccgggctcaccaggatctgtgcccaagaatacatcacaaaccgctgcgatcaccacgaagggcggtctggttggcctagtggattacccagatgatgacgaggatgatgacgaagacgaggacaaggaagatacccttccgctgagcaagaaagccaaattcgatagctag

SEQ ID NO: 103617 - DNA, 2463 bp, Artificial Sequence
  derived and/or modified sequence
atgacagacacccggcggcgggtgaaggtgtacaccctgaatgaagatcggcagtgggatgaccggggcaccggccacgtgagcagcggctacgtggagcggctgaagggcatgagcctgctggtgcgggcagagagtgatggcagcctgctgctggagagcaagatcaaccccaacacagcctaccagaagcagcaggacaccctcatcgtgtggagcgaggccgagaactatgacctggccctgtccttccaggagaaggccggctgtgatgagatctgggagaagatctgccaggtgcagggcaaggaccccagcgtggacatcacccaggacctggtggatgaaagtgaggaggagagatttgatgacatgagcagccctggcctggagctgcccagctgtgagctgagccggctggaggagattgctgagctggtggccagcagcctgcccagccccctgcggcgggagaagctggccctggccctggagaatgaaggctacatcaagaagctgctggagctgttccacgtgtgtgaggacctggagaacatcgagggcctgcaccacctgtatgagatcatcaagggcatcttcctgctgaacagaacagccctgtttgaggtgatgttttctgaggagtgcatcatggatgtgattggctgcctggagtatgaccctgccctgagccagcccaggaagcaccgggagttcctgaccaagacagccaagttcaaggaggtgatccccatcagtgaccctgagctgaagcagaagatccaccagacctacagagtgcagtacatccaggacatggtgctgcccaccccatctgtgtttgaggagaacatgctgagcaccctgcacagcttcatcttcttcaacaaggtggagatcgtgggcatgctgcaggaggatgagaagttcctgacagacctgtttgcccagctgacagatgaggccacagatgaggagaagaggcaggagctggtgaacttcctgaaggagttctgtgccttcagccagaccctgcagccccagaacagagatgccttcttcaagaccctgagcaacatgggcatcctgcctgccctggaggtgatcctgggcatggatgacacccaggtgcgctctgctgccacagacatcttctcctacctggtggagtacaaccccagcatggtgcgggagtttgtgatgcaggaggcccagcagaatgatgatgacatcctgctgatcaacctgatcatcgagcacatgatctgtgacacagatcctgagctgggcggcgctgtgcagctgatgggcctgctgcggaccctggtggaccctgagaacatgctggccacagccaacaagacagagaagacagagttcctgggcttcttctacaagcactgcatgcacgtgctgacagcccccctgctggccaacaccacagaggacaagcccagcaaggatgacttccagacagcccagctgctggccctggtgctggagctgctgaccttctgtgtggagcaccacacctaccacatcaagaactacatcatcaacaaggacatcctgcggcgggtgctggtgctgatggccagcaagcacgccttcctggccctgtgtgccctgcgcttcaagaggaagatcatcggcctgaaggatgagttctacaaccgctacatcatgaagagcttcctgtttgagcctgtggtgaaggccttcctgaacaacggcagccgctacaacctgatgaacagcgccatcatcgagatgtttgagttcatccgggtggaggacatcaagagcctgacagcccacgtgattgagaactactggaaggccctggaggatgtggactatgtgcagaccttcaagggcctgaagctgcgctttgagcagcagcgggagcggcaggacaaccccaagctggacagcatgaggagcatcctgaggaaccaccgctacagaagagatgcccggaccctggaggatgaggaggagatgtggttcaacacagatgaagatgacatggaggatggagaggccgtggtgagccccagcgacaagaccaagaatgatgatgacatcatggaccccatcagcaagttcatggagaggaagaagctgaaggagagcgaggagaaggaggtgctgctgaagaccaacctgagcggccggcagagccccagcttcaagctgagcctgagcagcggcaccaagaccaacctgaccagccagagcagcaccaccaacctgcccggcagccctggcagccctggcagccctggcagccctggcagccctggctctgtgcccaagaacaccagccagacagctgccatcaccaccaagggcggcctggtgggcctggtggactacccagatgatgatgaagatgatgatgaagatgaggacaaggaggacaccctgcccctgagcaagaaggccaagtttgacagctag

SEQ ID NO: 103618 - DNA, 2463 bp, Artificial Sequence
  derived and/or modified sequence
atgaccgacacccggcggcgggtgaaggtgtacaccctgaacgaggaccgccaatgggatgaccgggggaccggtcacgtctccagtgggtatgtggagcgcctgaaagggatgtcattactggtccgggcagaatcagatggcagcttgctgctcgagtctaagatcaatcccaatacggcctatcagaaacagcaggacaccctcatcgtctggtccgaggccgaaaactatgatcttgccttatcattccaggagaaggctggttgcgacgaaatttgggagaaaatctgccaggtgcagggtaaagatccttcagttgacattacccaggatttagttgatgagtctgaggaggagcgctttgacgacatgagcagccccggcctcgaactccccagctgtgagctttctaggctagaggaaatcgccgagctggttgcctctagtcttccttcacccctgagacgggaaaaactcgcattggctctcgagaatgagggatatattaagaaactcttggagctgtttcacgtctgcgaagacctcgagaacattgaaggcctgcatcacctgtatgaaatcattaaaggcattttcctgcttaacaggacagctctgttcgaggtgatgttctctgaggaatgtattatggacgtgatcggttgtctggagtacgatcctgcgctcagccagccacgtaaacaccgagagttcttgactaaaactgcaaagtttaaagaggtcattcctatctccgatcctgaactcaaacagaagatccatcaaacttacagagtacaatacatccaagacatggtgttgccaaccccaagcgtatttgaggagaacatgttatcaactctgcactcttttatattcttcaataaagtggagatagtcggtatgctccaagaagacgagaagtttctgacagatctgtttgcccagctgaccgacgaggccacagacgaggaaaagcgccaagaactcgtgaacttcctgaaagagttctgcgccttttcacagactcttcagccacagaaccgcgatgcgttttttaaaactctaagtaacatgggcatcctccctgccctggaagtgatactgggaatggatgacacacaagttagaagcgccgccacggatatcttctcttatttggtggaatacaacccctcgatggtcagggaattcgtcatgcaggaggctcagcagaatgatgacgacatcttattaataaacctgatcatcgaacatatgatctgcgataccgaccccgaactcggaggagcggtgcagctcatggggcttctccggactttggtggacccagagaacatgctggcgacggcaaataaaaccgaaaaaacggaatttcttggctttttttataaacattgtatgcatgtgctgaccgccccccttctggccaacactacggaagataaaccatccaaggatgatttccagactgcacagctcctcgcactggttctggagctcttgacattctgtgtggagcatcacacctatcacataaaaaactacattataaacaaagatattctgcgaagggtgttggtgctgatggcttctaagcatgccttccttgcactgtgtgccctcagatttaaacgcaaaattattggcctaaaagatgaattctataatcgatatatcatgaagagttttctgtttgagcctgtggtgaaggccttcctaaacaacggcagtcgctacaacctgatgaattctgccatcatcgagatgtttgagtttatcagggtcgaggacatcaagtccctgacggcacacgtcatcgagaattattggaaagccctggaagatgttgactatgtccagaccttcaagggtttaaaactgcgcttcgagcagcagcgggaaagacaggacaatccaaagctcgactccatgcggtccatcctgaggaatcaccggtacagacgggatgccaggacccttgaagacgaggaagaaatgtggttcaataccgacgaagatgacatggaagacggcgaggctgtggtcagtccttccgacaaaactaagaatgatgacgatataatggaccccatttccaagttcatggagagaaaaaagttgaaagaatcagaggagaaggaagtcctgctaaagaccaacctgagcgggagacaatcaccatccttcaagctgagtctctcttctggcacaaagaccaatctcacaagccagtcttccaccacaaatctccccggttccccggggtcaccaggttctccggggtcgcccgggtcacctggctcagtgccaaaaaatacgtctcagactgccgccatcacaacaaagggcggcctggtgggtctcgttgattatcctgacgacgacgaggacgacgacgaggacgaagataaggaggatactcttcctctgtctaaaaaggccaagttcgacagttag

SEQ ID NO: 103619 - DNA, 2463 bp, Artificial Sequence
  derived and/or modified sequence
atgaccgacacccggcggcgggtgaaggtgtacaccctgaacgaggaccggcagtgggatgacagaggaacaggtcacgtgtccagcgggtacgtggagcgattaaagggtatgtctctgctggttcgcgctgagtcggatggcagtctgctgctggagagcaaaattaatccgaatactgcctaccagaagcagcaggacaccctgatcgtctggtccgaagctgagaattacgatctggctttgtcttttcaagaaaaagctgggtgtgacgagatttgggagaaaatatgccaggtgcagggcaaggaccccagcgtggatatcacacaggacctggtagatgaatcagaggaggagcggtttgacgacatgagtagtcctggtctcgagctgccgagttgcgaactgtcacgcttagaggaaatcgccgagctcgtagcttcttccctgcctagcccgctgcggcgagagaaactcgccctcgccctcgaaaacgaggggtacattaaaaaattgctggagttattccacgtctgtgaggatcttgagaatatcgaaggcctgcaccacttatacgagatcattaagggtattttcctgctgaaccgaacggcactgtttgaggttatgttctcagaagagtgtatcatggatgtgattggctgcctcgagtatgatccagcgctcagccagcctcggaaacatcgagaattcttgacgaaaactgctaagtttaaggaggttattcccataagcgatcccgaactgaaacagaagatccaccaaacctatcgcgtgcaatacattcaagacatggttctgcctacgccatccgtcttcgaggagaacatgctctcaacactgcactcgtttattttttttaataaagtcgaaattgttggtatgcttcaggaggacgagaagttcttaacagacttattcgcccagctgactgacgaggcaacggacgaggagaagcgacaggagctggtgaacttcttaaaggaattttgtgcattttcccagacacttcagcctcaaaatagggacgccttctttaagacactttcaaacatgggaatcctccccgcactggaagttattcttgggatggacgatacccaggtgagatccgccgctactgatatcttctcctaccttgtggagtataaccccagcatggttcgggagttcgtgatgcaggaagcccagcagaatgacgacgatatcttacttataaacctcataattgaacacatgatctgtgacacagatcccgagctgggcggcgcagtgcaactcatgggactgctgagaactctggtggacccagaaaacatgcttgctactgccaacaagacagagaagaccgagtttttaggctttttctataaacactgcatgcacgtgctgacagcccctttgcttgccaatacaactgaagacaagccatctaaagacgacttccagaccgcacagttgttggcactggtcctcgaactcctgactttttgcgttgagcaccatacataccacatcaaaaactatattatcaataaggatattctgcggagagtgctggtgctgatggcttctaaacatgccttcctggcactgtgcgcccttcgtttcaagcgaaaaatcattggcttgaaagacgagttctataacaggtacattatgaagtccttcctattcgaaccagtggtgaaggcctttttaaacaacgggagcagatacaacctgatgaattcagccattatcgaaatgtttgaatttattagggtggaagacatcaaaagcctgactgctcacgtcattgagaactactggaaagctttggaggacgtcgactatgtccagacctttaaaggcctgaagctgagattcgaacagcaaagagagcgccaggataaccctaaattggactctatgcggtctattttacgaaaccacagatatcgaagggatgccagaacattggaggatgaagaggagatgtggtttaacactgatgaggatgacatggaggacggcgaggccgtggtgtctccatcggacaaaactaaaaacgatgatgatatcatggatccaatctcaaagttcatggagcggaaaaaacttaaggaatctgaggaaaaggaggtgctcctgaaaacaaatctgtctggacgtcaaagcccatctttcaagctctctctctcttccgggaccaagaccaacttgacatcacagtcctccactaccaacctgcctggttctccgggctcacccggctccccaggatctcctggctcacctggaagtgttcctaaaaacacaagccagacagcggcgataacgacgaagggaggtctcgtcgggctggtagattaccctgacgacgatgaggatgatgatgaggatgaggacaaagaggacactctgcccctttcgaagaaagctaaatttgattcctag

SEQ ID NO: 103620 - DNA, 2463 bp, Artificial Sequence
  derived and/or modified sequence
atgacagacaccagacgacgggtgaaggtgtacacactgaacgaggaccggcagtgggatgatagaggaaccggccatgtcagctcaggatatgtggagcgactcaaaggaatgtccttgctggtaagggccgagtctgatggaagcctgctgctggaatctaagattaatccaaacactgcatatcaaaagcagcaagatactctcatagtatggtctgaagccgaaaactacgatctggccttaagtttccaggaaaaggcagggtgtgatgagatatgggagaaaatctgtcaagtacaagggaaagatccatcagtggatatcactcaagacctggtggacgagtccgaggaagagcgcttcgatgatatgagtagccccggattggaactcccttcatgtgagttgagccgacttgaagagattgcggagctggtggcttcctccctgccttccccactgcgccgtgagaagcttgccctcgctttggaaaatgaaggctacattaaaaagctgctggagctctttcacgtgtgcgaggacctggaaaatatcgaaggcctgcatcacctgtatgaaataataaagggtattttcctcctcaataggacagcacttttcgaggtcatgttttctgaagaatgcatcatggatgtgatcggttgcctcgagtacgaccctgcactgtcacagcctagaaaacacagggaattcttgaccaagaccgccaaatttaaggaggtgattccaattagcgatccggagctcaagcagaaaatccaccagacttatcgcgtccagtatattcaggacatggttctgcccacaccctccgtgttcgaggaaaacatgttgtccaccctgcacagttttatattttttaataaagttgagattgttgggatgcttcaggaggatgaaaaattcctgaccgacctgttcgcgcaactgactgacgaagccaccgatgaggaaaagcgacaggaactggttaattttctgaaggagttttgcgctttttcccagaccctccaaccccagaatcgagatgccttcttcaagaccctcagtaatatgggaattcttcctgcactagaagtgatcctgggcatggatgacactcaagtcagatccgctgccaccgatatcttctcttatctggttgagtataatccttccatggtgagggagttcgtcatgcaggaagcacagcagaacgacgacgacatactcttgatcaacctgataattgaacatatgatctgtgatacagatcctgagctgggaggagcagttcagcttatggggctgcttagaaccctggtcgatccagaaaacatgcttgccactgcaaacaagacagagaagactgaatttctagggttcttttataagcactgtatgcatgtgctgaccgctccccttcttgccaacaccacagaggacaagccttcaaaggatgactttcagaccgcccagctgctggccctggtactggagttgttgaccttctgtgtggagcatcacacgtatcatataaagaactacatcatcaacaaagatatcctgaggcgtgttcttgtgctcatggcaagcaaacatgcctttctcgcgctatgcgcactgagattcaaacgcaagatcatcggattaaaggacgagttttataatcgctatataatgaagagcttcttgtttgaaccagtggtgaaagctttccttaataatggcagtcggtacaacctcatgaactcagctatcatcgagatgtttgagttcatccgggtcgaagacatcaagtccctaacggcccatgtgatagagaattattggaaagccttagaagatgtagattatgtgcaaaccttcaaagggctgaaactgcgtttcgaacagcagagggaacgccaggataaccctaagcttgattcaatgcggtctattctgcgcaaccaccgttaccgcagggatgccaggacactagaagacgaggaagagatgtggttcaacactgatgaggatgatatggaggacggagaagccgtggtctctccatccgacaaaaccaagaacgatgatgacattatggacccaatttcaaaatttatggaaagaaaaaagcttaaagaaagcgaggaaaaggaggtgctcctaaaaacaaacttgagcggcagacagagtccttcattcaagttatctttatcctcgggaaccaagactaaccttacctctcaatcgtcaacaacaaaccttcctgggagtcccggtagtcccggaagccccggatctcctggatcgcctgggtctgtgcccaagaacacctctcagaccgccgctatcacgacaaagggcggacttgtggggctggtcgactaccccgatgatgacgaggatgacgacgaggatgaagataaggaagatactctacctttgtccaagaaagcgaaattcgacagctag

SEQ ID NO: 103621 - DNA, 2463 bp, Artificial Sequence
  derived and/or modified sequence
atgactgatactaggagaagagtgaaagtgtataccctcaacgaagaccgacagtgggatgaccgcggaacaggtcacgtgtcctccggctacgtggagcggctgaaaggaatgtcactacttgtaagagcggagagtgatggctctttactgctggagtccaagatcaatcccaacaccgcctaccagaagcaacaggatacattaatcgtttggagcgaggcagagaattacgatcttgccctcagttttcaggagaaagctgggtgtgacgagatctgggagaagatctgccaagtgcagggaaaggacccaagcgtggacatcacgcaagatcttgtggatgaaagcgaggaggagcgatttgatgacatgtctagccctggcttagaattacccagctgcgagctgtccagactggaagagatcgctgaactcgtagccagttctttgcctagtcctctgaggcgcgaaaaactggctctggctctggagaacgagggctacatcaaaaagttgctggaactgttccacgtgtgtgaggacctagaaaacatcgaaggtctgcatcacctgtatgaaattataaagggaatcttcttactgaaccgaactgccctgtttgaggtgatgttttccgaggaatgtatcatggacgtgatcgggtgtttagaatacgatcctgctctttcacagccacgtaagcaccgtgaatttttgaccaagaccgccaagttcaaagaggtgatccccatctctgatccagaactgaagcagaagatacaccaaacataccgagtgcagtatatacaggatatggtgctacctacaccctccgtctttgaggagaacatgttgagtacattacactccttcattttttttaacaaagtcgagatagtggggatgctgcaagaggatgagaagttcttgacagatctattcgcccagttaacggatgaggccacagatgaggaaaaacgacaggaactggtcaacttcctgaaagagttttgcgcattctcccagaccctgcaaccacagaatagggacgccttcttcaagactctctccaacatgggcatcctgccagcactggaggttatcctggggatggatgacacccaggtcagaagtgccgctactgatattttttcctacctcgtcgagtacaacccctctatggtgagagaatttgtcatgcaggaagcccagcaaaacgatgacgatatactgctgattaacttgataatagagcatatgatctgcgatactgaccccgagttgggaggtgccgtccagctgatgggccttcttaggactcttgtcgatccagaaaatatgcttgcgaccgccaacaaaacagagaagaccgagttcttagggtttttctacaaacattgtatgcacgttctcactgcccctcttctggctaacacgacagaggataagcccagcaaagatgactttcagacggctcagttactggcactggtgctggagcttttaacattttgcgttgagcaccatacatatcacatcaagaattatataatcaacaaagacatcctccgcagggtcctcgtactgatggcttccaaacatgcgttccttgccctctgtgcgctgcgctttaagcgcaagatcataggcctgaaggatgagttttataaccggtacataatgaaaagttttctgtttgagccagttgttaaagccttcttgaataatgggtcccggtacaatctgatgaattctgcaatcattgaaatgtttgagtttatacgtgtggaagacatcaagagcctgaccgcacacgtaatagaaaattactggaaggctcttgaggatgtcgattacgtacagacttttaaggggctgaaactgagatttgagcagcagagagaaagacaggacaacccaaaactggactctatgcgaagcatcctgcggaatcatagatacaggagggacgccaggaccttggaagacgaggaagagatgtggttcaacacagacgaggacgacatggaggatggagaggcggtcgtgagtccatcggacaaaaccaaaaacgacgatgatataatggaccctatctccaaattcatggagcgcaagaaacttaaggagagtgaggagaaagaggtgcttcttaaaaccaatctttctgggcgacaaagcccatccttcaagctgagcctgtcctccggtaccaaaacaaacctgacctctcagagctccacgacaaacctccctggtagccctggaagtcctgggtctccaggcagccccggatccccgggttccgtgcctaagaacacctcccagactgctgcaatcacgacaaaggggggtctcgttgggttggtcgactatcccgatgacgatgaggatgacgatgaggatgaagacaaggaggacacgctgcctctgagcaaaaaggccaaatttgactcgtag

SEQ ID NO: 103622 - DNA, 4108 bp, Artificial Sequence
  derived and/or modified sequence
cgcctgtcggcttctgacgtttaaaacagggggagcggaagggagccactggccgcggtggcagggccaggtataaggaaggaaaatatggcggcggcggcggcggcctgaggaggcggcggcggcgcgggaagctgcttcgcggagatcatggcggaggcgggagcagggcagtgacgggagccccgagttcctagcgctgcggggcgggaggctacgaagcgctgcgcggccccctcggggctgccgggcgccgggctcgccaggcctggacaatagcgccggggagccggaggcgaggaaaggcggcggcccagagctcggtccctggagcgggccatgcaggcggcggcgcggccccgcggcgcccagcggcggcagtgaggccggggagccctccgctcgcgggcgccctcacgcctcgcccctcgcctctccagggcccctttcctgggcgtctactggcggggcccccgccccggttcccgggcggcacgatgaccgacacccggcggcgggtgaaggtgtacacgctcaacgaggaccggcagtgggacgaccggggcaccgggcatgtgtcgtctggctacgtggagcggctgaagggcatgtccctgcttgtcagggctgagagcgacggttctctacttttagagtcgaaaataaatcctaacactgcataccagaaacaacaggacactctgattgtgtggtctgaagcagaaaattatgacttggcccttagctttcaagaaaaagctggatgtgatgaaatttgggagaaaatatgtcaggttcaaggaaaggacccttccgtggacatcactcaggaccttgtggatgaatctgaagaggagcgttttgatgatatgtcatcgccaggcttagaattgccatcttgtgaattaagtcgccttgaagaaattgcagaacttgtggcatcatctttaccttcacctcttcgtcgtgaaaaacttgcactggcactagaaaatgagggttatattaaaaagctcctggagctttttcatgtgtgtgaagatttggaaaatattgaaggactgcaccacttgtatgaaattatcaaaggcatctttctcttgaatcgaactgctctttttgaagttatgttctctgaagaatgtataatggacgtcattggatgtttagaatatgatcctgctttatcacaaccacgaaaacacagggaatttctaacaaaaacagccaagtttaaagaagtgattcccatatcagatcctgagctgaaacaaaaaattcatcagacatacagagttcagtatatacaagatatggttctaccaactccttcggtctttgaagaaaacatgttatcaacacttcactcttttatctttttcaataaggtagagattgttggcatgttgcaggaagatgaaaaatttctgacagatttgtttgcacaactaacagatgaagcaacagatgaggaaaaaagacaggaattggttaactttttaaaagaattttgtgcgttttcccaaacgctacagcctcaaaacagagatgcttttttcaagactttgtcaaacatgggcatattaccagctttagaagtcatccttggcatggatgatacacaggtgcgaagtgctgctactgatatattctcatacttggttgaatataatccatccatggtacgagagtttgtcatgcaggaggcacaacagaatgatgatgatattttgctcatcaacctcattatagaacatatgatttgtgatacagatcctgaacttggaggagcagtccagcttatgggcctgcttcgaactttagttgacccagagaacatgctagccactgccaataaaacagaaaagactgaatttctgggtttcttctacaagcactgtatgcatgttctcactgctcctttactagcaaatacaacagaagacaaacctagtaaagatgattttcagactgcccaactattggcacttgtattggaattgttaacattttgtgtggagcaccatacctaccacataaagaactacattattaataaggatatcctccggagagtgctagttcttatggcctcgaagcatgctttcttggcattatgtgcccttcgttttaaaagaaagattattggattaaaagatgagttttacaaccgctacataatgaaaagttttttgtttgaaccagtagtgaaagcatttctcaacaatggatcccgctacaatctgatgaactctgccataatagagatgtttgaatttattagagtggaagatataaaatcattaactgctcatgtaattgaaaattactggaaagcactggaagatgtagattatgtacagacatttaaaggattaaaactgagatttgaacaacaaagagaaaggcaagataatcccaaacttgacagtatgcgttccattttgaggaatcacagatatcgaagagatgccagaacactagaagatgaagaagagatgtggtttaacacagatgaagatgacatggaagatggagaagctgtagtgtctccatctgacaaaactaaaaatgatgatgatattatggatccaataagtaaattcatggaaaggaagaaattaaaagaaagtgaggaaaaggaagtgcttctgaaaacaaacctttctggacggcagagcccaagtttcaagctttccctgtccagtggaacgaagactaacctcaccagccagtcatctacaacaaatctgcctggttctccgggatcacctggatccccaggatctccaggctctcctggatccgtacctaaaaatacatctcagacggcagctattactacaaagggaggcctcgtgggtctggtagattatcctgatgatgatgaagatgatgatgaggatgaagataaggaagatacgttaccattgtcaaagaaagcaaaatttgattcataataatggcaacggcctaggatcagtacctgttgaaaaaaactggttctccacccctcccccatacaaaatccacaacaaagcgcagtggtctcttgtgaatgactgacacagatcagcctcttacacttgacttctgctcatcaagtgccaattcaatggagcaggaggaggggatatcatatatttaggggaaagacttaagcctttgagctctccagcttggaccacacattgcccttttctcagggaaggaaatggaaacaaaaagccaacagggcaggggttttgtaagtggaactctggattgactggtcagttgctacaatcagaatatgctttcttggaccatgtttgagactcagaagaatgggcctttctgccataattcttcactagtcaagaatgccagcagtttctttgtataaagagacctgcctttaaaatcatacattctgaacattttagtcaagctacaacaggtttggaaaacctctgtgggggaggggcgagtataaagttttcctcttttttaactgttccctttgcccttcaaactgcagatatttttttttttaagtggggacttctccctacttgattaaagattgagtggaattctagatgtggtcatttgtgtcataatttttttgttttattttgtttttgattttttttttcctcccctgagtgtatgcttagttgttgagtatatatatttgggaccattaaaactttttttgatgtaatataacctaacgttgtgctggtacctgttttaccatgtgtaatttttgttctacatcacagttcttaatttgtttagagttttatgaaagatggtatagtttttattgacaaaagcaaagtaatcttacaactatgtgcatacaaaagcaatactattttgtgactaaatattttatattaaaatttacatcagcaactgtcttgagaattcagggaaatagaatggaatttaaaacttcaacagttttgttaaatctagaaacatgaaattagtattccaaagagattctgaaatttcttttcttggggaaatgacggtacattaaatcaaaattgaggatggatgatttaaaaacatttgacttttgaataataaaaagaaaagtgaagagtaagagaaa

SEQ ID NO: 103623 - protein, 594 aa, Artificial Sequence
  derived and/or modified sequence
MTDTRRRVKVYTLNEDRQWDDRGTGHVSSGYVERLKGMSLLVRAESDGSLLLESKINPNTAYQKQQEDEKFLTDLFAQLTDEATDEEKRQELVNFLKEFCAFSQTLQPQNRDAFFKTLSNMGILPALEVILGMDDTQVRSAATDIFSYLVEYNPSMVREFVMQEAQQNDDVSKKLTEQKITSKDILLINLIIEHMICDTDPELGGAVQLMGLLRTLVDPENMLATANKTEKTEFLGFFYKHCMHVLTAPLLANTTEDKPSKDDFQTAQLLALVLELLTFCVEHHTYHIKNYIINKDILRRVLVLMASKHAFLALCALRFKRKIIGLKDEFYNRYIMKSFLFEPVVKAFLNNGSRYNLMNSAIIEMFEFIRVEDIKSLTAHVIENYWKALEDVDYVQTFKGLKLRFEQQRERQDNPKLDSMRSILRNHRYRRDARTLEDEEEMWFNTDEDDMEDGEAVVSPSDKTKNDDDIMDPISKFMERKKLKESEEKEVLLKTNLSGRQSPSFKLSLSSGTKTNLTSQSSTTNLPGSPGSPGSPGSPGSPGSVPKNTSQTAAITTKGGLVGLVDYPDDDEDDDEDEDKEDTLPLSKKAKFDS

SEQ ID NO: 103624 - DNA, 1785 bp, Artificial Sequence
  derived and/or modified sequence
atgaccgacaccagaagaagagtgaaggtgtacaccctgaacgaggacagacagtgggacgacagaggcaccggccacgtgagcagcggctacgtggagagactgaagggcatgagcctgctggtgagagccgagagcgacggcagcctgctgctggagagcaagatcaaccccaacaccgcctaccagaagcagcaggaggacgagaagttcctgaccgacctgttcgcccagctgaccgacgaggccaccgacgaggagaagagacaggagctggtgaacttcctgaaggagttctgcgccttcagccagaccctgcagccccagaacagagacgccttcttcaagaccctgagcaacatgggcatcctgcccgccctggaggtgatcctgggcatggacgacacccaggtgagaagcgccgccaccgacatcttcagctacctggtggagtacaaccccagcatggtgagagagttcgtgatgcaggaggcccagcagaacgacgacgtgagcaagaagctgaccgagcagaagatcaccagcaaggacatcctgctgatcaacctgatcatcgagcacatgatctgcgacaccgaccccgagctgggcggcgccgtgcagctgatgggcctgctgagaaccctggtggaccccgagaacatgctggccaccgccaacaagaccgagaagaccgagttcctgggcttcttctacaagcactgcatgcacgtgctgaccgcccccctgctggccaacaccaccgaggacaagcccagcaaggacgacttccagaccgcccagctgctggccctggtgctggagctgctgaccttctgcgtggagcaccacacctaccacatcaagaactacatcatcaacaaggacatcctgagaagagtgctggtgctgatggccagcaagcacgccttcctggccctgtgcgccctgagattcaagagaaagatcatcggcctgaaggacgagttctacaacagatacatcatgaagagcttcctgttcgagcccgtggtgaaggccttcctgaacaacggcagcagatacaacctgatgaacagcgccatcatcgagatgttcgagttcatcagagtggaggacatcaagagcctgaccgcccacgtgatcgagaactactggaaggccctggaggacgtggactacgtgcagaccttcaagggcctgaagctgagattcgagcagcagagagagagacaggacaaccccaagctggacagcatgagaagcatcctgagaaaccacagatacagaagagacgccagaaccctggaggacgaggaggagatgtggttcaacaccgacgaggacgacatggaggacggcgaggccgtggtgagccccagcgacaagaccaagaacgacgacgacatcatggaccccatcagcaagttcatggagagaaagaagctgaaggagagcgaggagaaggaggtgctgctgaagaccaacctgagcggcagacagagccccagcttcaagctgagcctgagcagcggcaccaagaccaacctgaccagccagagcagcaccaccaacctgcccggcagccccggcagccccggcagccccggcagccccggcagccccggcagcgtgcccaagaacaccagccagaccgccgccatcaccaccaagggcggcctggtgggcctggtggactaccccgacgacgacgaggacgacgacgaggacgaggacaaggaggacaccctgcccctgagcaagaaggccaagttcgacagctag

SEQ ID NO: 103625 - DNA, 1785 bp, Artificial Sequence
  derived and/or modified sequence
atgacagacacacgccgtagggtgaaagtttacacccttaatgaagataggcaatgggacgaccggggtacaggccacgtttccagtggctatgtggaaaggctcaagggaatgtcactgttggtacgcgcggagtctgacggatctctgctcctcgagagcaaaatcaatccgaatacagcttaccagaaacagcaagaggacgagaagttcctgacggatctgttcgctcagctgacggacgaagcaaccgatgaagaaaaacgacaggaactcgttaatttcctcaaggaattctgcgccttctctcagaccctgcagcctcagaatcgcgatgcctttttcaaaaccctcagtaatatgggaatcctccccgccctcgaagtgatattagggatggacgatactcaggtgaggagcgccgccaccgatatattttcttacctggtggaatacaatcccagcatggtgcgggagtttgtaatgcaggaagcccagcagaatgatgacgtttcgaagaaactcacggagcaaaagatcaccagcaaggatatcctcctcattaacctcatcatagagcacatgatctgcgacacggacccggagttggggggggctgtccagctgatggggctgctccgcacactggtggaccccgagaatatgctcgctacagccaataagactgaaaagacagagttcctcgggttcttctataaacattgcatgcacgttctgactgcccctctcctcgctaatacgactgaagacaagccgagtaaagatgactttcagacggcacagctgcttgcactcgtcctggaactgttaacgttctgtgtggagcaccacacctatcacataaagaactatattatcaataaggatattcttagacgagtgttggtgctcatggcttctaaacacgccttcctcgcactttgtgcactgaggttcaaacgtaagattatcgggctcaaagacgagttctacaatcggtatatcatgaaaagcttccttttcgagcctgtcgtgaaagctttcctgaataacggatcacggtataacctaatgaactctgcaattatcgagatgtttgagtttatacgcgtggaggacatcaagagtctgacagcgcacgtgattgaaaactattggaaggctctggaggacgtggactacgtgcagaccttcaaaggactcaagctcaggtttgaacagcagcgggagcgccaggataatcctaagttagatagcatgagatcgatattgagaaaccataggtacagacgcgacgcccggactctagaggatgaggaggaaatgtggtttaatacggacgaagacgatatggaagatggcgaggctgtcgtgagcccttccgataagacgaaaaacgacgacgatatcatggaccccatcagtaagttcatggaaaggaagaaactgaaggaatccgaagaaaaggaagtcctgttgaaaacaaatctctcagggcgccagagtcccagctttaaactctccctgagctcgggtacaaaaacgaacctcacatcacagtcctctacaactaatctacctgggtcgccaggcagcccaggtagtcctggtagccccggctccccagggagcgtgcccaagaataccagccagacagcggccattaccactaaaggtgggctagtcgggctggtcgattatcctgatgatgacgaggacgatgatgaagatgaggacaaagaagacaccctgcccctgtcaaagaaagcaaaattcgacagctag

SEQ ID NO: 103626 - DNA, 1785 bp, Artificial Sequence
  derived and/or modified sequence
atgaccgacacacgccgcagggtgaaggtctatactctgaacgaggatagacagtgggacgacagaggtactggacacgtgagtagcggctacgtcgaacgactgaaaggcatgtctctgcttgtgcgggcagagagcgatggctccctactactcgagtcaaaaattaatcccaatactgcttatcagaagcagcaggaggacgagaagttccttaccgaccttttcgcccagttgaccgacgaggccaccgacgaggaaaaacggcaagaactcgtcaattttctgaaggaattctgcgccttctcccagactttgcaaccccagaatagggacgcattctttaaaactctgtccaacatggggatcctgcccgcactggaggtcatccttggtatggatgatacccaggtcagatccgcagctaccgacatttttagttatttggtggagtataacccaagcatggtccgcgagtttgtgatgcaggaggctcagcaaaacgatgatgtgtccaaaaagctcactgagcaaaagattacaagtaaagatatcctgctaatcaacttgattatagagcatatgatatgtgataccgatccagaactcgggggcgcagtgcagttgatgggactactgcgtacccttgttgacccggagaatatgcttgccaccgccaataagacagagaaaacagagttcttgggattcttctacaagcattgtatgcacgtgctgaccgcaccgttgctggctaacacaactgaggacaagcctagcaaggatgactttcagaccgcacagcttctagctttagttttggaactactcactttttgtgtcgaacatcacacctatcatattaagaactatattatcaataaagacatcctgcgcagggtgctcgtgctcatggcctcaaaacatgcttttctcgcactctgcgccctccggttcaagcggaaaatcattggtttgaaggacgaattctataaccggtatattatgaagtcattcctgtttgagccagttgtcaaggctttccttaacaatggcagccggtacaacctcatgaatagcgctatcatagagatgttcgaattcatacgagtagaggatatcaagtctctgactgctcacgtgattgagaactactggaaggccttggaggacgtggattatgttcagacttttaaaggactgaagctgcgctttgagcagcagcgggagaggcaggacaaccccaagctggattccatgcgctctattctcaggaaccaccgctaccgccgagacgccaggaccttagaagacgaggaggagatgtggtttaacaccgacgaggacgacatggaggatggtgaggccgttgtcagcccatcagataaaacaaagaacgatgacgatatcatggacccgatcagcaagtttatggagcgtaaaaaattgaaagagagcgaggaaaaggaggtgttgcttaaaaccaacctctctgggcgccaaagcccgtcctttaaactctccctgtcaagcggtaccaagaccaacctcaccagtcagtcaagtaccaccaatctgcctggtagccctggttcccccggtagtccaggtagtccagggtcccctgggtccgtgcctaaaaatacctcacagaccgctgccatcaccaccaagggtggattggtaggcctcgtggactacccagacgatgatgaagatgacgatgaggacgaggacaaggaggatacccttccacttagcaagaaggcgaagttcgactcctag

SEQ ID NO: 103627 - DNA, 1785 bp, Artificial Sequence
  derived and/or modified sequence
atgacagacacccggcggcgggtgaaggtgtacaccctgaatgaagatcggcagtgggatgaccggggcaccggccacgtgagcagcggctacgtggagcggctgaagggcatgagcctgctggtgcgggcagagagtgatggcagcctgctgctggagagcaagatcaaccccaacacagcctaccagaagcagcaggaggatgagaagttcctgacagacctgtttgcccagctgacagatgaggccacagatgaggagaagaggcaggagctggtgaacttcctgaaggagttctgtgccttcagccagaccctgcagccccagaacagagatgccttcttcaagaccctgagcaacatgggcatcctgcctgccctggaggtgatcctgggcatggatgacacccaggtgcgctctgctgccacagacatcttctcctacctggtggagtacaaccccagcatggtgcgggagtttgtgatgcaggaggcccagcagaatgatgatgtgtccaagaagctgacagagcagaagatcaccagcaaggacatcctgctgatcaacctgatcatcgagcacatgatctgtgacacagatcctgagctgggcggcgctgtgcagctgatgggcctgctgcggaccctggtggaccctgagaacatgctggccacagccaacaagacagagaagacagagttcctgggcttcttctacaagcactgcatgcacgtgctgacagcccccctgctggccaacaccacagaggacaagcccagcaaggatgacttccagacagcccagctgctggccctggtgctggagctgctgaccttctgtgtggagcaccacacctaccacatcaagaactacatcatcaacaaggacatcctgcggcgggtgctggtgctgatggccagcaagcacgccttcctggccctgtgtgccctgcgcttcaagaggaagatcatcggcctgaaggatgagttctacaaccgctacatcatgaagagcttcctgtttgagcctgtggtgaaggccttcctgaacaacggcagccgctacaacctgatgaacagcgccatcatcgagatgtttgagttcatccgggtggaggacatcaagagcctgacagcccacgtgattgagaactactggaaggccctggaggatgtggactatgtgcagaccttcaagggcctgaagctgcgctttgagcagcagcgggagcggcaggacaaccccaagctggacagcatgaggagcatcctgaggaaccaccgctacagaagagatgcccggaccctggaggatgaggaggagatgtggttcaacacagatgaagatgacatggaggatggagaggccgtggtgagccccagcgacaagaccaagaatgatgatgacatcatggaccccatcagcaagttcatggagaggaagaagctgaaggagagcgaggagaaggaggtgctgctgaagaccaacctgagcggccggcagagccccagcttcaagctgagcctgagcagcggcaccaagaccaacctgaccagccagagcagcaccaccaacctgcccggcagccctggcagccctggcagccctggcagccctggcagccctggctctgtgcccaagaacaccagccagacagctgccatcaccaccaagggcggcctggtgggcctggtggactacccagatgatgatgaagatgatgatgaagatgaggacaaggaggacaccctgcccctgagcaagaaggccaagtttgacagctag

SEQ ID NO: 103628 - DNA, 1785 bp, Artificial Sequence
  derived and/or modified sequence
atgaccgacacccggcggcgggtgaaggtgtacaccctgaacgaggataggcagtgggatgatcggggtaccggccacgtgagtagtggatatgtcgagaggctcaagggcatgtctctgctggtccgggccgagagtgatggttctcttctgttagagagcaaaattaaccctaatacagcataccagaagcagcaggaagatgagaaattcctgacggatttgttcgcccagctgacagatgaagcaaccgacgaagagaaaagacaggaactcgtcaacttcttgaaggagttctgtgcattctcacagacactccagccccagaatcgcgacgcctttttcaagacattgtctaatatgggaatattgcccgctctggaagtgatcttaggaatggacgatacgcaggtcagatctgctgctacagacatcttttcttacctggtcgagtacaacccatctatggtgagggaatttgtgatgcaagaggcccagcagaatgacgacgtgtcgaagaaacttaccgagcagaagatcaccagcaaagacattttgctaataaatttgattatcgaacacatgatctgcgacactgatcctgaacttgggggcgcagttcagctcatgggccttctgcggaccctcgtggacccggagaacatgctggctactgcgaataagacagaaaaaactgagttcctaggcttcttctacaaacactgcatgcatgtcctcacagctccactcctggcgaatactaccgaggacaagccgtctaaggatgactttcagactgcccagctgctggctctggtcttggaactgttgactttttgcgtggaacaccacacttaccatatcaagaactatattattaacaaagacatattgcggcgggtgctggtcctcatggcctccaagcacgcctttctggctctgtgtgcgctccggttcaaacggaaaatcattgggctgaaagatgaattttataatcggtatattatgaaaagttttctttttgaaccggttgttaaagctttcctcaacaacggatcccgatataatctgatgaactctgctattatagaaatgttcgagtttatcagggtagaagacatcaagtctctcaccgcacacgtcatcgaaaactactggaaggcgctggaggatgttgattatgttcagacatttaaaggactaaagctccgttttgagcagcagagagagcgccaggataacccaaagctggactccatgagatctatcctgcggaatcatcggtataggcgggatgctcgtacactggaagatgaggaggagatgtggttcaacaccgacgaggacgatatggaggacggcgaggccgtggtaagtccaagtgacaagacaaagaatgatgacgatatcatggatcccatcagtaaattcatggagcgcaagaaattaaaagaatcagaggaaaaggaggttctcctgaaaacaaatttgtctggaaggcagagtcccagcttcaagttgtctctgtctagcggcacaaagaccaatctcacctcacagagttcgactacgaatctacctggatcccctggctccccaggtagtccggggagtcctggttcaccgggatcagtgcccaaaaacacaagtcagactgctgccatcacaactaagggtggtctcgtgggtctggtggattaccctgatgatgacgaggacgatgatgaggatgaggataaagaggacacgcttcctctgtcgaaaaaggctaaatttgattcttag

SEQ ID NO: 103629 - DNA, 1785 bp, Artificial Sequence
  derived and/or modified sequence
atgaccgacacccggcggcgggtgaaggtgtacaccctgaacgaggataggcaatgggatgacaggggcaccggccacgtgtccagcgggtacgtagagaggttgaaaggcatgtctctgctcgtcagagcggagtctgatggaagtctgttgctggagtcgaagatcaaccctaataccgcataccaaaagcagcaagaggatgagaaattcttgactgatctgtttgcccagcttaccgacgaggctactgacgaggagaagcggcaggagctggtcaacttcctcaaggagttctgtgccttttcccagactctgcagccccaaaacagggatgcatttttcaagacactttctaatatggggattctgccagccctggaagtcattctcggcatggatgatacccaagtgaggtcagcggccacagacatttttagctacttggtggaatataaccccagcatggttcgcgagttcgtaatgcaggaagcgcagcagaatgacgacgtgagcaagaagctcaccgagcagaagattacctcaaaggacatcttgcttatcaatctgattattgagcatatgatttgcgataccgacccggagctcggaggagccgtccagcttatggggttgctgagaacgcttgtggatcccgagaatatgctggccaccgctaataagaccgagaaaaccgagttccttggatttttttacaagcattgtatgcacgtcctgaccgccccactgttggccaacacaactgaggacaaaccaagtaaggatgattttcaaaccgcacagcttctcgccctcgtgcttgaactgctaaccttttgcgtagagcatcatacataccatataaagaactacattattaacaaggatattcttcggcgggtcctcgtgctaatggcttccaagcacgccttcctggctctgtgtgctttgcggttcaaaagaaagatcatagggctcaaagatgagttttacaaccgctacattatgaaaagctttctgttcgaacctgtggtgaaagctttccttaataatggatctagatataatctaatgaactcagctatcattgagatgtttgagtttatccgggtggaggatattaaatcattaaccgctcacgtcattgaaaattattggaaggcactggaggacgtggactacgttcagacatttaagggcctgaagttgaggtttgagcagcagagggaaagacaggacaacccaaaattagactctatgaggagcatcctgcgcaaccacaggtaccgtcgagatgctaggacgctagaggacgaggaggagatgtggtttaatactgacgaggatgatatggaggacggtgaggctgtggtgtctcctagcgataagacaaaaaatgatgacgatattatggaccctatcagtaaattcatggaacgtaaaaagctgaaggagagtgaggaaaaggaggttctactgaagaccaacctgagtggccgacagagccctagttttaaactgagtctgtcctcaggaaccaagactaatctaacatcccaaagctccacgactaacctgccgggctcacccggcagccctggcagccccgggtcacccggatccccggggagtgttcctaagaacacttcacagaccgccgctataaccactaaaggaggtctggtgggcctcgtcgactacccggatgatgatgaggatgacgatgaggatgaggacaaggaggatacgctcccactgtcaaagaaggccaagttcgattcctag

SEQ ID NO: 103630 - DNA, 1785 bp, Artificial Sequence
  derived and/or modified sequence
atgacagacacacgacgacgcgtgaaagtctatacactaaatgaggatcggcagtgggacgacaggggtaccggacacgtatccagcggctacgttgagagactcaaaggaatgtcgctgctagtccgtgcggagagcgacgggtcactgttgcttgaatctaagattaaccccaatacggcctatcagaagcaacaagaagatgagaaattcctgaccgatctgtttgcacagttgaccgacgaggcaaccgatgaggagaaacgacaggagctggtaaactttctgaaagaattttgcgccttctcacagacccttcagcctcaaaaccgcgacgccttctttaagacactgtctaacatgggcattctaccagctctggaagttatactcggcatggacgacactcaggtgcgcagtgccgcaactgacatcttctcttatctcgttgagtacaacccctcgatggtgagagagttcgtcatgcaggaggctcagcaaaacgacgacgtcagcaaaaaattgacagaacaaaagataacctccaaggacatccttctgattaacctcatcatcgaacacatgatttgcgacactgatcctgagctgggcggagcagtccagttgatggggttattaaggactctggtcgacccagagaacatgttggctacagccaataagaccgaaaaaaccgagttcctggggttcttctataagcattgtatgcatgtcttgaccgcccctttattagcgaacactaccgaggataaaccttctaaagatgacttccagacagcccagttactggctctggtgctggagctgcttacattttgtgtagaacaccacacctaccacattaagaactacattatcaataaggatatcctgaggcgtgtcctggtgttaatggcgtctaagcatgcttttctagccttatgtgcattacgcttcaagagaaaaatcatcggtctgaaagacgagttttacaacaggtacattatgaaatcatttctgtttgaaccggtagtgaaggcttttcttaataacgggtcccgttacaaccttatgaattctgctattattgagatgttcgaatttatacgcgttgaagatattaagtcactgacagcccatgtaattgaaaactattggaaggctctggaggatgtggattacgttcagacattcaagggcctcaagctccggttcgagcaacagagggagcgccaagacaaccctaaactagacagtatgaggtcaattctgagaaatcaccggtaccgaagggatgccagaactttggaggatgaggaggagatgtggtttaacaccgacgaggacgatatggaggatggggaggccgtcgtcagcccttctgataagacgaaaaatgacgatgacattatggatcccatatctaaattcatggaacggaagaagcttaaggaatccgaagagaaggaggtactactgaaaaccaacctgtccggtaggcaatcacccagcttcaagctgtctttaagctccggtacaaagacgaatctcacatcccagagcagcactaccaatctgcctggttcacctgggagtcctgggagcccaggaagtcctggaagcccaggtagtgtcccaaaaaatactagtcagacagctgccataactacaaaggggggactggtgggcttggtcgactatccagatgatgacgaagacgatgatgaggacgaggacaaggaagacacattgcctctcagtaagaaggctaagttcgacagttag

SEQ ID NO: 103631 - DNA, 3216 bp, Artificial Sequence
  derived and/or modified sequence
tgaggggcgaaccaagatggcggcggttttggctgtgtgaggaagacggaagagacggcggcggagggaaaccgacttccactagtccgggtcgcttgggcggccgggggccctcagagtctcccgggcagtggtagcagttgcagcaggatcaggcgcctgtcggcttctgacgtttaaaacagggggagcggaagggagccactggccgcggtggcagggccagggcccctttcctgggcgtctactggcggggcccccgccccggttcccgggcggcacgatgaccgacacccggcggcgggtgaaggtgtacacgctcaacgaggaccggcagtgggacgaccggggcaccgggcatgtgtcgtctggctacgtggagcggctgaagggcatgtccctgcttgtcagggctgagagcgacggttctctacttttagagtcgaaaataaatcctaacactgcataccagaaacaacaggaagatgaaaaatttctgacagatttgtttgcacaactaacagatgaagcaacagatgaggaaaaaagacaggaattggttaactttttaaaagaattttgtgcgttttcccaaacgctacagcctcaaaacagagatgcttttttcaagactttgtcaaacatgggcatattaccagctttagaagtcatccttggcatggatgatacacaggtgcgaagtgctgctactgatatattctcatacttggttgaatataatccatccatggtacgagagtttgtcatgcaggaggcacaacagaatgatgatgtaagtaagaagttaacagagcaaaaaataaccagcaaggatattttgctcatcaacctcattatagaacatatgatttgtgatacagatcctgaacttggaggagcagtccagcttatgggcctgcttcgaactttagttgacccagagaacatgctagccactgccaataaaacagaaaagactgaatttctgggtttcttctacaagcactgtatgcatgttctcactgctcctttactagcaaatacaacagaagacaaacctagtaaagatgattttcagactgcccaactattggcacttgtattggaattgttaacattttgtgtggagcaccatacctaccacataaagaactacattattaataaggatatcctccggagagtgctagttcttatggcctcgaagcatgctttcttggcattatgtgcccttcgttttaaaagaaagattattggattaaaagatgagttttacaaccgctacataatgaaaagttttttgtttgaaccagtagtgaaagcatttctcaacaatggatcccgctacaatctgatgaactctgccataatagagatgtttgaatttattagagtggaagatataaaatcattaactgctcatgtaattgaaaattactggaaagcactggaagatgtagattatgtacagacatttaaaggattaaaactgagatttgaacaacaaagagaaaggcaagataatcccaaacttgacagtatgcgttccattttgaggaatcacagatatcgaagagatgccagaacactagaagatgaagaagagatgtggtttaacacagatgaagatgacatggaagatggagaagctgtagtgtctccatctgacaaaactaaaaatgatgatgatattatggatccaataagtaaattcatggaaaggaagaaattaaaagaaagtgaggaaaaggaagtgcttctgaaaacaaacctttctggacggcagagcccaagtttcaagctttccctgtccagtggaacgaagactaacctcaccagccagtcatctacaacaaatctgcctggttctccgggatcacctggatccccaggatctccaggctctcctggatccgtacctaaaaatacatctcagacggcagctattactacaaagggaggcctcgtgggtctggtagattatcctgatgatgatgaagatgatgatgaggatgaagataaggaagatacgttaccattgtcaaagaaagcaaaatttgattcataataatggcaacggcctaggatcagtacctgttgaaaaaaactggttctccacccctcccccatacaaaatccacaacaaagcgcagtggtctcttgtgaatgactgacacagatcagcctcttacacttgacttctgctcatcaagtgccaattcaatggagcaggaggaggggatatcatatatttaggggaaagacttaagcctttgagctctccagcttggaccacacattgcccttttctcagggaaggaaatggaaacaaaaagccaacagggcaggggttttgtaagtggaactctggattgactggtcagttgctacaatcagaatatgctttcttggaccatgtttgagactcagaagaatgggcctttctgccataattcttcactagtcaagaatgccagcagtttctttgtataaagagacctgcctttaaaatcatacattctgaacattttagtcaagctacaacaggtttggaaaacctctgtgggggaggggcgagtataaagttttcctcttttttaactgttccctttgcccttcaaactgcagatatttttttttttaagtggggacttctccctacttgattaaagattgagtggaattctagatgtggtcatttgtgtcataatttttttgttttattttgtttttgattttttttttcctcccctgagtgtatgcttagttgttgagtatatatatttgggaccattaaaactttttttgatgtaatataacctaacgttgtgctggtacctgttttaccatgtgtaatttttgttctacatcacagttcttaatttgtttagagttttatgaaagatggtatagtttttattgacaaaagcaaagtaatcttacaactatgtgcatacaaaagcaatactattttgtgactaaatattttatattaaaatttacatcagcaactgtcttgagaattcagggaaatagaatggaatttaaaacttcaacagttttgttaaatctagaaacatgaaattagtattccaaagagattctgaaatttcttttcttggggaaatgacggtacattaaatcaaaattgaggatggatgatttaaaaacatttgacttttgaataataaaaagaaaagtgaagagtaagagaaa

SEQ ID NO: 103632 - DNA, 1785 bp, Artificial Sequence
  derived and/or modified sequence
atgaccgacacgagacgcagggttaaggtgtacaccttaaacgaggacagacagtgggacgatcgcggaacgggacacgtgagctctgggtatgttgaaaggctgaagggtatgtctcttctcgtccgggctgaaagcgacggcagccttctcctggaatcaaaaatcaacccaaacacggcctatcagaaacaacaagaagatgagaagttccttaccgacctcttcgcacagctgacggatgaagccactgacgaggagaaacgacaagagctcgtgaacttcctgaaagaattttgcgccttttcacaaacgctgcagccacaaaatcgggacgccttcttcaagaccttgagcaacatgggcatccttccagcccttgaggtaatcctcgggatggatgatacccaagttaggtcagctgcaacagatattttctcctacctggttgagtacaatccttccatggttcgggagttcgtaatgcaggaggcacagcagaacgatgacgtcagtaagaagctgactgaacagaagattacctccaaagacatactgctgatcaatctcatcattgagcacatgatctgtgatacagaccctgagctgggcggtgccgtccaattgatgggactgctgcggactctggttgatccggagaatatgctcgccaccgcgaacaagacggaaaaaacagagtttctgggatttttttacaaacactgcatgcacgtgctaacagcgccattactagcaaacacaactgaggataagccttcgaaagatgactttcaaaccgctcaactgctggcactggtgttagagttactaactttttgcgtcgagcaccacacataccatattaaaaattacatcatcaacaaagatatcttgagaagagtgctcgtcttgatggcatctaaacatgctttcttggccctgtgcgctctgagatttaagaggaagatcatcggcctgaaggacgaattctacaatcgttatatcatgaagtccttcctcttcgagcctgtcgtcaaggcatttctcaacaatggttctcgttacaacctcatgaattccgccatcatagagatgttcgagttcatccgggtggaagatatcaagtccttaaccgctcacgtcatcgagaattactggaaggctctggaagatgtggactatgtgcagacctttaaagggctgaagctgcgtttcgaacagcagcgcgaaagacaagataaccccaagctggatagtatgaggtccatcttacgcaaccatcgctatcgcagggacgcaaggaccctggaggacgaggaggagatgtggttcaacacggacgaagacgatatggaggacggcgaagcggttgtgtccccctccgacaagacaaagaacgatgatgatatcatggatcccatctccaagtttatggagaggaagaagctgaaagaaagtgaggaaaaagaggtattactgaagacaaatttgtctggcagacagagtcccagtttcaaactgagtctcagcagtgggacaaaaactaatctgacttcccagagttcaacaacgaacttgcccggaagccccggaagccccggttcccccggttcacctgggtcaccaggttcagtaccaaaaaatacctcacaaaccgccgctattacaacaaagggtggcctcgtgggtctggtggattacccagacgatgacgaggatgacgacgaggacgaggataaggaagataccctgcccctgagcaaaaaagcaaagttcgacagttag

SEQ ID NO: 103633 - DNA, 1241 bp, Artificial Sequence
  derived and/or modified sequence
gggtctggtagattatcctgatgatgatgaagatgatgatgaggatgaagataaggaagatacgttaccattgtcaaagaaagcaaaatttgattcataataatggcaacggcctaggatcagtacctgttgaaaaactggttctccacccctcccccatacaaaatccacaacaaagcgcagtggtctcttgtgaatgactgacacagatcagcctcttacacttgacttctgctcatcaagtgccaattcaatggagcaggaggaggggatatcatatatttaggggaaagacttaagcctttgagctctccagcttggaccacacattgcccttttctcagggaaggaaatggaaacaaaaagccaacagggcaggggttttgtaagtggaactctggattgactggtcagttgctacaatcagaatatgctttcttggaccatgtttgagactcagaagaatgggcctttctgccataattcttcactagtcaagaatgccagcagtttctttgtataaagagacctgcctttaaaatcatacattctgaacattttagtcaagctacaacaggtttggaaaacctctgtgggggaggggcgagtataaagttttcctcttttttaactgttccctttgcccttcaaactgcagatatttttttttttaagtggggacttctccctacttgattaaagattgagtggaattctagatgtggtcatttgtgtcataatttttttgttttattttgtttttgattttttttttcctcccctgagtgtatgcttagttgttgagtatatatatttgggaccattaaaactttttttgatgtaatataacctaacgttgtgctggtacctgttttaccatgtgtaatttttgttctacatcacagttcttaatttgtttagagttttatgaaagatggtatagtttttattgacaaaagcaaagtaatcttacaactatgtgcatacaaaagcaatactattttgtgactaaatattttatattaaaatttacatcagcaactgtcttgagaattcagggaaatagaatggaatttaaaacttcaacagttttgttaaatctagaaacatgaaattagtattccaaagagattctgaaatttcttttcttggggaaatgacggtacattaaatcaaaattgaggatggatgatttaaaaacatttgacttttgaataataaaaagaaaagtgaagagtaag

SEQ ID NO: 103634 - DNA, 3236 bp, Artificial Sequence
  derived and/or modified sequence
gcgtcccgcctcctccgctccctgcgctcccgccacctcggcaactccgcgcccgcctcccgcctccgtcggaagcctccgccgcagtaaggctcccggtctcgctgctgtctctttaaatggtggggctacgagccgcccctgcagctgctccctgggtggccccgcgcgccgcttttgaggggcgaaccaagatggcggcggttttggctgtgtgaggaagacggaagagacggcggcggagggaaaccgacttccactagtccgggtcgcttgggcggccgggggccctcagagtctcccgggcagtggtagcagttgcagcaggatcaggcgcctgtcggcttctgacgtttaaaacagggggagcggaagggagccactggccgcggtggcagggccaggtataaggaaggaaaatatggcggcggcggcggcggcctgaggaggcggcggcggcgcgggaagctgcttcgcggagatcatggcggaggcgggagcagggcagtgacgggagccccgagttcctagcgctgcggggcgggaggctacgaagcgctgcgcggccccctcggggctgccgggcgccgggctcgccaggcctggacaatagcgccggggagccggaggcgaggaaaggcggcggcccagagctcggtccctggagcgggccatgcaggcggcggcgcggccccgcggcgcccagcggcggcagtgaggccggggagccctccgctcgcgggcgccctcacgcctcgcccctcgcctctccagggcccctttcctgggcgtctactggcggggcccccgccccggttcccgggcggcacgatgaccgacacccggcggcgggtgaaggtgtacacgctcaacgaggaccggcagtgggacgaccggggcaccgggcatgtgtcgtctggctacgtggagcggctgaagggcatgtccctgcttgtcagggctgagagcgacggttctctacttttagagtcgaaaataaatcctaacactgcataccagaaacaacaggaagatgaaaaatttctgacagatttgtttgcacaactaacagatgaagcaacagatgaggaaaaaagacaggaattggttaactttttaaaagaattttgtgcgttttcccaaacgctacagcctcaaaacagagatgcttttttcaagactttgtcaaacatgggcatattaccagctttagaagtcatccttggcatggatgatacacaggtgcgaagtgctgctactgatatattctcatacttggttgaatataatccatccatggtacgagagtttgtcatgcaggaggcacaacagaatgatgatgtaagtaagaagttaacagagcaaaaaataaccagcaaggatattttgctcatcaacctcattatagaacatatgatttgtgatacagatcctgaacttggaggagcagtccagcttatgggcctgcttcgaactttagttgacccagagaacatgctagccactgccaataaaacagaaaagactgaatttctgggtttcttctacaagcactgtatgcatgttctcactgctcctttactagcaaatacaacagaagacaaacctagtaaagatgattttcagactgcccaactattggcacttgtattggaattgttaacattttgtgtggagcaccatacctaccacataaagaactacattattaataaggatatcctccggagagtgctagttcttatggcctcgaagcatgctttcttggcattatgtgcccttcgttttaaaagaaagattattggattaaaagatgagttttacaaccgctacataatgaaaagttttttgtttgaaccagtagtgaaagcatttctcaacaatggatcccgctacaatctgatgaactctgccataatagagatgtttgaatttattagagtggaagatataaaatcattaactgctcatgtaattgaaaattactggaaagcactggaagatgtagattatgtacagacatttaaaggattaaaactgagatttgaacaacaaagagaaaggcaagataatcccaaacttgacagtatgcgttccattttgaggaatcacagatatcgaagagatgccagaacactagaagatgaagaagagatgtggtttaacacagatgaagatgacatggaagatggagaagctgtagtgtctccatctgacaaaactaaaaatgatgatgatattatggatccaataagtaaattcatggaaaggaagaaattaaaagaaagtgaggaaaaggaagtgcttctgaaaacaaacctttctggacggcagagcccaagtttcaagctttccctgtccagtggaacgaagactaacctcaccagccagtcatctacaacaaatctgcctggttctccgggatcacctggatccccaggatctccaggctctcctggatccgtacctaaaaatacatctcagacggcagctattactacaaagggaggcctcgtgggtctggtagattatcctgatgatgatgaagatgatgatgaggatgaagataaggaagatacgttaccattgtcaaagaaagcaaaatttgattcataataatggcaacggcctaggatcagtacctgttgaaaaaaactggttctccacccctcccccatacaaaatccacaacaaagcgcagtggtctcttgtgaatgactgacacagatcagcctcttacacttgacttctgctcatcaagtgccaattcaatggagcaggaggaggggatatcatatatttaggggaaagacttaagcctttgagctctccagcttggaccacacattgcccttttctcagggaaggaaatggaaacaaaaagccaacagggcaggggttttgtaagtggaactctggattgactggtcagttgctacaatcagaatatgctttcttggaccatgtttgagactcagaagaatgggcctttctgccataattcttcactagtcaagaatgccagcagtttctttgtataaagagacctgcctttaaaatcatacattctgaacattttagtcaagctacaacaggtttggaaaacctctgtgggggaggggcgagtataaagttttcctcttttttaactgttccctttgcccttcaaactgcagatatttttttttttaagtggggacttctccctacttgattaaagattgagtggaattcta

SEQ ID NO: 103635 - protein, 169 aa, Artificial Sequence
  derived and/or modified sequence
MLSETLGYLSSVLLQCTEAKKHCWYFEGLYPTYYICRSYEDCCGSRCCVRALSIQRLWYFWFLLMMGVLFCCGAGFFIRRRMYPPPLIEEPAFNVSYTRQPPNPGPGAQQPGPPYYTDPGGPGMNPVGNSMAMAFQVPPNSPQGSVACPPPPAYCNTPPPPYEQVVKAK

SEQ ID NO: 103636 - DNA, 510 bp, Artificial Sequence
  derived and/or modified sequence
atgctgagcgagaccctgggctacctgagcagcgtgctgctgcagtgcaccgaggccaagaagcactgctggtacttcgagggcctgtaccccacctactacatctgcagaagctacgaggactgctgcggcagcagatgctgcgtgagagccctgagcatccagagactgtggtacttctggttcctgctgatgatgggcgtgctgttctgctgcggcgccggcttcttcatcagaagaagaatgtaccccccccccctgatcgaggagcccgccttcaacgtgagctacaccagacagccccccaaccccggccccggcgcccagcagcccggccccccctactacaccgaccccggcggccccggcatgaaccccgtgggcaacagcatggccatggccttccaggtgccccccaacagcccccagggcagcgtggcctgcccccccccccccgcctactgcaacacccccccccccccctacgagcaggtggtgaaggccaagtag

SEQ ID NO: 103637 - DNA, 510 bp, Artificial Sequence
  derived and/or modified sequence
atgctgagtgagacactcggttacctttcctcagtgctgctgcagtgtactgaagctaagaaacactgctggtattttgaaggattatatcctacctattatatctgccgatcctacgaggactgctgtggctcaagatgttgtgtgcgggcactgagcatacagcggctgtggtatttctggtttctgttgatgatgggggtgctgttctgctgcggcgctggctttttcattaggagaagaatgtatccacctcctctcatcgaagagcctgcctttaatgtctcatatacaaggcaacctccgaacccaggcccgggggcacagcagccaggtccaccatactataccgatcccggggggccaggtatgaatcccgttgggaattccatggctatggcttttcaggtgccccccaacagcccacagggtagcgtagcgtgcccacctccgcccgcctactgcaacacccctccaccaccttatgagcaggtagtgaaggcaaaatag

SEQ ID NO: 103638 - DNA, 510 bp, Artificial Sequence
  derived and/or modified sequence
atgctgtctgagaccctgggctacctgagctctgtgctgctgcagtgcacagaggccaagaagcactgctggtactttgagggcctgtaccccacctactacatctgccgctcctatgaggactgctgcggcagccgctgctgcgtgcgggccctgagcatccagaggctgtggtacttctggttcctgctgatgatgggcgtgctcttctgctgcggggccggcttcttcatcagaagaaggatgtacccacctcctctcatcgaggagcccgccttcaacgtgtcctacacccggcagccccccaaccctggccctggggcccagcagcccggccccccctactacacagatcctgggggccctggcatgaaccctgtgggcaacagcatggccatggccttccaggtgccccccaacagcccccagggctctgtggcctgccccccacctccagcctactgcaacaccccacctccaccctatgagcaggtggtgaaggccaagtag

SEQ ID NO: 103639 - DNA, 510 bp, Artificial Sequence
  derived and/or modified sequence
atgctgagcgagaccctgggctacctgagcagcgtgctgctgcagtgcacagaagcgaagaagcactgttggtattttgaaggcctttatccaacatactacatttgcagatcgtatgaagactgctgtggttcccgttgctgcgtgcgcgcattaagtattcagagactgtggtatttttggtttctgttgatgatgggcgttctcttctgctgcggcgccggttttttcattaggcgcagaatgtaccctccccctctgatcgaggaacccgcctttaacgttagttacacacgtcagccccccaaccccggacccggggcacaacagccggggccgccatattatacggatccaggaggacctggtatgaatcctgtggggaactcaatggcaatggcatttcaggtccctccgaactctcctcaagggtccgtagcatgcccacctcctccagcttactgcaacacaccaccacctccttacgaacaggtcgtgaaggccaagtag

SEQ ID NO: 103640 - DNA, 510 bp, Artificial Sequence
  derived and/or modified sequence
atgctgagtgagacacttggatacctgtcctctgtgcttctccaatgtacagaggcaaaaaaacactgctggtacttcgaggggctttatcctacttactacatatgccgaagttatgaagactgctgtggcagtcgatgctgcgtgagggcgctgtctattcagcgactgtggtatttctggttcctcttgatgatgggtgtcctgttttgttgtggggcaggattttttatccgaagacggatgtaccccccacctctcatcgaagagcctgccttcaatgtcagctatacccggcaaccacctaacccgggacctggcgctcaacagccaggacctccctactataccgaccccggtggaccgggaatgaaccccgtggggaactctatggccatggcctttcaggtgccgccaaactcccctcaaggcagcgtcgcttgtcccccacccccagcttactgtaacaccccaccacccccatatgagcaggtcgtgaaagcaaagtag

SEQ ID NO: 103641 - protein, 490 aa, Artificial Sequence
  derived and/or modified sequence
MDHTDNELQGTNSSGSLGGLDVRRRIPIKLISKQANKAKPAPRTQRTINRMPAKAPPGDEGFDYNEEERYDCKGGELFANQRRFPGHLFWDFQINILGEKDDTPVHFCDKCGLPIKIYGRMIPCKHVFCYDCAILHEKKGDKMCPGCSDPVQRIEQCTRGSLFMCSIVQGCKRTYLSQRDLQAHINHRHMRAGKPVTRASLENVHPPIAPPPTEIPERFIMPPDKHHMSHIPPKQHIMMPPPPLQHVPHEHYNQPHEDIRAPPAELSMAPPPPRSVSQETFRISTRKHSNLITVPIQDDSNSGAREPPPPAPAPAHHHPEYQGQPVVSHPHHIMPPQQHYAPPPPPPPPISHPMPHPPQAAGTPHLVYSQAPPPPMTSAPPPITPPPGHIIAQMPPYMNHPPPGPPPPQHGGPPVTAPPPHHYNPNSLPQFTEDQGTLSPPFTQPGGMSPGIWPAPRGPPPPPRLQGPPSQTPLPGPHHPDQTRYRPYYQ

SEQ ID NO: 103642 - DNA, 95 bp, Artificial Sequence
  derived and/or modified sequence
tgaaaatacaaatgaccatgcaagtaattccgcagggagagagcggatatgaacaaacagaagaaatcagatgggatagtgctggcgggaagtca

SEQ ID NO: 103643 - DNA, 1473 bp, Artificial Sequence
  derived and/or modified sequence
atggaccataccgacaacgagttgcagggaacaaacagctctggctcactcggtggattagacgttcggcgtagaatacccatcaaactgatcagtaaacaggctaacaaggccaagcccgcccctaggactcaacggactatcaacagaatgccagcaaaggccccccccggtgatgaaggattcgactacaatgaggaggagcgttatgattgtaagggtggcgagctgtttgctaatcagaggcggtttcccggccatctgttctgggactttcaaatcaatatactcggcgagaaggacgataccccagttcacttctgcgacaagtgcgggctgccaatcaaaatctatgggagaatgattccgtgtaagcacgtattctgctatgattgtgccattttgcacgaaaaaaagggagacaagatgtgtcccgggtgctctgatccagtgcagaggattgagcagtgcacccgcggtagcctgtttatgtgttctatcgtgcaaggctgtaagaggacatacctgtcccagagggatctgcaggcccatataaatcaccgtcacatgagagcgggcaagcccgtgacacgggccagcttggaaaacgtacatcctccaattgctccaccacctacagagattccagagcggttcatcatgccaccggataaacatcacatgagccacatcccgcccaagcaacatatcatgatgcctccgccccctctgcagcacgtaccgcacgagcactataatcaacctcatgaagacattcgtgcaccgccggccgaactttcaatggctcctccacctcctcgctccgtgagccaggagacctttagaatcagcacaaggaagcattccaaccttataactgttcctatacaggatgacagcaacagcggtgctagagagcccccgccccccgcccctgcgccagcccatcatcatccagagtaccaggggcaacctgtggtaagtcatccccatcacattatgccgccccagcaacattatgccccacccccccccccgccaccacccatcagccaccctatgcctcatcctccccaagccgccggcaccccccatctcgtgtacagccaggcccccccaccaccgatgacgtctgcgccgccgcccattacgccccctcctgggcacattattgctcagatgccaccttatatgaatcacccacctcccgggcctccccctcctcagcatggtggtccccctgtcactgccccaccgcctcaccactacaaccctaatagccttccccagttcaccgaggaccaggggaccctttcaccccccttcactcagccggggggtatgagcccgggaatctggccagccccccgcggcccgcccccccccccaaggctccagggccctccctcacaaaccccccttcctggacctcaccacccagatcaaaccagatacagaccgtactaccagtag

SEQ ID NO: 103644 - DNA, 1473 bp, Artificial Sequence
  derived and/or modified sequence
atggaccacacagacaatgagctgcagggcaccaacagcagcggcagcctgggcggcctggatgtgagaagacgcatccccatcaagctgatcagcaagcaggccaacaaggccaagccagcccccaggacccagaggaccatcaacaggatgcctgccaaggcccctcctggagatgagggctttgactacaatgaggaggagagatatgactgcaagggcggggagctgtttgccaaccagaggcgcttccctggccacctgttctgggacttccagatcaacatcctgggggagaaggatgacacccctgtgcacttctgtgacaagtgtggcctgcccatcaagatctacggccgcatgatcccctgcaagcacgtgttctgctatgactgtgccatcctgcacgagaagaagggggacaagatgtgccccggctgcagcgaccctgtgcagagaattgagcagtgcacccggggcagcctcttcatgtgcagcatcgtgcagggctgcaagaggacctacctgagccagagggacctgcaggcccacatcaaccaccgccacatgagagctgggaagcctgtgacccgggccagcctggagaatgtgcacccccccatcgcccccccacccacagagatccctgagcgcttcatcatgcccccagacaagcaccacatgagccacatcccccccaagcagcacatcatgatgcctcctccacccctgcagcacgtgccccatgagcactacaaccagccccatgaggacatccgggcccccccagctgagctgtccatggcccctcctccacccaggtctgtgtcccaggagaccttccgcatcagcaccaggaagcacagcaacctgatcaccgtgcccatccaggatgacagcaacagcggggcccgggagcccccacctccagccccagccccagcccaccaccaccctgagtaccagggccagcctgtggtgagccacccccaccacatcatgccaccccagcagcactacgcccctcctcctcctcctcctccacccatcagccaccccatgccccaccccccccaggccgccggcaccccccacctggtgtacagccaggcccctcctccacccatgaccagcgcccccccacccatcaccccacctcctggccacatcatcgcccagatgccaccctacatgaaccaccccccacctggccccccaccaccccagcacggcggcccccctgtgacagcccccccaccccaccactacaaccccaacagcctgccccagttcacagaggaccagggcaccctgagcccccccttcacccagcccggcggcatgagccctggcatctggccagccccccggggccccccacctccaccccggctgcagggcccccccagccagacccccctgcccggcccccaccacccagaccagacccgctaccggccctactaccagtag

SEQ ID NO: 103645 - DNA, 1473 bp, Artificial Sequence
  derived and/or modified sequence
atggaccacaccgacaacgagctgcagggcaccaacagcagcggctccctaggcggtttagatgtgagacggcgaatcccgattaaattgatcagcaaacaggcgaacaaagcaaaacctgcaccacgcacacaacggaccatcaaccggatgcctgctaaagcaccaccgggggatgaggggtttgattataacgaggaggaaaggtacgactgcaagggtggagagctgtttgcaaatcaacggaggttccctggacacctcttttgggatttccaaattaatattcttggtgaaaaagacgacacgcccgttcatttctgcgataaatgcgggttgcccatcaaaatctacgggagaatgattccctgtaagcacgtgttttgctacgactgcgctatactgcacgagaagaagggcgataagatgtgccctggttgctctgatccggtgcagagaatagagcagtgcactaggggatcgctgttcatgtgtagcatcgtgcaaggatgtaaacgtacatatctgtctcagcgggatctgcaagcccacatcaatcaccgtcatatgagggctggaaagccggtgaccagggctagtctggaaaatgtgcacccacctattgctccccccccgactgaaatccccgagcggttcattatgccacccgataagcatcatatgagccatatcccaccaaagcagcacatcatgatgccacctccgcctctgcagcacgtgccccatgaacattacaaccagcctcacgaggatatcagggcaccccccgctgaactgtcaatggccccccctccgccacgcagtgtctcccaggaaacctttagaattagtacacggaagcactccaacctaattactgtgcctatccaggatgatagtaacagtggagcccgcgagccccctccaccagcccctgccccagcacaccaccaccctgagtaccaaggccagcctgtcgtgagccacccccaccacataatgccacctcagcagcactacgcaccaccaccccctcctcctccccccatcagccatcctatgccacatccaccacaggcagcaggaaccccgcacctggtctacagccaggcaccaccccctcccatgacaagcgctccgcctccgataacccctcctccaggccatatcatcgcccagatgcctccctatatgaatcacccccctcctggaccgcctccaccacagcacgggggcccccccgtgacagcaccaccaccccatcactataacccgaattccctaccacagttcacagaagaccagggaactctgtccccgccctttacacagccgggcggaatgtcacctgggatctggccggctccaagaggaccgccgccaccgccccgcctgcaagggcctccgtctcagacaccacttcccggaccacaccacccagaccaaacacggtatcgcccatattaccaatag

SEQ ID NO: 103646 - DNA, 1473 bp, Artificial Sequence
  derived and/or modified sequence
atggatcacacggacaacgagctgcaagggacaaattcaagcggctctttgggcggtctggacgtccggaggaggatacccattaagctaatttccaagcaggccaacaaagcaaagcctgctcccaggacacagcgcacgataaacaggatgcctgcaaaagctcctcctggagacgagggtttcgattacaacgaggaagagaggtacgactgcaaaggtggcgagttgtttgcaaaccaacgaagatttcccggtcacctattctgggactttcaaattaacatactgggtgagaaagacgacactccggtgcatttctgtgacaagtgcggactccctattaagatctatggtagaatgatcccatgcaagcacgtgttttgttatgattgcgccatcttgcacgaaaaaaaaggggataaaatgtgtcctggctgtagtgatcccgtccagaggatagagcaatgtaccagaggctcgctctttatgtgttccattgtgcaggggtgtaagcgtacttacctgtctcaacgcgaccttcaggcacatatcaatcacaggcatatgagagctggtaaacccgtgacaagagcctctctcgaaaacgtacaccctcctattgccccaccacccactgaaattccagagcgttttattatgccaccagataagcaccatatgtcacacattccacccaagcagcacatcatgatgccacctcccccactgcagcatgtccctcacgaacattacaatcagccccacgaggatattagagctcctcccgctgaactgagtatggcccctcctccaccacgtagtgtcagccaagaaacattccgtatttccacgaggaagcacagcaatcttattacggtccccattcaggatgactcaaactccggagcacgggagccaccacccccagccccagcccctgctcaccaccaccctgaataccaagggcagccagtggtgtctcatcctcatcatattatgcccccacaacagcattatgccccacccccaccacctcccccaccaatttcccatccaatgccccaccctccacaggccgcaggaactcctcatttagtgtatagccaagcccctccgcctccaatgacatcggcccctccaccaattacaccaccacccggacacatcatagctcagatgcccccttatatgaaccatcctcctcccggtcctccgcctccacagcatgggggacctcctgtcacagcgccacctccccaccattacaacccaaacagtctcccccagttcacagaagatcaaggtaccctgagcccccctttcacccagccgggaggaatgtcgcctggtatctggccagctcctagaggacccccacctcctcccagactccagggtcccccatctcagacccccttgcctgggccacatcatcccgatcagacacggtaccgcccatactatcagtag

SEQ ID NO: 103647 - DNA, 2003 bp, Artificial Sequence
  derived and/or modified sequence
actgtgctctgcgagccgaatcatggatcacactgacaatgagttacaaggcactaatagttctggatccttgggtggtcttgatgttcgcagacgaattcctataaagctcatctccaaacaagcaaacaaagcgaaacctgcaccgcgaactcaaagaactataaacaggatgcctgcaaaggctccacctggtgatgaaggatttgattataatgaagaagaacggtatgactgtaaagggggtgagctgtttgcaaatcagcgaagatttcctggacaccttttttgggactttcagataaacatcttaggtgaaaaggatgatacaccagttcatttctgtgacaagtgtggattgcctattaaaatctatgggagaatgattccatgcaagcatgttttttgctatgactgtgctattttacatgaaaaaaagggagataagatgtgtccaggctgtagtgatcctgtgcagcgaattgagcagtgtacacgaggttctctcttcatgtgtagcattgttcaagggtgcaagagaacatatttgtctcagagagacttacaggctcatatcaaccatcgccatatgagagctggaaaacctgttacccgtgcttcacttgaaaatgttcatcctcctattgccccaccaccaactgaaatccctgagcgttttataatgccaccagacaagcaccatatgagccatattccgccaaagcagcacatcatgatgccaccacctcctttgcaacatgtgccacatgagcactataatcagccacatgaggatattcgtgctcctccagcagaattgtccatggctccacctccacctcgatcggtcagtcaggaaacctttcgtatttcaacaagaaaacacagcaatttaataaccgtccctattcaggatgactcaaattcaggtgctagagaaccaccacctcctgccccagcacctgctcaccatcatcctgaatatcagggtcaaccagtggtatcgcaccctcatcatattatgcctccacagcaacattatgcaccacccccacctcctccaccaccaataagccatccaatgccacatcctccccaggctgcaggtactcctcacttggtatatagccaagctccacctccaccaatgacctctgctccaccaccaataacccctccccctggacatattattgcccagatgccaccttatatgaatcatcctcctccaggacctcccccacctcaacatggtggtccacctgtaactgcaccccctcctcaccattataatcctaactcattaccccagttcactgaagatcaaggaactctgagccctccatttacacaaccagggggaatgagtcctggtatatggcctgcaccaagagggccaccaccacctccacgattgcagggtccgccttctcaaaccccacttcctggaccacatcatccagatcagacaagatatagaccgtattaccaatgataatagtattttgaatggaagatatgagggggaaaaaaacttatgtgtagtcaatcttttaagctttgactgttttgggaaggaagagtacctcttatcgaggtagtataaaacacatagggtcttgtttcttaaaatggttttaaatcttgaccttaagattgatttcaagtaccatactgtagtacagataagtggctcagttgagcacagctatattttaacatctctttgttcccctagtttagtaaattgacccagaggtgaccatttgtaaaaaatttgaaaaaatttttcattgttttacttcaaaagtattgttttgttaaacccaacgtttagtttttcttgtgatacattttgttaacctgtgtaaaaggattaaatttcaatatggttgtaaaaatgctatttttatgtgaatttaagtgcagccacatactgttttttaaaccatatgttttaccactaatttcccaaagttataataaaatcctgaaagtaaaaa

SEQ ID NO: 103648 - DNA, 1983 bp, Artificial Sequence
  derived and/or modified sequence
accactgctctccccttccccggtccccctggtgtcctttccacagttaaaggctactttctcttgaagcacatgaggagaagccttagcaacctcaataccgaagttcttcgcgcgctcgctctttctgcctccgcccgaactatgcctgagtccctcacaggagttggatagtagaggcgagagaaggaagtctttgcaggccaaaattgggacaacctgcttggacttccgcctcccggcctccggaaggcagtgcgcacgcgctcgctgcgactccggcgcggttgacttccgctcccactgtgctctgcgagccgaatcatggatcacactgacaatgagttacaaggcactaatagttctggatccttgggtggtcttgatgttcgcagacgaattcctataaagctcatctccaaacaagcaaacaaagcgaaacctgcaccgcgaactcaaagaactataaagaaggatttgattataatgaagaagaacggtatgactgtaaagggggtgagctgtttgcaaatcagcgaagatttcctggacaccttttttgggactttcagataaacatcttaggtgaaaaggatgatacaccagttcatttctgtgacaagtgtggattgcctattaaaatctatgggagaatgattccatgcaagcatgttttttgctatgactgtgctattttacatgaaaaaaagggagataagatgtgtccaggctgtagtgatcctgtgcagcgaattgagcagtgtacacgaggttctctcttcatgtgtagcattgttcaagggtgcaagagaacatatttgtctcagagagacttacaggctcatatcaaccatcgccatatgagagctggaaaacctgttacccgtgcttcacttgaaaatgttcatcctcctattgccccaccaccaactgaaatccctgagcgttttataatgccaccagacaagcaccatatgagccatattccgccaaagcagcacatcatgatgccaccacctcctttgcaacatgtgccacatgagcactataatcagccacatgaggatattcgtgctcctccagcagaattgtccatggctccacctccacctcgatcggtcagtcaggaaacctttcgtatttcaacaagaaaacacagcaatttaataaccgtccctattcaggatgactcaaattcaggtgctagagaaccaccacctcctgccccagcacctgctcaccatcatcctgaatatcagggtcaaccagtggtatcgcaccctcatcatattatgcctccacagcaacattatgcaccacccccacctcctccaccaccaataagccatccaatgccacatcctccccaggctgcaggtactcctcacttggtatatagccaagctccacctccaccaatgacctctgctccaccaccaataacccctccccctggacatattattgcccagatgccaccttatatgaatcatcctcctccaggacctcccccacctcaacatggtggtccacctgtaactgcaccccctcctcaccattataatcctaactcattaccccagttcactgaagatcaaggaactctgagccctccatttacacaaccagggggaatgagtcctggtatatggcctgcaccaagagggccaccaccacctccacgattgcagggtccgccttctcaaaccccacttcctggaccacatcatccagatcagacaagatatagaccgtattaccaatgataatagtattttgaatggaagatatgagggggaaaaaaacttatgtgtagtcaatcttttaagctttgactgttttgggaaggaagagtataaatcaacattcttaggatattatttatatcctttgaataaatccctgtgaagtttttcctccccactaaaatggtgcataataaaacatgaaatatgtagtatgcagatatcatttattagatag

SEQ ID NO: 103649 - DNA, 1473 bp, Artificial Sequence
  derived and/or modified sequence
atggaccacaccgacaacgagctgcagggcaccaacagcagcggcagcctgggcggcctggacgtgagaagaagaatccccatcaagctgatcagcaagcaggccaacaaggccaagcccgcccccagaacccagagaaccatcaacagaatgcccgccaaggccccccccggcgacgagggcttcgactacaacgaggaggagagatacgactgcaagggcggcgagctgttcgccaaccagagaagattccccggccacctgttctgggacttccagatcaacatcctgggcgagaaggacgacacccccgtgcacttctgcgacaagtgcggcctgcccatcaagatctacggcagaatgatcccctgcaagcacgtgttctgctacgactgcgccatcctgcacgagaagaagggcgacaagatgtgccccggctgcagcgaccccgtgcagagaatcgagcagtgcaccagaggcagcctgttcatgtgcagcatcgtgcagggctgcaagagaacctacctgagccagagagacctgcaggcccacatcaaccacagacacatgagagccggcaagcccgtgaccagagccagcctggagaacgtgcacccccccatcgcccccccccccaccgagatccccgagagattcatcatgccccccgacaagcaccacatgagccacatcccccccaagcagcacatcatgatgccccccccccccctgcagcacgtgccccacgagcactacaaccagccccacgaggacatcagagccccccccgccgagctgagcatggccccccccccccccagaagcgtgagccaggagaccttcagaatcagcaccagaaagcacagcaacctgatcaccgtgcccatccaggacgacagcaacagcggcgccagagagccccccccccccgcccccgcccccgcccaccaccaccccgagtaccagggccagcccgtggtgagccacccccaccacatcatgcccccccagcagcactacgccccccccccccccccccccccccccatcagccaccccatgccccaccccccccaggccgccggcaccccccacctggtgtacagccaggccccccccccccccatgaccagcgcccccccccccatcacccccccccccggccacatcatcgcccagatgcccccctacatgaaccaccccccccccggccccccccccccccagcacggcggcccccccgtgaccgccccccccccccaccactacaaccccaacagcctgccccagttcaccgaggaccagggcaccctgagcccccccttcacccagcccggcggcatgagccccggcatctggcccgcccccagaggccccccccccccccccagactgcagggcccccccagccagacccccctgcccggcccccaccaccccgaccagaccagatacagaccctactaccagtag

SEQ ID NO: 103650 - protein, 1160 aa, Artificial Sequence
  derived and/or modified sequence
MVVTLGPGPDCLILEASRQPQLVPKPERMASDGASALPGPDMSMKPSAAPSPSPALPFLPPTSDPPDHPPREPPPQPIMPSVFSPDNPLMLSAFPSSLLVTGDGGPCLSGAGAGKVIVKVKTEGGSAEPSQTQNFILTQTALNSTAPGTPCGGLEGPAPPFVTASNVKTILPSKAVGVSQEGPPGLPPQPPPPVAQLVPIVPLEKAWPGPHGTTGEGGPVATLSKPSLGDRSKISKDVYENFRQWQRYKALARRHLSQSPDTEALSCFLIPVLRSLARLKPTMTLEEGLPLAVQEWEHTSNFDRMIFYEMAERFMEFEAEEMQIQNTQLMNGSQGLSPATPLKLDPLGPLASEVCQQPVYIPKKAASKTRAPRRRQRKAQRPPAPEAPKEIPPEAVKEYVDIMEWLVGTHLATGESDGKQEEEGQQQEEEGMYPDPGLLSYINELCSQKVFVSKVEAVIHPQFLADLLSPEKQRDPLALIEELEQEEGLTLAQLVQKRLMALEEEEDAEAPPSFSGAQLDSSPSGSVEDEDGDGRLRPSPGLQGAGGAACLGKVSSSGKRAREVHGGQEQALDSPRGMHRDGNTLPSPSSWDLQPELAAPQGTPGPLGVERRGSGKVINQVSLHQDGHLGGAGPPGHCLVADRTSEALPLCWQGGFQPESTPSLDAGLAELAPLQGQGLEKQVLGLQKGQQTGGRGVLPQGKEPLAVPWEGSSGAMWGDDRGTPMAQSYDQNPSPRAAGERDDVCLSPGVWLSSEMDAVGLELPVQIEEVIESFQVEKCVTEYQEGCQGLGSRGNISLGPGETLVPGDTESSVIPCGGTVAAAALEKRNYCSLPGPLRANSPPLRSKENQEQSCETVGHPSDLWAEGCFPLLESGDSTLGSSKETLPPTCQGNLLIMGTEDASSLPEASQEAGSRGNSFSPLLETIEPVNILDVKDDCGLQLRVSEDTCPLNVHSYDPQGEGRVDPDLSKPKNLAPLQESQESYTTGTPKATSSHQGLGSTLPRRGTRNAIVPRETSVSKTHRSADRAKGKEKKKKEAEEEDEELSNFAYLLASKLSLSPREHPLSPHHASGGQGSQRASHLLPAGAKGPSKLPYPVAKSGKRALAGGPAPTEKTPHSGAQLGVPREKPLALGVVRPSQPRKRRCDSFVTGRRKKRRRSQ

SEQ ID NO: 103651 - DNA, 3795 bp, Artificial Sequence
  derived and/or modified sequence
gagttccgtattctagttctgtgtgatctgatctttaccttcccttccttggatccctgtgcacctactggagccaggttactctgggtcctggacctgactgcctcattctggaggcttccagacagccacagttagtgcccaaacctgagaggatggcttcagatggagcatctgcattgccgggaccggatatgagcatgaaacctagtgccgccccgtctccatcccctgcacttccctttctcccaccaacttctgacccaccagaccacccacccagggagccacctccacagcccatcatgccttcagtattctctccagacaaccctctgatgctctctgctttccccagctcactgttggtgacaggggatgggggcccttgcctcagtggggctggggctggcaaggtcattgtcaaagtcaagacagaaggggggtcagctgagccctctcaaactcagaactttatccttactcagactgccctcaattcgactgccccgggcactccctgtggaggccttgagggtcctgcacctccatttgtgacagcatctaatgtgaagaccattctgccctctaaggctgttggtgtcagccaggagggtcctccaggccttccgcctcagcctccaccaccagttgctcaactggtccccattgtgcccctggaaaaagcttggccagggccacatgggacaaccggggaaggaggtcctgtggccactctatccaagccttccctaggtgaccgctccaaaatttccaaggacgtttatgagaacttccgtcagtggcagcgttacaaagccttggcccggaggcacctatcccagagtcctgacacagaagctctttcctgttttcttatcccagtgcttcgttccctggcccggctgaagcccactatgaccctggaggagggactgccattggctgtgcaggagtgggagcacaccagcaactttgaccggatgatcttttatgagatggcagaaaggttcatggagtttgaggctgaggagatgcagattcagaacacacagctgatgaatgggtctcagggcctgtctcctgcaacccctttgaaacttgatcctctagggcccctggcctctgaggtttgccagcagccagtgtacattccgaagaaggcagcctccaagacacgggccccccgccggcgtcagcgtaaagcccagagacctcctgctcctgaggcacccaaggagatcccaccagaagctgtgaaggagtatgttgacatcatggaatggctggtggggactcacttggccactggggagtcagatggaaaacaagaggaagaagggcagcagcaggaggaggaagggatgtatccagatccaggtctcctgagctacatcaatgagctgtgttctcagaaggtctttgtctccaaggtggaggctgtcattcaccctcaatttctggcagatctgctgtccccagaaaaacagagagatcccttggccttaattgaggagctagagcaagaagaaggactcactcttgcccagctggtccagaagcgactcatggccttggaagaggaggaagatgcagaggcgcctccaagtttcagtggcgctcagttggactcaagtccttctggttctgttgaggatgaagatggggatgggcggcttcggccctcacctgggcttcagggggctgggggcgccgcttgccttggaaaggtttcttcttcaggaaaacgggcaagagaagtgcatggtgggcaggagcaagccctagatagccccagagggatgcacagggatgggaacactctgccatcccccagcagctgggacctgcagccagaacttgcagctccacagggaactccgggacccttgggtgtggagaggagagggtctgggaaggttataaaccaggtatctctacatcaggatggccatctaggaggcgctgggcctcctgggcactgcctggtggctgataggacttcagaggctctgcccctttgttggcagggaggcttccagcctgagagcactcccagtttggatgctggacttgcagagctggctcctctgcaaggacaagggttagaaaagcaagtcctgggattgcagaaaggacaacaaacagggggtcgtggagtgcttcctcaagggaaggagcctttagcagtgccctgggaaggctcttcaggagccatgtggggagatgacagaggtacccccatggctcagagttatgatcagaatccttcccctagagcagctggggagagggacgatgtctgtctcagcccaggagtttggctgagcagtgagatggatgctgtaggcttggagctgcctgtacaaatagaggaggtcatagagagcttccaagttgagaagtgtgtaactgagtatcaggaaggctgccagggactgggctccaggggcaacatttccctgggtcctggagaaaccctagtacctggggatacggagagcagtgtgattccctgtggaggcacagttgcggcagctgccctagaaaagagaaactattgcagcttgccaggacctttgagggccaacagcccacccttgaggtccaaagaaaatcaagaacagagctgtgaaaccgtagggcatcccagtgatctgtgggcagaaggttgcttcccattgctagaaagtggtgattccacactggggtcttccaaagaaacccttccacccacatgccaaggcaatctccttatcatggggactgaggatgcctcctccttgcctgaagccagtcaagaggcagggagcagaggcaattccttttctcctctgttggaaaccatagaacctgtcaacatactagatgttaaagatgactgtggcctccaactaagggtcagcgaggacacctgcccactgaatgttcattcttatgacccccaaggagaaggcagggtggatcctgatctgtccaagcctaaaaaccttgctcctttacaagagagtcaggagtcttacacaactgggactcccaaagcaacatcttctcaccagggccttggaagcactttgcctagaaggggaaccaggaatgccatagttccgagagaaacttctgttagtaaaacacacaggtcagcagacagggccaaaggaaaggagaaaaagaaaaaggaagcagaggaagaggatgaggaactctccaactttgcttacctcttggcctctaaacttagcctctcaccaagggagcatcccctcagtcctcaccatgcctcaggaggtcagggcagccagagagcatcccacctgctccctgctggagcaaaaggccccagcaaacttccatatcctgttgccaagtctgggaagcgagctctagctggaggtccagcccctactgaaaagacaccccactcaggagctcaacttggggtccccagggagaaacccctagctctgggagtagttcgaccctcacagcctcgtaaaaggcggtgtgacagttttgtcacgggcagaaggaagaaacgacgtcgtagccagtagggagcagcgggaccatctgaccccacttgccagtccctaaaggtgggtgccccagagtagattccacccctgctgcccaccaatggagaatcccaatgttgaatctcatcccaatgttgttttgttgttctgcaaaagtggcaagcatggagagagaggtcagactggctaggctgcagggggaattacctttggaaggagctatatagaaaaaaaatgaataaagtgttttgttggaaaa

SEQ ID NO: 103652 - DNA, 3483 bp, Artificial Sequence
  derived and/or modified sequence
atggtggtgaccctgggccccggccccgactgcctgatcctggaggccagcagacagccccagctggtgcccaagcccgagagaatggccagcgacggcgccagcgccctgcccggccccgacatgagcatgaagcccagcgccgcccccagccccagccccgccctgcccttcctgccccccaccagcgacccccccgaccacccccccagagagccccccccccagcccatcatgcccagcgtgttcagccccgacaaccccctgatgctgagcgccttccccagcagcctgctggtgaccggcgacggcggcccctgcctgagcggcgccggcgccggcaaggtgatcgtgaaggtgaagaccgagggcggcagcgccgagcccagccagacccagaacttcatcctgacccagaccgccctgaacagcaccgcccccggcaccccctgcggcggcctggagggccccgccccccccttcgtgaccgccagcaacgtgaagaccatcctgcccagcaaggccgtgggcgtgagccaggagggcccccccggcctgcccccccagccccccccccccgtggcccagctggtgcccatcgtgcccctggagaaggcctggcccggcccccacggcaccaccggcgagggcggccccgtggccaccctgagcaagcccagcctgggcgacagaagcaagatcagcaaggacgtgtacgagaacttcagacagtggcagagatacaaggccctggccagaagacacctgagccagagccccgacaccgaggccctgagctgcttcctgatccccgtgctgagaagcctggccagactgaagcccaccatgaccctggaggagggcctgcccctggccgtgcaggagtgggagcacaccagcaacttcgacagaatgatcttctacgagatggccgagagattcatggagttcgaggccgaggagatgcagatccagaacacccagctgatgaacggcagccagggcctgagccccgccacccccctgaagctggaccccctgggccccctggccagcgaggtgtgccagcagcccgtgtacatccccaagaaggccgccagcaagaccagagcccccagaagaagacagagaaaggcccagagaccccccgcccccgaggcccccaaggagatcccccccgaggccgtgaaggagtacgtggacatcatggagtggctggtgggcacccacctggccaccggcgagagcgacggcaagcaggaggaggagggccagcagcaggaggaggagggcatgtaccccgaccccggcctgctgagctacatcaacgagctgtgcagccagaaggtgttcgtgagcaaggtggaggccgtgatccacccccagttcctggccgacctgctgagccccgagaagcagagagaccccctggccctgatcgaggagctggagcaggaggagggcctgaccctggcccagctggtgcagaagagactgatggccctggaggaggaggaggacgccgaggccccccccagcttcagcggcgcccagctggacagcagccccagcggcagcgtggaggacgaggacggcgacggcagactgagacccagccccggcctgcagggcgccggcggcgccgcctgcctgggcaaggtgagcagcagcggcaagagagccagagaggtgcacggcggccaggagcaggccctggacagccccagaggcatgcacagagacggcaacaccctgcccagccccagcagctgggacctgcagcccgagctggccgccccccagggcacccccggccccctgggcgtggagagaagaggcagcggcaaggtgatcaaccaggtgagcctgcaccaggacggccacctgggcggcgccggcccccccggccactgcctggtggccgacagaaccagcgaggccctgcccctgtgctggcagggcggcttccagcccgagagcacccccagcctggacgccggcctggccgagctggcccccctgcagggccagggcctggagaagcaggtgctgggcctgcagaagggccagcagaccggcggcagaggcgtgctgccccagggcaaggagcccctggccgtgccctgggagggcagcagcggcgccatgtggggcgacgacagaggcacccccatggcccagagctacgaccagaaccccagccccagagccgccggcgagagagacgacgtgtgcctgagccccggcgtgtggctgagcagcgagatggacgccgtgggcctggagctgcccgtgcagatcgaggaggtgatcgagagcttccaggtggagaagtgcgtgaccgagtaccaggagggctgccagggcctgggcagcagaggcaacatcagcctgggccccggcgagaccctggtgcccggcgacaccgagagcagcgtgatcccctgcggcggcaccgtggccgccgccgccctggagaagagaaactactgcagcctgcccggccccctgagagccaacagcccccccctgagaagcaaggagaaccaggagcagagctgcgagaccgtgggccaccccagcgacctgtgggccgagggctgcttccccctgctggagagcggcgacagcaccctgggcagcagcaaggagaccctgccccccacctgccagggcaacctgctgatcatgggcaccgaggacgccagcagcctgcccgaggccagccaggaggccggcagcagaggcaacagcttcagccccctgctggagaccatcgagcccgtgaacatcctggacgtgaaggacgactgcggcctgcagctgagagtgagcgaggacacctgccccctgaacgtgcacagctacgacccccagggcgagggcagagtggaccccgacctgagcaagcccaagaacctggcccccctgcaggagagccaggagagctacaccaccggcacccccaaggccaccagcagccaccagggcctgggcagcaccctgcccagaagaggcaccagaaacgccatcgtgcccagagagaccagcgtgagcaagacccacagaagcgccgacagagccaagggcaaggagaagaagaagaaggaggccgaggaggaggacgaggagctgagcaacttcgcctacctgctggccagcaagctgagcctgagccccagagagcaccccctgagcccccaccacgccagcggcggccagggcagccagagagccagccacctgctgcccgccggcgccaagggccccagcaagctgccctaccccgtggccaagagcggcaagagagccctggccggcggccccgcccccaccgagaagaccccccacagcggcgcccagctgggcgtgcccagagagaagcccctggccctgggcgtggtgagacccagccagcccagaaagagaagatgcgacagcttcgtgaccggcagaagaaagaagagaagaagaagccagtag

SEQ ID NO: 103653 - DNA, 1484 bp, Artificial Sequence
  derived and/or modified sequence
gagttccgtattctagttctgtgtgatctgatctttaccttcccttccttggatccctgtgcacctactggagccaggttactctgggtcctggacctgactgcctcattctggaggcttccagacagccacagttagtgcccaaacctgagaggatggcttcagatggagcatctgcattgccgggaccggatatgagcatgaaacctagtgccgccccgtctccatcccctgcacttccctttctcccaccaacttctgacccaccagaccacccacccagggagccacctccacagcccatcatgccttcagtattctctccagacaaccctctgatgctctctgctttccccagctcactgttggtgacaggggatgggggcccttgcctcagtggggctggggctggcaaggtcattgtcaaagtcaagacagaaggggggtcagctgagccctctcaaactcagaactttatccttactcagactgccctcaattcgactgccccgggcactccctgtggaggccttgagggtcctgcacctccatttgtgacagcatctaatgtgaagaccattctgccctctaaggctgttggtgtcagccaggagggtcctccaggccttccgcctcagcctccaccaccagttgctcaactggtccccattgtgcccctggaaaaagcttggccagggccacatgggacaaccggggaaggaggtcctgtggccactctatccaagccttccctaggtgaccgctccaaaatttccaaggacgtttatgagaacttccgtcagtggcagcgttacaaagccttggcccggaggcacctatcccagagtcctgacacagaagctgtgaaggagtatgttgacatcatggaatggctggtggggactcacttggccactggggagtcagatggaaaacaagaggaagaagggcagcagcaggaggaggaagggatgtatccagatccaggtctcctgagctacatcaatgagctgtgttctcagaaggtctttgtctccaaggtggaggctgtcattcaccctcaatttctggcagatctgctgtccccagaaaaacagagagatcccttggccttaattgaggagctagagcaagaagaaggactcactcttgcccagctggtccagaagcgactcatggccttggaagaggaggaagatgcagaggcgcctccaagtttcagtggcgctcagttggactcaagtccttctggttctgttgaggatgaagatggggatgggcggcttcggccctcacctgggcttcagggggctgggggcgccgcttgccttggaaaggtttcttcttcaggaaaacgggcaagagaagtgcatggtgggcaggagcaagccctagatagccccagagggatgcacagggatgggaacactctgccatcccccagcagctgggacctgcccaccaatggagaatcccaatgttga

SEQ ID NO: 103654 - DNA, 3483 bp, Artificial Sequence
  derived and/or modified sequence
atggttgtgacccttggtcctgggcccgactgcctgatcctcgaggccagtcgccagccccagctggtgcccaaacccgagcgaatggcatccgatggggccagcgccctgccaggacctgatatgtctatgaaaccgagcgcagcacccagcccatcacctgcactgccgtttctgcccccaacttcagatccaccagatcatccacccagagagccacctcctcaacccataatgccttccgttttcagccctgacaaccctctgatgctgtctgccttccctagttcactattggtcacaggtgatggcggaccttgcttatccggtgccggcgctggcaaagtgattgtgaaggtgaagaccgagggggggagcgcagagccctcgcagacccagaacttcatactcactcaaactgcgctgaattccaccgcacccggaacaccctgtggcggtctcgagggacccgcacctccgtttgttactgcaagcaacgtgaaaaccatcttgccttccaaggcggtaggcgtgtcacaggagggccccccgggtctgccaccacaaccaccccctcctgttgctcaacttgttccaatcgtgccacttgaaaaggcatggcccggccctcatggtaccacaggagaaggaggccccgtcgcaacactgtccaagcctagtctcggtgatcgctccaagatttccaaagacgtttatgaaaatttcagacagtggcagcgctataaggctctcgcacgcaggcacctgtcccagagtccagataccgaagcactgtcgtgtttcctgatcccagtactgcggtcactcgcccggcttaagcctaccatgaccctagaagaaggtctccccctggccgtgcaggagtgggaacatacttcgaactttgatcgcatgattttctacgagatggctgagcggtttatggaattcgaagctgaggaaatgcagattcagaatacacagctaatgaacgggtctcaggggctgagcccagccactccactcaagttagatccgctagggcctctagcctccgaagtgtgccagcaaccggtgtatatccctaaaaaagctgcgtccaagactcgagcaccccgtcgccggcagcggaaggcccagcgcccacccgcccctgaagcaccgaaagagatccccccggaggccgtgaaggagtatgtggacattatggagtggttggtcggaacccacctggcaacaggcgaaagcgatggcaaacaggaagaggagggacaacagcaggaggaggaaggtatgtaccctgaccccggcctgctatcttacattaacgagctgtgttcacaaaaagtgttcgtgagcaaggttgaagcagtgattcaccctcagttcctagcagacttgttgagccccgagaagcaaagggatccattagcactgatcgaggagctcgaacaggaggagggactgacccttgcgcagttggtgcagaagcgactgatggccctagaggaggaggaggacgcagaggccccaccatccttcagtggtgctcagctggatagctcacccagcgggtctgttgaagatgaggacggggatggcaggcttagacccagtccggggctgcagggggctggtggggctgcctgcttaggcaaagtctccagctctggaaaaagagcaagggaagtgcatggaggccaggagcaggcactggatagtccccggggcatgcaccgagatggaaacacactcccatcacctagttcctgggacctgcagcctgagctggccgcaccccagggtacaccagggcccctaggggttgagaggagagggagtgggaaggtcataaaccaggtgtctctgcaccaggacggacatctgggaggcgctggacccccaggtcactgtttggtcgccgatcgtacatctgaagcccttccgctttgctggcaaggcggtttccaacccgagtccacccccagtctggacgccggcctggctgagctggcccccttgcaggggcaaggtcttgagaagcaggtattgggattacaaaagggacagcagaccggagggcgcggagtgctcccccaaggcaaagaaccactcgcagtgccttgggaagggagctccggtgcaatgtggggcgacgatcgggggacaccgatggcccagtcatatgaccagaatcccagtccacgggctgctggtgaaagggatgatgtgtgcttgtccccaggagtgtggctgtcttcagagatggatgctgtcggcctcgagctacccgtccagatagaggaggttatcgaaagtttccaggtcgagaaatgtgtgaccgaataccaggaaggttgccagggtctcggatctagaggaaacatctccttggggcccggggaaacccttgtgcctggtgacactgaaagttctgtgataccttgcgggggaacggtggcagctgcagcactcgagaaacgtaactactgctcgcttcccggtccactcagagctaactcaccacccttacgctcaaaagagaaccaggagcagtcatgtgagaccgttggccacccaagcgatctgtgggctgaaggctgctttcctctcctggaaagcggagactcaacactgggctcctccaaagagacactgccgcccacttgccaggggaacttgttgatcatggggaccgaggatgcttccagtctgccagaagcgtcccaggaagcagggtcccggggcaactcattctctcctctcctggagactatagagccagttaatattttggatgtgaaggacgattgcggactgcaacttcgcgtgtccgaagatacctgcccactgaacgtgcactcttacgatccgcagggggagggcagagtcgacccagatctctctaagccaaagaacttggctccactgcaagaatcgcaagagagctatacaaccggcactcctaaggctacctccagccaccagggcctcggaagtaccttgcctaggcgcggcacgcggaacgccatcgtcccccgcgagacttccgtgtccaaaacccatagatctgccgatagggcgaaaggcaaagagaagaagaaaaaggaggccgaggaagaagatgaggagctgtccaactttgcctatctgctggcctccaaacttagtctttctccccgggagcaccccttatccccgcaccacgcatcaggaggacaaggctcccagcgagccagccacctgttaccggcgggcgctaaggggcctagtaagctgccatacccggttgccaagtcaggcaaacgggcattagccgggggacccgcacccacagagaagaccccccactccggggctcagctgggggttccccgggaaaaacccttagcccttggggtggtcagacccagtcagccccggaagcggagatgcgattcctttgtgacaggccgccggaaaaaacgaagaaggtcccagtag

SEQ ID NO: 103655 - DNA, 3483 bp, Artificial Sequence
  derived and/or modified sequence
atggtggtgaccctgggccctggccctgactgcctgatcctggaggccagccggcagccccagctggtgcccaagccagagaggatggccagtgatggagccagcgccctgcccggccctgacatgtccatgaagcccagcgctgcccccagccccagccctgccctgcccttcctgccccccaccagtgaccccccagaccaccccccccgggagcccccaccccagcccatcatgcccagcgtcttctccccagacaaccccctgatgctgagcgccttccccagcagcctgctggtgactggagatggcggcccctgcctgtctggagctggagctgggaaggtgattgtgaaggtgaagacagagggcggcagcgctgagcccagccagacccagaacttcatcctgacccagacagccctgaacagcacagcccctggcaccccctgtggcggcctggagggccctgcccccccatttgtgacagccagcaatgtgaagaccatcctgcccagcaaggctgtgggcgtgtcccaggagggccccccaggcctgcccccccagcccccacctcctgtggcccagctggtgcccatcgtgcccctggagaaggcctggccaggcccccacggcaccaccggggagggcggccctgtggccaccctgagcaagcccagcctgggggacaggagcaagatcagcaaggatgtgtatgagaacttccggcagtggcagcgctacaaggccctggcccggcggcacctgagccagagcccagacacagaggccctgagctgcttcctgatccctgtgctgcggagcctggcccggctgaagcccaccatgaccctggaggagggcctgcccctggccgtgcaggagtgggagcacaccagcaactttgacaggatgatcttctatgagatggccgagcgcttcatggagtttgaagctgaggagatgcagatccagaacacccagctgatgaatggcagccagggcctgagccctgccacccccctgaagctggaccccctgggccccctggccagcgaggtgtgccagcagcctgtgtacatccccaagaaggccgccagcaagacccgggccccccggcggcggcagaggaaggcccagaggcccccagcccctgaggcccccaaggagatccccccagaggccgtgaaggagtatgtggacatcatggagtggctggtgggcacccacctggccactggagagagtgatggcaagcaggaggaggagggccagcagcaggaggaggagggcatgtacccagaccccggcctgctgagctacatcaatgagctgtgcagccagaaggtgtttgtgtccaaggtggaggccgtcatccacccccagttcctggccgacctgctgagccctgagaagcagagggaccccctggccctgattgaggagctggagcaggaggagggcctgaccctggcccagctggtgcagaagaggctgatggccctggaggaggaggaggatgctgaggcccctccttccttcagcggggcccagctggacagcagccccagcggctctgtggaggatgaagatggagatggccgcctgcggcccagccctggcctgcagggcgccggcggggccgcctgcctgggcaaggtgagcagcagcggcaagagggcccgggaggtgcatggaggccaggagcaggccctggacagcccccggggcatgcacagagatggcaacaccctgcccagccccagctcctgggacctgcagcctgagctggccgccccccagggcaccccaggccccctgggcgtggagcggcggggcagcggcaaggtgatcaaccaggtgtccctgcaccaggacggccacctgggcggggccggccccccaggccactgcctggtggccgacaggaccagcgaggccctgcccctgtgctggcagggcggcttccagcctgagagcacccccagcctggatgctggcctggccgagctggcccccctgcagggccagggcctggagaagcaggtgctgggcctgcagaagggccagcagacaggaggccggggcgtgctgccccagggcaaggagcccctggccgtgccctgggagggcagcagcggggccatgtggggagatgaccggggcacccccatggcccagagctatgaccagaaccccagccccagggctgctggggagagagatgatgtgtgcctgagccctggggtgtggctgagcagcgagatggatgctgtgggcctggagctgcctgtgcagatcgaggaggtgattgagagcttccaggtggagaagtgtgtgacagagtaccaggagggctgccagggcctgggcagccggggcaacatcagcctgggccctggagagaccctggtgcctggggacacagagagcagcgtcatcccctgtggcggcaccgtggccgctgctgccctggagaagaggaactactgcagcctgcccggccccctgcgggccaacagcccccccctgcggagcaaggagaaccaggagcagagctgtgagaccgtgggccaccccagcgacctgtgggccgagggctgcttccccctgctggagagcggggacagcaccctgggcagcagcaaggagaccctgccccccacctgccagggcaacctgctgatcatgggcacagaagatgccagcagcctgcctgaggccagccaggaggccggcagccggggcaacagcttcagccccctgctggagaccatcgagcctgtgaacatcctggatgtgaaggatgactgtggcctgcagctgcgggtgtctgaggacacctgccccctgaatgtgcacagctatgacccccagggcgagggccgggtggaccctgacctgagcaagcccaagaacctggcccccctgcaggagagccaggagagctacaccaccggcacccccaaggccaccagcagccaccagggcctgggcagcaccctgccccggcggggcaccagaaatgccatcgtgccccgggagacctctgtgtccaagacccacaggtctgctgaccgggccaagggcaaggagaagaagaagaaggaggccgaggaggaggatgaggagctgagcaactttgcctacctgctggccagcaagctgagcctgagcccccgggagcaccccctgagcccccaccacgccagcggcggccagggcagccagagggccagccacctgctgcctgctggggccaagggccccagcaagctgccctaccctgtggccaagagcggcaagagggccctggccggcggccctgcccccacagagaagaccccccacagcggggcccagctgggcgtgccccgggagaagcccctggccctgggcgtggtgcggcccagccagcccaggaagagaagatgtgacagctttgtgacaggccgcaggaagaagagaagaagaagccagtag

SEQ ID NO: 103656 - DNA, 3483 bp, Artificial Sequence
  derived and/or modified sequence
atggtggtgaccctgggccccggccccgactgcctgatcctggaggcctcaagacagccccagttggtgcccaagcccgagcgcatggcaagtgatggcgctagcgcactgcccggccccgacatgagtatgaagccttctgcagctccaagcccgagccctgctttgccttttctccccccaactagtgacccaccagaccacccccctcgtgagccaccccctcaacccatcatgccatctgtgtttagtccggataatccattaatgctttctgcctttccctcctcgctcctggtgactggcgacgggggcccttgtttgagtggagcaggcgccgggaaggtgatagtgaaagtgaagaccgaaggcggttctgctgaacctagtcaaactcagaattttatcctgacacagaccgcattgaattccacagcccccgggactccatgtggcggactagaaggccccgccccgccatttgtgaccgcttccaatgtgaagaccatactgccatctaaagctgtgggagtgagccaggagggtccacctggcctgcctccccagccccctccacccgttgcacaacttgtgccaattgtgcctcttgagaaagcatggccgggcccacatggcactacaggggaagggggacccgtcgccaccctgtccaagcccagcctgggagatcgctcgaagataagcaaagacgtttacgaaaactttcggcagtggcagcggtataaggcccttgcacggcgccatttgtcacaaagtcccgatacggaggccctaagttgcttcttgatccccgtgctccgctcactggcacgcctgaagcccacgatgaccctagaagaaggcctacctctggccgtgcaggagtgggaacatacaagcaacttcgatcgaatgatattttacgagatggcagagcgctttatggagttcgaggccgaggagatgcagattcagaatactcagttgatgaatggctctcagggcctttccccagccacccctttgaagttggatccacttgggcctctggcctctgaggtctgccagcagccagtgtatatcccaaaaaaagcggcttcgaagacccgagcacctcggagaagacagagaaaagcccagcgaccgccagccccagaggcaccaaaggagattcctccggaagccgtgaaagaatatgtggacattatggagtggctagtgggcacacatctggcaactggagagtctgacgggaaacaggaagaagagggacagcagcaagaagaggagggaatgtatccggatccaggattactttcatacattaacgagttatgttctcaaaaagtgtttgtcagtaaggtcgaggctgtgatacacccacaatttctcgctgacctcctctcacccgaaaaacaacgcgacccgctggcgctgatcgaagaactagaacaggaggagggactgactctagcgcagctcgtccagaagaggctgatggccctggaagaagaggaggacgctgaggctcccccctctttctcgggagctcaactcgacagctctccttctggcagcgtggaagatgaggacggagacggacgtttgaggccatcccctggcttacaaggagctggaggggcagcatgcctgggtaaggtatcatcgagtggcaaacgagcgcgggaggttcacggggggcaggagcaggcacttgatagcccccgcggtatgcacagagacgggaacactctgccttcgccaagtagctgggaccttcagcctgagttggccgcgccgcagggcacgccagggccactgggggtcgagaggaggggatccggcaaagttatcaatcaggtgagcctgcaccaagatggtcatctggggggggccggaccacctggtcactgtctcgttgctgaccggaccagcgaagctctgcccctgtgttggcaaggggggttccaacccgaatctacaccaagcctggacgccggactggcagagctcgcaccactgcagggacaggggctggagaagcaggtcctcggactgcaaaaagggcagcagactgggggacggggcgtgctgccacaaggtaaggagcccctggctgtcccctgggaaggaagttcaggcgctatgtggggtgatgacaggggtacgcctatggcccagagctatgaccagaatccctcaccaagagctgccggggaacgcgacgacgtgtgtttgtctccaggtgtctggttgagtagcgaaatggatgccgttggactggaacttccggtgcagatagaagaggtgatagagagcttccaggttgagaaatgcgtgactgaatatcaagaaggctgtcagggacttgggtcccgtggaaatatttcgctggggccgggggagaccctggtcccgggcgataccgaatccagcgtcatcccttgcggcggaaccgtggcagctgccgccctggagaaacgaaattactgctcactgcctggccccctgcgggccaatagtccgccccttcgtagcaaagaaaatcaggaacaaagctgtgagaccgtgggacatccatccgacctatgggcagagggttgctttccgttactggagtccggcgacagcacactgggaagtagtaaggaaactcttccccctacatgccagggcaacctattgattatgggaacagaggacgcttcctctttgcccgaagcttcgcaggaggcaggctcaaggggcaacagcttctccccacttcttgaaaccattgagccggtgaatattttggatgtcaaggatgactgtggccttcagctgagagtgtcagaggacacatgtccccttaacgttcactcttacgatccccagggcgaaggccgcgttgacccagacttgagcaaacccaaaaacctggcccccctgcaagagagccaggaatcgtacacaacaggaacgccaaaagcaacctctagccaccagggcttggggtcgaccttaccccgtcgtgggaccaggaacgctattgtgccacgcgaaacttcagtgtccaaaacccaccgctctgccgaccgcgccaaagggaaagagaaaaaaaaaaaggaagccgaagaggaggacgaggagctgtccaacttcgcctacttgctcgcctccaaactgagcctaagtccccgagaacatcccctttctcctcatcacgcctccggcggccaaggtagtcagcgggcctctcatctactgccagcgggagctaaaggcccttctaaattaccttatccagtcgccaagtctggaaaacgcgcactcgctggagggcctgcgccaaccgagaagacaccacactctggagcccagctgggagtgcctcgcgagaagccactggctctcggtgtggtgagaccttctcaacccaggaaacgccggtgtgattcctttgtaacaggcaggcgaaagaaacgcaggcgctcccagtag

SEQ ID NO: 103657 - DNA, 3483 bp, Artificial Sequence
  derived and/or modified sequence
atggtggtgaccctcggcccaggacccgattgtctgatcttggaagcctcccgtcaaccccagctggtacccaaacccgagagaatggccagcgacggcgcaagcgctctgcctggaccagatatgagcatgaagccatctgccgcacccagcccaagccctgcgctgccatttctcccccctacaagcgacccaccagaccacccccctcgcgaacctccacctcagcctatcatgccctccgtgttctctcccgataatccactgatgctgtctgccttcccctcgtctctgttagtgaccggagatggcggtccatgtctatctggagctggcgcaggaaaagttatcgttaaggtaaaaacggagggtggcagcgccgagcctagtcagactcagaactttatcttaacacagaccgctctgaattccactgcccctggaactccatgcgggggactcgaagggcctgcacctccgtttgtaactgcttccaatgtgaagacaatcctcccttcaaaagctgtcggtgtgagccaggagggaccaccagggctgcccccacagccaccaccccctgtggcacagttggtgccaatcgtcccattagagaaagcgtggcccggtccccacggtacaacaggagagggaggacccgtggccaccctttcaaagccatcactgggcgaccggtctaagatatcaaaggacgtgtatgaaaactttcgccagtggcagcgctacaaagccctcgccagacggcacctgagccagagccctgatacagaagctcttagctgtttcctcattccagtattaaggagcttggctcgacttaagcctactatgaccctggaagagggccttccactggccgttcaggagtgggagcacaccagtaatttcgatcgcatgatcttttatgaaatggccgagagatttatggagtttgaggcggaggaaatgcaaatccagaacacccaattgatgaatgggtctcagggactgtcgcctgcaaccccactcaagctcgacccattaggcccactcgcgagcgaggtatgccagcagcctgtgtatattcccaagaaggctgctagtaaaactcgggctcccagaagacgccagcgaaaagcccagagacctcccgctcccgaagccccaaaggagataccccctgaagccgtgaaggagtatgttgacatcatggagtggcttgtgggcacacatctggccaccggcgagagtgatgggaaacaagaagaggaggggcagcagcaagaagaagaaggcatgtaccccgatcctggcctgctcagttacatcaacgaattgtgcagtcagaaggtattcgtctcaaaggtggaggcagtgattcatcctcaatttttggccgacttgctgtcaccggagaaacagagggacccactggcactgattgaggaactggaacaggaggaagggctaacgctagcccagctggtccaaaagagactaatggcactcgaagaggaagaagacgccgaggcacctcccagcttttccggagcacagctagattcaagcccttcagggtccgtcgaagatgaggacggagatggtagacttaggccgagccccggtctgcagggagctggaggagcggcatgtttgggcaaggtgagttcctctggcaaacgcgctcgtgaggtgcacggcggacaggaacaggctctcgattcgcccagggggatgcacagagacggcaacacgttgcctagccccagttcctgggacctgcagcctgaattagctgcgccacagggcacgcctgggcctctcggtgtggaaaggcgcggttctggcaaggttattaatcaggtgtcactgcaccaagatggtcacctggggggagccggtccccctggccactgcctcgtggctgatcggacttccgaagctcttcccctctgctggcagggagggtttcaaccagagtctacaccatctctagatgctggattggccgagcttgcacctctccagggccaaggcctggagaaacaagtgttagggctgcagaaggggcagcagactggaggccgtggagtactcccccagggaaaggaaccgttagcggtcccatgggagggatccagcggagctatgtggggtgacgatagaggtaccccaatggcacaaagttatgaccagaacccaagccccagagctgcaggcgaaagggacgatgtgtgtctgtccccaggggtatggctgagcagtgagatggatgcggtgggtttggagctgccagtgcagatagaagaggtcattgagtctttccaggtggagaagtgcgtgaccgaataccaagaaggatgccagggactgggatccaggggcaacattagcttaggcccaggcgaaactctggtaccgggtgacacggaatcctcagtcatcccgtgcggtggtacagtggcagctgccgctctggaaaagagaaactattgtagtctgcccggaccattgagagccaattcaccacctttaaggagtaaagaaaaccaagagcagagctgcgaaaccgtgggccatccgagcgatctttgggcagaaggctgttttccactgctcgagtccggggactctaccctgggcagcagcaaggagaccttaccaccaacatgccagggaaatttgctgatcatgggcacagaagatgcatcgagtcttcctgaggctagccaggaggccggttcacgaggcaactccttctctccgttattggagaccattgagcctgtcaatattctggatgtgaaggacgattgcggtttgcagctgagagtttcggaggacacgtgcccactcaacgttcattcttatgatccccaaggagaggggcgagtcgatcctgatcttagtaagccaaaaaaccttgctccgctgcaagagtctcaggaatcctatacgacagggacaccgaaggccacaagttcccaccaaggactcgggtcgactttgcctcgcagggggactcggaacgccatcgttccccgtgaaacctccgtgagcaagacacatcggagtgccgaccgggctaagggtaaggaaaaaaagaagaaagaggccgaggaagaggatgaagagctctctaatttcgcgtacctgctggcaagcaaactgtctttgtcccccagggagcaccctctgagtccccatcacgcatcgggtggccaagggtcacagcgggcatcccacctccttcctgctggcgcaaagggcccaagcaagcttccttaccccgtggcaaagagtggaaaaagggcattggccggagggcctgccccaaccgagaaaaccccacattcgggggctcagctcggcgtccccagggagaagcccctggccctgggcgtagtccgccctagccaaccccgtaagcggaggtgcgacagtttcgtgaccgggaggcggaaaaagcggcgtaggagccagtag

SEQ ID NO: 103658 - DNA, 4102 bp, Artificial Sequence
  derived and/or modified sequence
ctactgtgtgctaggtacacggcgttagaggggggtagggatggatgtggatagaatattgacgtatagaagcctgtctttgtctcaagatacacacccatttcaggagcagtgagttttcaatgcctgaagaaacaagggctccaggattcagagcccctttaccctagggaagaaagaagaggttttcttccctcccctcttttacatccagttcccctgctccatttcaaagcgttggcggtaaagaatgcatgttgagtatcaatattccgtaaagcgaaagagcgtaaagttattttatgaaactggtgaagcatgtttcagcggtcgaaccaagatttaaagttaggtccctaccgcaaattcagcgctctttcttatggtggttactctgggtcctggacctgactgcctcattctggaggcttccagacagccacagttagtgcccaaacctgagaggatggcttcagatggagcatctgcattgccgggaccggatatgagcatgaaacctagtgccgccccgtctccatcccctgcacttccctttctcccaccaacttctgacccaccagaccacccacccagggagccacctccacagcccatcatgccttcagtattctctccagacaaccctctgatgctctctgctttccccagctcactgttggtgacaggggatgggggcccttgcctcagtggggctggggctggcaaggtcattgtcaaagtcaagacagaaggggggtcagctgagccctctcaaactcagaactttatccttactcagactgccctcaattcgactgccccgggcactccctgtggaggccttgagggtcctgcacctccatttgtgacagcatctaatgtgaagaccattctgccctctaaggctgttggtgtcagccaggagggtcctccaggccttccgcctcagcctccaccaccagttgctcaactggtccccattgtgcccctggaaaaagcttggccagggccacatgggacaaccggggaaggaggtcctgtggccactctatccaagccttccctaggtgaccgctccaaaatttccaaggacgtttatgagaacttccgtcagtggcagcgttacaaagccttggcccggaggcacctatcccagagtcctgacacagaagctctttcctgttttcttatcccagtgcttcgttccctggcccggctgaagcccactatgaccctggaggagggactgccattggctgtgcaggagtgggagcacaccagcaactttgaccggatgatcttttatgagatggcagaaaggttcatggagtttgaggctgaggagatgcagattcagaacacacagctgatgaatgggtctcagggcctgtctcctgcaacccctttgaaacttgatcctctagggcccctggcctctgaggtttgccagcagccagtgtacattccgaagaaggcagcctccaagacacgggccccccgccggcgtcagcgtaaagcccagagacctcctgctcctgaggcacccaaggagatcccaccagaagctgtgaaggagtatgttgacatcatggaatggctggtggggactcacttggccactggggagtcagatggaaaacaagaggaagaagggcagcagcaggaggaggaagggatgtatccagatccaggtctcctgagctacatcaatgagctgtgttctcagaaggtctttgtctccaaggtggaggctgtcattcaccctcaatttctggcagatctgctgtccccagaaaaacagagagatcccttggccttaattgaggagctagagcaagaagaaggactcactcttgcccagctggtccagaagcgactcatggccttggaagaggaggaagatgcagaggcgcctccaagtttcagtggcgctcagttggactcaagtccttctggttctgttgaggatgaagatggggatgggcggcttcggccctcacctgggcttcagggggctgggggcgccgcttgccttggaaaggtttcttcttcaggaaaacgggcaagagaagtgcatggtgggcaggagcaagccctagatagccccagagggatgcacagggatgggaacactctgccatcccccagcagctgggacctgcagccagaacttgcagctccacagggaactccgggacccttgggtgtggagaggagagggtctgggaaggttataaaccaggtatctctacatcaggatggccatctaggaggcgctgggcctcctgggcactgcctggtggctgataggacttcagaggctctgcccctttgttggcagggaggcttccagcctgagagcactcccagtttggatgctggacttgcagagctggctcctctgcaaggacaagggttagaaaagcaagtcctgggattgcagaaaggacaacaaacagggggtcgtggagtgcttcctcaagggaaggagcctttagcagtgccctgggaaggctcttcaggagccatgtggggagatgacagaggtacccccatggctcagagttatgatcagaatccttcccctagagcagctggggagagggacgatgtctgtctcagcccaggagtttggctgagcagtgagatggatgctgtaggcttggagctgcctgtacaaatagaggaggtcatagagagcttccaagttgagaagtgtgtaactgagtatcaggaaggctgccagggactgggctccaggggcaacatttccctgggtcctggagaaaccctagtacctggggatacggagagcagtgtgattccctgtggaggcacagttgcggcagctgccctagaaaagagaaactattgcagcttgccaggacctttgagggccaacagcccacccttgaggtccaaagaaaatcaagaacagagctgtgaaaccgtagggcatcccagtgatctgtgggcagaaggttgcttcccattgctagaaagtggtgattccacactggggtcttccaaagaaacccttccacccacatgccaaggcaatctccttatcatggggactgaggatgcctcctccttgcctgaagccagtcaagaggcagggagcagaggcaattccttttctcctctgttggaaaccatagaacctgtcaacatactagatgttaaagatgactgtggcctccaactaagggtcagcgaggacacctgcccactgaatgttcattcttatgacccccaaggagaaggcagggtggatcctgatctgtccaagcctaaaaaccttgctcctttacaagagagtcaggagtcttacacaactgggactcccaaagcaacatcttctcaccagggccttggaagcactttgcctagaaggggaaccaggaatgccatagttccgagagaaacttctgttagtaaaacacacaggtcagcagacagggccaaaggaaaggagaaaaagaaaaaggaagcagaggaagaggatgaggaactctccaactttgcttacctcttggcctctaaacttagcctctcaccaagggagcatcccctcagtcctcaccatgcctcaggaggtcagggcagccagagagcatcccacctgctccctgctggagcaaaaggccccagcaaacttccatatcctgttgccaagtctgggaagcgagctctagctggaggtccagcccctactgaaaagacaccccactcaggagctcaacttggggtccccagggagaaacccctagctctgggagtagttcgaccctcacagcctcgtaaaaggcggtgtgacagttttgtcacgggcagaaggaagaaacgacgtcgtagccagtagggagcagcgggaccatctgaccccacttgccagtccctaaaggtgggtgccccagagtagattccacccctgctgcccaccaatggagaatcccaatgttgaatctcatcccaatgttgttttgttgttctgcaaaagtggcaagcatggagagagaggtcagactggctaggctgcagggggaattacctttggaaggagctatatagaaaaaaaatgaataaagtgttttgttgg

SEQ ID NO: 103659 - protein, 1181 aa, Artificial Sequence
  derived and/or modified sequence
MSLLNPVLLPPKVKAYLSQGERFIKWDDETTVASPVILRVDPKGYYLYWTYQSKEMEFLDITSIRDTRFGKFAKMPKSQKLRDVFNMDFPDNSFLLKTLTVVSGPDMVDLTFHNFVSYKENVGKAWAEDVLALVKHPLTANASRSTFLDKILVKLKMQLNSEGKIPVKNFFQMFPADRKRVEAALSACHLPKGKNDAINPEDFPEPVYKSFLMSLCPRPEIDEIFTSYHAKAKPYMTKEHLTKFINQKQRDSRLNSLLFPPARPDQVQGLIDKYEPSGINAQRGQLSPEGMVWFLCGPENSVLAQDKLLLHHDMTQPLNHYFINSSHNTYLTAGQFSGLSSAEMYRQVLLSGCRCVELDCWKGKPPDEEPIITHGFTMTTDIFFKEAIEAIAESAFKTSPYPIILSFENHVDSPRQQAKMAEYCRTIFGDMLLTEPLEKFPLKPGVPLPSPEDLRGKILIKNKKNQFSGPTSSSKDTGGEAEGSSPPSAPAVWAGEEGTELEEEEVEEEEEEESGNLDEEEIKKMQSDEGTAGLEVTAYEEMSSLVNYIQPTKFVSFEFSAQKNRSYVISSFTELKAYDLLSKASVQFVDYNKRQMSRIYPKGTRMDSSNYMPQMFWNAGCQMVALNFQTMDLPMQQNMAVFEFNGQSGYLLKHEFMRRPDKQFNPFSVDRIDVVVATTLSITVISGQFLSERSVRTYVEVELFGLPGDPKRRYRTKLSPSTNSINPVWKEEPFVFEKILMPELASLRVAVMEEGNKFLGHRIIPINALNSGYHHLCLHSESNMPLTMPALFIFLEMKDYIPGAWADLTVALANPIKFFSAHDTKSVKLKEAMGGLPEKPFPLASPVASQVNGALAPTSNGSPAARAGAREEAMKEAAEPRTASLEELRELKGVVKLQRRHEKELRELERRGARRWEELLQRGAAQLAELGPPGVGGVGACKLGPGKGSRKKRSLPREESAGAAPGEGPEGVDGRVRELKDRLELELLRQGEEQYECVLKRKEQHVAEQISKMMELAREKQAAELKALKETSENDTKEMKKKLETKRLERIQGMTKVTTDKMAQERLKREINNSHIQEVVQVIKQMTENLERHQEKLEEKQAACLEQIREMEKQFQKEALAEYEARMKGLEAEVKESVRACLRTCFPSEAKDKPERACECPPELCEQDPLIAKADAQESRL

SEQ ID NO: 103660 - DNA, 3546 bp, Artificial Sequence
  derived and/or modified sequence
atgagtctattaaatccggtcctgcttcctcctaaggtcaaggcttatctttcacagggagaacggtttattaagtgggacgacgagactactgtggccagtcccgtcatcctgagagtagaccccaaggggtactacctgtactggacttatcagtcaaaggagatggaattcctggatatcaccagcattcgagatacaagatttggcaagtttgctaagatgcccaaatcccagaagctgcgcgacgtgttcaacatggacttcccagacaattcatttctgctgaagacactgacggttgtgtccggccctgacatggtcgacctcacttttcataatttcgtttcctataaggagaatgttgggaaggcatgggccgaggatgttctggcacttgtgaaacaccctctcactgccaatgcctcaagaagtaccttcctggacaagatcctcgtgaaactcaaaatgcagctgaacagcgaaggcaagattcccgtaaaaaactttttccaaatgtttcctgccgaccgtaagagggtggaggcggctctgagcgcctgtcatctaccgaagggaaagaatgatgcaatcaacccagaagattttcctgaacctgtgtacaagagcttcctgatgtccctatgcccccgacccgagattgatgagatctttacctcatatcacgctaaggctaagccgtatatgaccaaggagcacctcactaaatttattaaccagaagcagcgagacagcaggttgaattctcttttgtttcctccagctcgacccgatcaagtccagggccttatagacaaatacgaaccaagcggaattaacgcacaacgcggccagttgtctccagaggggatggtctggttcttgtgcggaccagagaattctgtactagcacaggacaagctcctgctgcaccatgatatgacccagccgctcaaccactatttcatcaatagctctcacaatacttacctcaccgccggtcagttttccgggctctctagtgcagaaatgtataggcaggttttgttgtcgggctgcaggtgcgtagagctggattgttggaaaggcaagccaccggatgaggaacctattatcacccatggcttcaccatgacaaccgatattttcttcaaagaggctatcgaggcaattgcagagtcagcgtttaagacctccccctaccctattatactgagctttgagaatcacgtggacagtcctcgccagcaggccaagatggccgagtactgtcggactatatttggagatatgctgcttacagagccactcgaaaaattccccctgaagccaggcgtaccactgccaagtcccgaggacctaagggggaagattcttatcaagaataagaagaatcagttttctgggcccacaagttcctctaaggatacaggtggcgaggcagaggggtcttcaccacctagtgctcccgccgtctgggccggagaggaaggcactgaattggaagaggaggaggtagaagaggaggaggaggaggaatccggcaatctcgacgaggaagagatcaagaaaatgcagtccgatgaaggcacagcgggtttggaagtcaccgcctatgaggaaatgagctcactcgttaactatatccagcccaccaaatttgtgtctttcgaatttagcgctcaaaaaaataggtcttatgtcatatcttcattcacagaactgaaagcgtacgatctgctgtctaaggcaagcgtgcagttcgttgattacaacaagaggcagatgtctcggatatacccaaaggggacccgtatggattcaagcaactatatgcctcagatgttttggaacgcaggatgccagatggtggcgctcaattttcagactatggatctgcccatgcagcagaacatggcagtgttcgagtttaatggtcaaagcggctacctgctgaagcacgaatttatgaggcgaccggacaagcaattcaaccctttttctgtagaccgcattgatgtggtggtcgccacgaccctgagcattacagtgatcagcggacaattcctcagtgagagaagtgttagaacgtatgtcgaggtggaattgttcggcctccccggcgaccctaaacgccgctaccgcacaaagctttctccctcgacaaactccattaatccagtttggaaggaagagcctttcgtattcgaaaaaattctcatgcccgagttggcctctttgagggtagcagttatggaggaaggaaacaaatttctgggtcatcgaataattccaataaatgcccttaattcagggtaccatcatctttgccttcactccgaatccaacatgcccctcaccatgcctgcgctattcatcttcttggagatgaaagactatatacctggagcatgggcagatctgactgttgctcttgccaatccaattaagtttttctccgcccacgatactaaaagtgttaagctgaaggaagcaatggggggcctgccagagaaaccctttcccctagcttccccggtggcgtcccaggttaatggggcactggcgcccacatccaatggcagcccagcggctagagctggagctagagaagaagccatgaaagaggcagcagagccccggaccgcgagtttggaggagctacgggagcttaaaggagtggtgaaacttcagcggcggcacgaaaaagaactcagggaactcgagaggagaggcgcacgccgctgggaagagctgctgcagcggggggctgcccagctggctgagctggggccaccgggtgttggcggggtgggcgcttgcaagctggggcccggcaagggcagccggaaaaagaggtcacttccaagggaagagtcggccggtgccgcaccaggagaaggaccggagggagtagacggaagagttagagagctgaaggacaggcttgagcttgagctgctgagacagggcgaagagcagtacgaatgtgtcctgaagcgcaaagagcagcacgtagctgagcagatcagtaaaatgatggaactggcgagggagaaacaagctgccgagctcaaggcactcaaggagacttcagagaacgacacaaaggaaatgaaaaagaagttggagacaaaaaggttggagcgcattcagggaatgacaaaagtgacgactgacaaaatggcccaagagcggctgaagagggagattaacaacagccatattcaggaggtggtgcaggtgatcaaacagatgacggaaaatctcgagaggcatcaggaaaagcttgaagagaaacaggccgcctgcctggagcaaataagggaaatggagaagcagtttcagaaagaggcactggccgagtacgaagctcggatgaagggattggaggccgaggtgaaagagtcagtccgcgcttgtttgaggacatgcttcccatcagaagctaaggacaaacccgaacgcgcctgtgaatgccctcccgagctttgtgaacaggaccccctcatcgctaaggccgatgcgcaagagtcacgcctgtag

SEQ ID NO: 103661 - DNA, 3546 bp, Artificial Sequence
  derived and/or modified sequence
atgagcctgctgaaccctgtgctgctgccccccaaggtgaaggcctacctgagccagggcgagcgcttcatcaagtgggatgatgagaccaccgtggccagccctgtgatcctgcgggtggaccccaagggctactacctgtactggacctaccagagcaaggagatggagttcctggacatcaccagcatccgggacaccaggtttgggaagtttgccaagatgcccaagagccagaagctgagagatgtgttcaacatggacttcccagacaacagcttcctgctgaagaccctgactgtggtgtctggccctgacatggtggacctgaccttccacaactttgtgtcctacaaggaaaatgtgggcaaggcctgggccgaggatgtgctggccctggtgaagcaccccctgacagccaatgccagccgcagcaccttcctggacaagatcctggtgaagctgaagatgcagctgaacagcgagggcaagatccctgtgaagaacttcttccagatgtttcctgctgacaggaagagggtggaggccgccctgagcgcctgccacctgcccaagggcaagaatgatgccatcaaccctgaggacttccctgagcctgtgtacaagagcttcctgatgagcctgtgccccaggcctgagattgatgagatcttcaccagctaccacgccaaggccaagccctacatgaccaaggagcacctgaccaagttcatcaaccagaagcagagggacagccggctgaacagcctgctcttccccccagcccggccagaccaggtgcagggcctgattgacaagtatgagcccagcggcatcaatgcccagaggggccagctgagccctgagggcatggtgtggttcctgtgtggcccagaaaattctgtgctggcccaggacaagctgctgctgcaccacgacatgacccagcccctgaaccactacttcatcaacagcagccacaacacctacctgacagctggccagttcagcggcctgagcagcgctgagatgtaccggcaggtgctgctgagcggctgccgctgtgtggagctggactgctggaagggcaagcccccagatgaggagcccatcatcacccacggcttcaccatgaccacagacatcttcttcaaggaggccatcgaggccatcgccgagagcgccttcaagaccagcccctaccccatcatcctgagctttgagaaccacgtggacagcccccggcagcaggccaagatggccgagtactgcaggaccatctttggagacatgctgctgacagagcccctggagaagttccccctgaagccaggagtgcccctgcccagccctgaggacctgcggggcaagatcctgatcaagaacaagaagaaccagttcagcggccccaccagcagcagcaaggacacaggaggagaggccgagggcagcagcccccccagcgccccagctgtgtgggccggggaggagggcacagagctggaggaggaggaggtggaggaggaggaggaggaggagagcggcaacctggatgaggaggagatcaagaagatgcagagtgatgagggcacagctggcctggaggtgacagcctatgaggagatgagcagcctggtgaactacatccagcccaccaagtttgtgtcctttgagttcagcgcccagaagaacagaagctatgtgatcagcagcttcacagagctgaaggcctatgacctgctgagcaaggcctctgtgcagtttgtggactacaacaagaggcagatgagccgcatctaccccaagggcaccaggatggacagcagcaactacatgccccagatgttctggaatgccggctgccagatggtggccctgaacttccagaccatggacctgcccatgcagcagaacatggctgtgtttgagttcaacggccagagcggctacctgctgaagcatgagttcatgaggaggccagacaagcagttcaaccccttctctgtggacagaattgatgtggtggtggccaccaccctgagcatcaccgtcatcagcggccagttcctgtctgagaggtctgtgaggacctacgtggaggtggagctgtttggcctgcccggggaccccaagaggcgctaccgcaccaagctgagccccagcaccaacagcatcaaccctgtgtggaaggaggagccctttgtgtttgagaagatcctgatgcctgagctggccagcctgcgggtggccgtgatggaggagggcaacaagttcctgggccaccgcatcatccccatcaatgccctgaacagcggctaccaccacctgtgcctgcacagcgagagcaacatgcccctgaccatgcctgccctcttcatcttcctggagatgaaggactacatccctggggcctgggccgacctgactgtggccctggccaaccccatcaagttcttcagcgcccatgacaccaagtctgtgaagctgaaggaggccatgggcggcctgcctgagaagcccttccccctggccagccctgtggccagccaggtgaatggagccctggcccccaccagcaatggcagccctgctgcccgggccggggcccgggaggaggccatgaaggaggccgctgagcccaggacagccagcctggaggagctgcgggagctgaagggcgtggtgaagctgcagaggagacatgagaaggagctgcgggagctggagcggcggggggcccggcgctgggaggagctgctgcagagaggagctgcccagctggccgagctgggccccccaggagtgggcggcgtgggcgcctgcaagctgggccctgggaagggcagcaggaagaagaggagcctgccccgggaggagagcgctggagctgcccctggagagggccctgagggcgtggatggccgggtgcgggagctgaaggaccggctggagctggagctgctgcggcagggcgaggagcagtatgaatgtgtgctgaagaggaaggagcagcacgtggccgagcagatcagcaagatgatggagctggcccgggagaagcaggccgctgagctgaaggccctgaaggagaccagtgaaaatgacaccaaggagatgaagaagaagctggagaccaagaggctggagcgcatccagggcatgaccaaggtgaccacagacaagatggcccaggagcggctgaagcgggagatcaacaacagccacatccaggaggtggtgcaggtgatcaagcagatgacagagaacctggagcggcaccaggagaagctggaggagaagcaggccgcctgcctggagcagatccgggagatggagaagcagttccagaaggaggccctggccgagtatgaggccaggatgaagggcctggaggccgaggtgaaggagagcgtgcgggcctgcctgcggacctgcttccccagcgaggccaaggacaagccagagcgggcctgtgaatgtcctcctgagctgtgtgagcaggaccccctgattgccaaggcagatgcccaggagagccggctgtag

SEQ ID NO: 103662 - DNA, 3546 bp, Artificial Sequence
  derived and/or modified sequence
atgagcctgctgaaccccgtgctgctgccccccaaggtgaaggcctatctgtcccagggggagaggttcataaaatgggacgatgaaacaactgtcgcatcccctgtcattttgcgcgttgacccaaagggttactatctgtactggacatatcagagtaaggagatggagttcttagatattacctccattagggatacacggttcggaaagtttgccaagatgcctaagtcccagaagttgagggatgtatttaacatggacttccctgataactccttcttacttaagactttaacagtagtgagcggtcctgacatggtggacctgacctttcataacttcgtgagctacaaggagaacgtgggtaaggcatgggcggaggacgtgctggccttggtgaaacatcccctgacagccaatgcttccagatccacctttttggacaaaatcctcgtgaagctgaagatgcaactgaactctgaaggaaagatccctgtaaagaacttctttcaaatgttcccagcagatcggaagcgcgtggaggcggctctgtccgcctgccacctacccaagggcaagaacgacgctatcaaccccgaggatttcccggagcctgtgtataagtccttcctcatgtcactttgtccacgcccagagatcgacgaaatcttcacgagttaccatgcaaaagcaaaaccctacatgaccaaagagcatctgaccaagttcattaatcagaagcagcgcgatagcaggcttaattcactgctttttccgccagcgcgacccgatcaggtgcagggccttatcgacaaatacgagccatccggcattaacgcccagaggggacaactgagcccagaaggcatggtatggttcctttgcggccctgagaatagcgtgctcgcccaagataagttgttgttgcaccacgacatgacgcagcctctcaaccactattttattaatagttcccacaacacataccttaccgccggacaattcagcgggctcagcagcgccgagatgtataggcaggtgcttctgtccgggtgtagatgtgtggaactggactgttggaagggcaaacctcccgatgaggaacccatcattacacatggctttactatgacaacagatatattctttaaagaggccattgaggccatagccgaatctgccttcaagacctccccctaccccatcatcctgagctttgaaaatcacgtggattcccccaggcagcaggccaagatggccgagtactgccggacaatatttggggacatgctccttaccgagccactggagaagttccccctcaaacccggcgtgccccttccgagcccagaagatctccgagggaaaatcctaatcaagaataagaagaaccagttctcaggaccaacttcgagttccaaggatacagggggcgaggccgaaggcagctcccctccttccgccccagccgtgtgggcaggggaggagggcaccgagttggaagaagaagaagtagaggaagaagaagaagaggaaagtggaaatttagacgaagaggagatcaaaaagatgcagtctgatgaggggactgccggcttggaagttacagcctatgaagagatgagctcgctggtgaattacatacagccaactaagttcgtgagttttgaatttagcgcgcagaagaacaggtcatatgtgatcagttcctttacggagctgaaagcttatgacctactttccaaggccagcgtgcagttcgtcgattataataagagacagatgtccagaatatacccaaagggtactagaatggattctagtaattacatgccacagatgttctggaacgcgggctgtcagatggtggccctgaatttccaaacaatggaccttcctatgcaacagaacatggcagtgtttgagtttaacggccagagcggctatttgctcaagcatgaatttatgcgccgccccgataagcaatttaaccccttttccgtggacagaatagatgtggtggttgccaccaccctatcaatcactgtgatcagcggacagttcctcagtgaacgttccgtgagaacttacgttgaggttgagctttttggcctgccaggcgatccaaagcggagatatagaaccaaattgtccccctcgaccaactctatcaatccagtgtggaaagaagaacccttcgtctttgaaaaaatattgatgcccgaactggcaagcttacgggttgccgtgatggaggagggcaacaagttcctaggacatcgcataatcccaatcaacgctctcaattctgggtatcatcacttatgtctgcactctgagtcgaatatgcctctgaccatgcctgcgctctttatttttttggagatgaaggattatataccgggcgcgtgggccgatctgaccgttgccctggcaaacccgatcaagttcttttcagcccatgataccaaatctgtgaagttgaaagaagctatggggggccttcccgagaagccattccccctcgccagtcccgtagcatcccaggttaacggggccttggccccgacctccaatggtagcccggccgctcgggcaggagcacgagaggaggcgatgaaagaagctgccgaacctcggaccgcgtccctggaggaactgagagagctgaaaggggtcgtcaaactccagcgtcgccacgagaaagaattgagagaactggagcgtcggggcgcaagacgctgggaggagttgctccagagaggtgctgctcagctcgccgagctgggccccccgggtgtcgggggagttggcgcgtgcaagctgggccctggaaaagggagtaggaagaaaaggagccttccacgagaggagtcagcaggcgcggcaccaggagagggcccagagggcgtggatgggagagttcgggaactcaaggatcggctggagcttgagcttctgagacagggcgaagaacagtacgagtgcgtcctgaaacggaaggaacaacacgtagctgaacagatctccaagatgatggagctggcccgcgagaagcaggcagcagaattaaaggccctgaaagaaacttccgagaacgacaccaaggagatgaagaagaaactcgaaactaagagacttgagcgaatccaggggatgaccaaggtgacaacggataaaatggcacaggagaggctaaaacgcgagatcaataatagtcatatccaggaagttgtccaagttatcaagcaaatgactgaaaatctcgagcgacaccaggagaagcttgaagagaaacaggccgcttgcctcgagcagattagagagatggaaaagcaattccagaaggaggctctggccgagtacgaagcccgaatgaagggactggaggctgaggtgaaggaatccgtgagggcctgtttgaggacctgttttcccagcgaggctaaggataaaccagagcgcgcgtgcgaatgccctcccgagctgtgcgaacaggacccattgatagctaaagcagacgcgcaagagtcccgcttgtag

SEQ ID NO: 103663 - DNA, 4517 bp, Artificial Sequence
  derived and/or modified sequence
cagccagggccaccccaggggctataagagcaactagatttctggagcagctcggggatgggtgccatttgagcccagcttggctccccctcctggctggcctccttcctgcccttctgcctgcctgtgtctgctgagattctgcaaagaggaacgcttggcaccatgtctctgctcaaccctgtcctgctgccccccaaggtgaaggcctatctgagccaaggggagcgcttcatcaaatgggatgatgaaactacagttgcctctccagttatcctccgtgtggatcctaagggctactacttatactggacgtatcaaagtaaggagatggagtttctggatatcaccagcatccgggatactcgctttgggaagtttgccaagatgcccaagagccagaagctccgggacgtcttcaacatggactttcctgataacagtttcctgctgaagacactcacggtggtgtccggcccggacatggtggacctcaccttccacaacttcgtctcctacaaggagaacgtgggcaaggcctgggctgaggacgtactggccctagtcaaacatccgctgacggccaacgcctcccgcagcaccttcctggacaagatccttgtgaagctcaagatgcagctcaactctgaagggaagattccggtgaagaactttttccagatgtttcctgctgaccgcaagcgggtggaagctgctctcagtgcctgccacctccccaaaggcaaaaatgacgccatcaatcctgaggacttcccagaacctgtctacaagagtttcctcatgagcctctgtcctcggccagaaatagatgagatcttcacttcttaccatgctaaggccaaaccctacatgacgaaggagcacctgaccaaattcatcaaccagaaacagcgggactcccggcttaactccctgctgttcccgccagcacggcctgaccaggtgcagggcctcatcgacaagtatgagcccagtggcatcaatgcacagaggggccagctgtcacctgaaggcatggtctggtttctctgtgggccagagaacagcgtgctggcccaggacaagctgctgctccaccacgacatgacgcagccactcaatcattacttcatcaactcgtcccacaacacctacctgacagccggccagttctcaggcctctcctcggctgagatgtaccgccaggtgctgctctctggctgccgttgcgtggagctagactgctggaaggggaaaccccctgacgaggagcccattatcacccatggcttcaccatgaccacagacatcttcttcaaagaagcaattgaggctattgcagaaagcgcctttaagacctccccctatcccatcatcctgtcgtttgagaaccatgtggactcaccccgccagcaggctaagatggctgagtattgccggacgatctttggggatatgctgctcacagagcccctggaaaagttcccactaaaaccaggtgtccccctgcccagccctgaggatctcaggggcaagatcctcatcaagaacaagaagaaccagttttctggccccacctcctccagtaaggatactggtggggaggctgagggcagcagcccacccagtgcccctgcagtgtgggctggcgaggaagggactgagctggaggaggaggaggtggaagaggaagaggaggaggagtcaggaaacctggatgaagaagagattaagaagatgcagtcggatgagggcacagcgggcctggaagtgacggcttatgaggagatgtccagcctagtcaattacatccagcccaccaagttcgtctcctttgagttctctgcccaaaagaaccgaagttatgtcatctcgtccttcacagagctcaaggcatatgacctgctctccaaggcctcggtgcagtttgtggactacaacaagcgccagatgagccgcatttaccccaagggaacccgcatggactcctccaactacatgccccagatgttctggaatgctggatgccagatggttgccctcaacttccagacgatggacttgcccatgcagcagaacatggcagtatttgagttcaacgggcagagcggctacctcctcaagcatgagttcatgcgccggccggacaagcagttcaaccccttctcagtggaccgcatcgacgtggtggtggccaccaccctttccattacggtgatctctgggcagttcctgtcagaacgcagcgtgcgcacctatgtagaagtggagctgtttggccttcctggggaccccaagaggcgctatcgaactaagctgtcacccagtactaactccatcaatcctgtctggaaggaggagccctttgtctttgagaagatcttgatgcctgagctggcctccctcagagtggctgtgatggaggaaggcaacaagtttcttggacaccgcatcatccccatcaatgccctaaattctgggtaccaccacctgtgcctgcacagtgagagcaacatgcccctcaccatgcctgcgctcttcatcttcctggagatgaaggactacatacctggtgcttgggcagatctcactgtggccctcgccaaccccattaagttcttcagtgcccatgacacgaagtctgtgaagctcaaggaggccatgggaggtctgcctgagaagcccttcccactggcgagtccagttgccagccaggtcaatggggcgttggccccaacgagcaatgggtcaccagcagccagggccggggccagggaagaggctatgaaagaagctgcggagccgcggaccgccagcctggaggagctccgggagctaaagggcgtggtgaagctgcagcggcggcacgagaaggagctgcgagagttggagcggcgcggagcgcggcgctgggaggagctgctgcagcggggcgcggcgcagctggcggagctcgggccaccgggcgtggggggcgtcggggcctgcaagctcggtcccggcaagggctctcgcaagaagaggagcctgccccgcgaggagagcgccggagccgcgccgggcgagggccctgagggcgtggacgggcgcgtgcgggagctgaaagacaggctggagctggagctgctgcggcagggcgaggagcagtacgagtgcgttctgaagcgcaaggagcagcacgtggccgagcaaatctccaaaatgatggagctggccagagagaaacaggcggcagagctgaaggccctgaaggagacgtcggagaacgacaccaaagagatgaagaaaaagctggagacaaagagactggagcggatccagggcatgaccaaagtcaccacagacaagatggcccaggagaggttgaagagagagattaacaactcccacatccaggaagtagtgcaggtgatcaagcagatgacggagaacttggagaggcaccaggagaagctggaggagaagcaggcggcttgcctggaacagatacgggagatggaaaagcagttccagaaggaggcgctggcagagtacgaggccaggatgaagggtctggaggcagaggtgaaggagtcggtgagggcctgcctcaggacctgctttccctccgaggccaaggacaagcctgagagggcctgcgagtgccccccagagctgtgtgagcaggacccactcatagcaaaggcagatgcccaggagagccgcctctgatgcccccatcccactgggacatttagcaaggaggttcagccccttctctgggatgtggttctattcccccaggaaaaaggagccccagccttctgaggctgtgggaacctgtggctgccttggacgctgcagccccctcctcaacggccaggccagagtctgagacaggacccaggcaccctcacggcagggcctctctggggcctagaagtcttctcaagctgacttcctacctccccctccatctctagataagtgtcatatatttgttgagggcaaaagactatggactggaaggcagaaagtgggatcctggccccactctgcctttcctattgagcaaccagctctgggctcagtttcctcacctggagggttggacccactcacctccactctagccccgaaccctcctgccccaggcttccaggccccatcaggcctgccctgagttggccttgtccactccttgaggcagatcctggcactacctcacagctccctggggacggccactccctggctgagggccctcccctcccctctgcctgtccggaacgggaggctgaaatggaaaagctgccttggccctgcttggctgagtcacaaggggcagtgggctcttgggtgctgttccaccctgaccctggctcacccctcttcctaggcctgggggcaggcagttcctaccatgtacccctctcaggctgcctgcctgacaaggtcagcatcatttgctctcctgaatttatgaggtttatttatttttctctttcctactcctattaaagaacctcgtcccagtg

SEQ ID NO: 103664 - DNA, 3546 bp, Artificial Sequence
  derived and/or modified sequence
atgagcctcctcaaccctgtgttacttccacccaaggtgaaagcttatttgtctcagggggagagatttatcaagtgggacgatgagactacagtagcctcccctgtgatcctccgcgtcgaccctaaaggctattacctctattggacgtaccagtcaaaagaaatggagtttcttgatataactagcatcagagacactcgattcgggaagtttgcaaagatgccaaagtctcaaaaactgcgggatgtgttcaatatggactttccagataactcttttttgctcaagacacttaccgtagttagcggtcccgatatggtcgatctgacatttcataatttcgtgagctacaaagagaatgtcgggaaagcttgggctgaagatgttctggcccttgttaagcacccactcacggcaaatgcttctagaagcacatttttggacaaaatattggtgaagttgaaaatgcagcttaattctgaagggaaaatcccagtgaaaaatttcttccagatgtttcctgcagaccgcaagcgggtggaagccgcattgtctgcatgtcacctgcccaaaggaaaaaacgacgctattaatcccgaggacttcccggagcccgtctataagagcttcctcatgagcttgtgcccacggccagagattgacgagatctttacaagctatcacgctaaagccaagccctatatgacaaaagaacatctgacgaagttcattaaccagaagcagcgggattcacgtctaaactcccttctgttccctccagcgaggcccgaccaagtccagggcctgattgataaatacgaaccttctggtataaatgctcagcgcggacagttatcacccgaggggatggtctggttcctgtgcggaccagaaaacagcgtcctcgctcaggacaagctgttgctgcaccacgatatgacgcagccgctgaatcactacttcataaactctagtcacaatacttacctcaccgccggtcagttttccggcctgtcgagcgccgaaatgtatcggcaagtgctactgtctggctgtcgatgcgtagaactggattgctggaaaggtaagccacccgacgaagaaccaattattacccacggcttcacaatgactaccgacatttttttcaaggaggctatagaggccatcgcagagtcagcctttaagacatccccgtatccaatcatcctatccttcgaaaaccacgtggattctccaaggcagcaagccaagatggccgagtattgtaggactatttttggagatatgcttctcactgagcccctggaaaaattcccccttaagccaggtgtgcctctgcctagcccggaggacctgagaggcaaaatcctgatcaagaataagaagaaccaatttagcggtccaaccagctcctcaaaagatacaggtggcgaggccgaggggagctctcccccatctgccccagcggtatgggccggtgaggaaggaaccgagctcgaagaagaagaggtggaggaggaggaggaagaggaaagcggcaatctggatgaagaggaaattaagaaaatgcagagtgacgaaggcaccgccggtctcgaggtgacagcttatgaagagatgtcctccctcgtgaactacatacaacccacaaaattcgtctcatttgaattctccgcccagaagaacagatcctacgtgatctcaagttttacagaacttaaagcctacgaccttttatccaaggcctcggtgcagttcgtagattacaataagcggcagatgagccggatttatccaaaaggaacaagaatggattcttccaattacatgccccaaatgttttggaacgccggttgtcagatggtagcacttaattttcagacaatggaccttcctatgcagcagaatatggcggtgttcgaattcaatgggcagagcggatacttgttaaagcacgaattcatgcggaggccagataagcagtttaacccattcagcgtagacagaatagacgtagtcgttgctactaccttgtccatcaccgtaatctctggacagttcttgagtgaacgttccgttcgaacatatgtagaggtggaactgtttgggttgccgggtgatccaaaacgaagatataggacaaagctgtccccttctaccaatagtattaaccccgtgtggaaagaggagcctttcgtcttcgagaagattttaatgccggaactcgctagcctgagagttgccgttatggaggagggcaataagttcttgggacaccggatcattccaattaacgccctgaacagcggataccaccatctgtgtctacattcagagtctaacatgccactgaccatgcccgcactgtttatcttcctcgaaatgaaggattatatacctggggcttgggccgacctgactgtggctcttgcaaatcccatcaaattcttctccgcgcacgatactaaatccgtgaagctgaaggaggccatgggaggattgccagaaaagcctttcccactagccagcccagtagcttctcaagttaacggagcacttgctcctacatctaacgggagccccgctgctcgggcaggcgctagggaggaagcgatgaaggaagccgcagagcccagaaccgcatctctcgaagaactgagagagttaaaaggggtggtgaaactccaaagacgccacgagaaagaacttcgggaactggaaaggagaggggctagacgttgggaggagctcctacagagaggtgcggctcagctcgctgaattgggtccacccggagtgggaggtgtaggcgcttgtaagctagggccaggtaaagggtcccgaaagaagcgatctctccccagagaagagagtgccggagcggctcccggtgagggccctgaaggggtcgacggtagagtgcgcgaactgaaggatcgtcttgagcttgagctcctgaggcagggtgaggagcagtacgaatgtgtgctgaagagaaaagagcagcacgtggcggagcagataagcaaaatgatggaacttgctcgagaaaagcaagctgccgagttaaaagccctgaaagaaacgtctgagaatgacaccaaggagatgaagaaaaaactggagaccaagcgcctggaacggatccagggaatgactaaagttaccaccgacaaaatggctcaagagcggctgaagcgcgagataaacaatagccacattcaggaggtcgtgcaggttattaagcagatgaccgaaaatttagaacgccaccaggagaagctggaagagaagcaggccgcttgtctggaacaaatcagggagatggagaagcagttccagaaggaggcattggctgagtacgaggctcgtatgaagggacttgaggcagaagtgaaagagtctgtcagagcctgccttaggacttgcttccccagtgaggccaaggataagcctgagcgcgcttgtgagtgccccccagagctgtgcgagcaggaccccctgatagcaaaagccgatgcacaagaatcacggttgtag

SEQ ID NO: 103665 - DNA, 3546 bp, Artificial Sequence
  derived and/or modified sequence
atgagcctgctgaaccccgtgctgctgccccccaaggtgaaggcctacctgagccagggcgagagattcatcaagtgggacgacgagaccaccgtggccagccccgtgatcctgagagtggaccccaagggctactacctgtactggacctaccagagcaaggagatggagttcctggacatcaccagcatcagagacaccagattcggcaagttcgccaagatgcccaagagccagaagctgagagacgtgttcaacatggacttccccgacaacagcttcctgctgaagaccctgaccgtggtgagcggccccgacatggtggacctgaccttccacaacttcgtgagctacaaggagaacgtgggcaaggcctgggccgaggacgtgctggccctggtgaagcaccccctgaccgccaacgccagcagaagcaccttcctggacaagatcctggtgaagctgaagatgcagctgaacagcgagggcaagatccccgtgaagaacttcttccagatgttccccgccgacagaaagagagtggaggccgccctgagcgcctgccacctgcccaagggcaagaacgacgccatcaaccccgaggacttccccgagcccgtgtacaagagcttcctgatgagcctgtgccccagacccgagatcgacgagatcttcaccagctaccacgccaaggccaagccctacatgaccaaggagcacctgaccaagttcatcaaccagaagcagagagacagcagactgaacagcctgctgttcccccccgccagacccgaccaggtgcagggcctgatcgacaagtacgagcccagcggcatcaacgcccagagaggccagctgagccccgagggcatggtgtggttcctgtgcggccccgagaacagcgtgctggcccaggacaagctgctgctgcaccacgacatgacccagcccctgaaccactacttcatcaacagcagccacaacacctacctgaccgccggccagttcagcggcctgagcagcgccgagatgtacagacaggtgctgctgagcggctgcagatgcgtggagctggactgctggaagggcaagccccccgacgaggagcccatcatcacccacggcttcaccatgaccaccgacatcttcttcaaggaggccatcgaggccatcgccgagagcgccttcaagaccagcccctaccccatcatcctgagcttcgagaaccacgtggacagccccagacagcaggccaagatggccgagtactgcagaaccatcttcggcgacatgctgctgaccgagcccctggagaagttccccctgaagcccggcgtgcccctgcccagccccgaggacctgagaggcaagatcctgatcaagaacaagaagaaccagttcagcggccccaccagcagcagcaaggacaccggcggcgaggccgagggcagcagcccccccagcgcccccgccgtgtgggccggcgaggagggcaccgagctggaggaggaggaggtggaggaggaggaggaggaggagagcggcaacctggacgaggaggagatcaagaagatgcagagcgacgagggcaccgccggcctggaggtgaccgcctacgaggagatgagcagcctggtgaactacatccagcccaccaagttcgtgagcttcgagttcagcgcccagaagaacagaagctacgtgatcagcagcttcaccgagctgaaggcctacgacctgctgagcaaggccagcgtgcagttcgtggactacaacaagagacagatgagcagaatctaccccaagggcaccagaatggacagcagcaactacatgccccagatgttctggaacgccggctgccagatggtggccctgaacttccagaccatggacctgcccatgcagcagaacatggccgtgttcgagttcaacggccagagcggctacctgctgaagcacgagttcatgagaagacccgacaagcagttcaaccccttcagcgtggacagaatcgacgtggtggtggccaccaccctgagcatcaccgtgatcagcggccagttcctgagcgagagaagcgtgagaacctacgtggaggtggagctgttcggcctgcccggcgaccccaagagaagatacagaaccaagctgagccccagcaccaacagcatcaaccccgtgtggaaggaggagcccttcgtgttcgagaagatcctgatgcccgagctggccagcctgagagtggccgtgatggaggagggcaacaagttcctgggccacagaatcatccccatcaacgccctgaacagcggctaccaccacctgtgcctgcacagcgagagcaacatgcccctgaccatgcccgccctgttcatcttcctggagatgaaggactacatccccggcgcctgggccgacctgaccgtggccctggccaaccccatcaagttcttcagcgcccacgacaccaagagcgtgaagctgaaggaggccatgggcggcctgcccgagaagcccttccccctggccagccccgtggccagccaggtgaacggcgccctggcccccaccagcaacggcagccccgccgccagagccggcgccagagaggaggccatgaaggaggccgccgagcccagaaccgccagcctggaggagctgagagagctgaagggcgtggtgaagctgcagagaagacacgagaaggagctgagagagctggagagaagaggcgccagaagatgggaggagctgctgcagagaggcgccgcccagctggccgagctgggcccccccggcgtgggcggcgtgggcgcctgcaagctgggccccggcaagggcagcagaaagaagagaagcctgcccagagaggagagcgccggcgccgcccccggcgagggccccgagggcgtggacggcagagtgagagagctgaaggacagactggagctggagctgctgagacagggcgaggagcagtacgagtgcgtgctgaagagaaaggagcagcacgtggccgagcagatcagcaagatgatggagctggccagagagaagcaggccgccgagctgaaggccctgaaggagaccagcgagaacgacaccaaggagatgaagaagaagctggagaccaagagactggagagaatccagggcatgaccaaggtgaccaccgacaagatggcccaggagagactgaagagagagatcaacaacagccacatccaggaggtggtgcaggtgatcaagcagatgaccgagaacctggagagacaccaggagaagctggaggagaagcaggccgcctgcctggagcagatcagagagatggagaagcagttccagaaggaggccctggccgagtacgaggccagaatgaagggcctggaggccgaggtgaaggagagcgtgagagcctgcctgagaacctgcttccccagcgaggccaaggacaagcccgagagagcctgcgagtgcccccccgagctgtgcgagcaggaccccctgatcgccaaggccgacgcccaggagagcagactgtag

SEQ ID NO: 103666 - protein, 1087 aa, Artificial Sequence
  derived and/or modified sequence
MDPFTEKLLERTRARRENLQRKMAERPTAAPRSMTHAKRARQPLSEASNQQPLSGGEEKSCTKPSPSKKRCSDNTEVEVSNLENKQPVESTSAKSCSPSPVSPQVQPQAADTISDSVAVPASLLGMRRGLNSRLEATAASSVKTRMQKLAEQRRRWDNDDMTDDIPESSLFSPMPSEEKAASPPRPLLSNASATPVGRRGRLANLAATICSWEDDVNHSFAKQNSVQEQPGTACLSKFSSASGASARINSSSVKQEATFCSQRDGDASLNKALSSSADDASLVNASISSSVKATSPVKSTTSITDAKSCEGQNPELLPKTPISPLKTGVSKPIVKSTLSQTVPSKGELSREICLQSQSKDKSTTPGGTGIKPFLERFGERCQEHSKESPARSTPHRTPIITPNTKAIQERLFKQDTSSSTTHLAQQLKQERQKELACLRGRFDKGNIWSAEKGGNSKSKQLETKQETHCQSTPLKKHQGVSKTQSLPVTEKVTENQIPAKNSSTEPKEVIREIEMSVDDDDINSSKVINDLFSDVLEEGELDMEKSQEEMDQALAESSEEQEDALNISSMSLLAPLAQTVGVVSPESLVSTPRLELKDTSRSDESPKPGKFQRTRVPRAESGDSLGSEDRDLLYSIDAYRSQRFKETERPSIKQVIVRKEDVTSKLDEKNNAFPCQVNIKQKMQELNNEINMQQTVIYQASQALNCCVDEEHGKGSLEEAEAERLLLIATGKRTLLIDELNKLKNEGPQRKNKASPQSEFMPSKGSVTLSEIRLPLKADFVCSTVQKPDAANYYYLIILKAGAENMVATPLASTSNSLNGDALTFTTTFTLQDVSNDFEINIEVYSLVQKKDPSGLDKKKKTSKSKAITPKRLLTSITTKSNIHSSVMASPGGLSAVRTSNFALVGSYTLSLSSVGNTKFVLDKVPFLSSLEGHIYLKIKCQVNSSVEERGFLTIFEDVSGFGAWHRRWCVLSGNCISYWTYPDDEKRKNPIGRINLANCTSRQIEPANREFCARRNTFELITVRPQREDDRETLVSQCRDTLCVTKNWLSADTKEERDLWMQKLNQVLVDIRLWQPDACYKPIGKP

SEQ ID NO: 103667 - DNA, 3264 bp, Artificial Sequence
  derived and/or modified sequence
atggaccccttcaccgagaagctgctggagagaaccagagccagaagagagaacctgcagagaaagatggccgagagacccaccgccgcccccagaagcatgacccacgccaagagagccagacagcccctgagcgaggccagcaaccagcagcccctgagcggcggcgaggagaagagctgcaccaagcccagccccagcaagaagagatgcagcgacaacaccgaggtggaggtgagcaacctggagaacaagcagcccgtggagagcaccagcgccaagagctgcagccccagccccgtgagcccccaggtgcagccccaggccgccgacaccatcagcgacagcgtggccgtgcccgccagcctgctgggcatgagaagaggcctgaacagcagactggaggccaccgccgccagcagcgtgaagaccagaatgcagaagctggccgagcagagaagaagatgggacaacgacgacatgaccgacgacatccccgagagcagcctgttcagccccatgcccagcgaggagaaggccgccagcccccccagacccctgctgagcaacgccagcgccacccccgtgggcagaagaggcagactggccaacctggccgccaccatctgcagctgggaggacgacgtgaaccacagcttcgccaagcagaacagcgtgcaggagcagcccggcaccgcctgcctgagcaagttcagcagcgccagcggcgccagcgccagaatcaacagcagcagcgtgaagcaggaggccaccttctgcagccagagagacggcgacgccagcctgaacaaggccctgagcagcagcgccgacgacgccagcctggtgaacgccagcatcagcagcagcgtgaaggccaccagccccgtgaagagcaccaccagcatcaccgacgccaagagctgcgagggccagaaccccgagctgctgcccaagacccccatcagccccctgaagaccggcgtgagcaagcccatcgtgaagagcaccctgagccagaccgtgcccagcaagggcgagctgagcagagagatctgcctgcagagccagagcaaggacaagagcaccacccccggcggcaccggcatcaagcccttcctggagagattcggcgagagatgccaggagcacagcaaggagagccccgccagaagcaccccccacagaacccccatcatcacccccaacaccaaggccatccaggagagactgttcaagcaggacaccagcagcagcaccacccacctggcccagcagctgaagcaggagagacagaaggagctggcctgcctgagaggcagattcgacaagggcaacatctggagcgccgagaagggcggcaacagcaagagcaagcagctggagaccaagcaggagacccactgccagagcacccccctgaagaagcaccagggcgtgagcaagacccagagcctgcccgtgaccgagaaggtgaccgagaaccagatccccgccaagaacagcagcaccgagcccaaggaggtgatcagagagatcgagatgagcgtggacgacgacgacatcaacagcagcaaggtgatcaacgacctgttcagcgacgtgctggaggagggcgagctggacatggagaagagccaggaggagatggaccaggccctggccgagagcagcgaggagcaggaggacgccctgaacatcagcagcatgagcctgctggcccccctggcccagaccgtgggcgtggtgagccccgagagcctggtgagcacccccagactggagctgaaggacaccagcagaagcgacgagagccccaagcccggcaagttccagagaaccagagtgcccagagccgagagcggcgacagcctgggcagcgaggacagagacctgctgtacagcatcgacgcctacagaagccagagattcaaggagaccgagagacccagcatcaagcaggtgatcgtgagaaaggaggacgtgaccagcaagctggacgagaagaacaacgccttcccctgccaggtgaacatcaagcagaagatgcaggagctgaacaacgagatcaacatgcagcagaccgtgatctaccaggccagccaggccctgaactgctgcgtggacgaggagcacggcaagggcagcctggaggaggccgaggccgagagactgctgctgatcgccaccggcaagagaaccctgctgatcgacgagctgaacaagctgaagaacgagggcccccagagaaagaacaaggccagcccccagagcgagttcatgcccagcaagggcagcgtgaccctgagcgagatcagactgcccctgaaggccgacttcgtgtgcagcaccgtgcagaagcccgacgccgccaactactactacctgatcatcctgaaggccggcgccgagaacatggtggccacccccctggccagcaccagcaacagcctgaacggcgacgccctgaccttcaccaccaccttcaccctgcaggacgtgagcaacgacttcgagatcaacatcgaggtgtacagcctggtgcagaagaaggaccccagcggcctggacaagaagaagaagaccagcaagagcaaggccatcacccccaagagactgctgaccagcatcaccaccaagagcaacatccacagcagcgtgatggccagccccggcggcctgagcgccgtgagaaccagcaacttcgccctggtgggcagctacaccctgagcctgagcagcgtgggcaacaccaagttcgtgctggacaaggtgcccttcctgagcagcctggagggccacatctacctgaagatcaagtgccaggtgaacagcagcgtggaggagagaggcttcctgaccatcttcgaggacgtgagcggcttcggcgcctggcacagaagatggtgcgtgctgagcggcaactgcatcagctactggacctaccccgacgacgagaagagaaagaaccccatcggcagaatcaacctggccaactgcaccagcagacagatcgagcccgccaacagagagttctgcgccagaagaaacaccttcgagctgatcaccgtgagaccccagagagaggacgacagagagaccctggtgagccagtgcagagacaccctgtgcgtgaccaagaactggctgagcgccgacaccaaggaggagagagacctgtggatgcagaagctgaaccaggtgctggtggacatcagactgtggcagcccgacgcctgctacaagcccatcggcaagccctag

SEQ ID NO: 103668 - DNA, 3264 bp, Artificial Sequence
  derived and/or modified sequence
atggatccattcactgaaaaattgctggaacgaactcgggccaggcgggagaacctgcagcgcaaaatggcagaacgtcctactgcagcgcccagaagtatgactcatgccaaacgcgcgcggcaacccctctccgaggctagtaaccagcagcctctgtccggaggagaagagaaatcctgcaccaagccatctcccagcaaaaagcggtgttcagataacactgaggtcgaagtgagcaatcttgaaaacaagcagcctgtggagtctacttccgcgaagtcgtgcagccccagtccagtcagtccgcaagtccagccacaggcagccgatacaattagcgactccgtcgccgtgcccgcatcattgttggggatgcgaagaggactcaacagcaggcttgaggccaccgccgcctccagtgttaaaacgaggatgcagaagcttgcggaacagagaaggcgatgggataatgacgatatgaccgatgatatacccgaaagcagcctcttttcccctatgccgtctgaggaaaaagcagccagtccgccaaggcccctattgtcgaacgcttctgcaactcccgtgggtcggcgtggcagactggctaacctggctgccaccatctgcagctgggaggacgatgtcaaccactccttcgctaagcaaaactccgtacaagaacagcccggtactgcctgtctatcaaaattttccagcgcatcaggagcctcagcccggataaacagttcttctgtgaagcaggaggcaaccttttgcagccagcgcgacggagacgccagcctcaacaaagcactgagttctagtgccgatgatgcaagtctggtgaatgcttctatcagtagctctgtcaaagctacgagtccagtaaagtccaccacctcaataacagacgccaagagctgcgagggacaaaacccagagctcctccccaaaacacctatctcgcccctgaaaaccggcgttagcaaacctatcgttaagtcaacattgtcacagactgtccccagtaagggtgagctctcccgagaaatatgccttcagtctcaatcaaaagataaatccaccacccccggagggaccgggatcaaacctttcttggagcgtttcggagaacgatgtcaggagcactccaaggagtcccccgccagatctactcctcacaggacccctatcattactccgaatactaaagctattcaggagaggctcttcaagcaggatacctccagcagcaccactcacctagctcagcagctcaaacaagagagacagaaagagctggcctgtctccggggtcgctttgataaggggaatatatggagtgccgaaaagggtggcaactcgaagtcaaagcagctggagaccaaacaagagacacattgccaaagcacccccctcaaaaagcaccagggagtgagtaagacccagtcgcttccagtgactgaaaaagtgacggaaaaccagattcccgccaagaacagctctaccgagcctaaagaagtgatacgagagatcgaaatgtctgttgatgacgacgacatcaattcttcaaaggtgataaatgatctcttctccgacgttctcgaagagggggagctagatatggaaaaatcccaagaagagatggaccaggccctggccgaatcgtctgaagagcaggaagacgccctaaacatttccagcatgagccttctggcgccgctggcccagaccgtgggagtcgtcagccctgagtctcttgtgagtacacctcgcttggagcttaaggacacatcgcggagcgacgagagcccaaagcccgggaagtttcagcgcacacgcgtacccagggccgaaagcggggacagcctcggcagcgaagatcgagatcttttgtattccatcgatgcttatcgctcccagcgctttaaagaaaccgagcgacccagtatcaagcaagtgatcgttagaaaggaggatgttacttctaaactagacgagaaaaacaatgcgttcccatgtcaagttaacattaagcagaagatgcaggagctgaataacgaaataaatatgcaacagaccgtgatttatcaggcctcccaggctctgaactgctgtgtagacgaggaacatggcaaaggctctctggaagaagcagaagcagagaggctgctgctgattgccaccggcaagcggaccttactgatcgatgaattgaacaagctcaaaaacgagggtccgcagcggaagaataaggcctccccacagagcgaatttatgcctagtaaagggagcgtaactctttctgagataagactgccactcaaagccgatttcgtgtgctctacagtgcagaaaccagatgctgctaattactactacctgatcatccttaaggcaggcgccgaaaatatggtcgctactccacttgcctcgacctcaaattccctgaacggggacgctttgaccttcaccacaaccttcacccttcaggacgtttctaatgacttcgagatcaacatagaggtctatagcctggtccagaaaaaggacccaagtggactcgacaagaaaaagaagacttcaaaatctaaagctataacccccaaaagactgctgacatctattaccacaaaatccaatattcatagcagcgtgatggcctctcctggcggcctctccgccgtccgcacaagcaatttcgcccttgtggggtcttacactctttctctgagttcagtggggaataccaagtttgtgctggataaggtgcctttcctgtcttcactggagggccacatttatctcaagattaaatgtcaggtgaactcaagtgtcgaggagcggggctttttaacgatcttcgaggacgtgtcagggtttggtgcatggcatcggcgctggtgtgttctgtccggtaattgtatcagctattggacatacccagatgacgagaaaaggaagaatccaattggaagaatcaatctggctaactgtacgagtaggcagatcgagcccgcaaaccgggagttctgtgctcggagaaacactttcgagctcattactgttaggcctcaacgcgaggacgacagagagaccctagtgagtcagtgccgagatactttatgtgtgactaagaactggctctccgctgataccaaagaggagagggatctttggatgcaaaaattaaatcaggtgctcgttgacataaggttatggcaaccagatgcctgttataagccaatcggcaaaccttag

SEQ ID NO: 103669 - DNA, 3264 bp, Artificial Sequence
  derived and/or modified sequence
atggaccccttcacagagaagctgctggagaggacccgggcccggcgggagaacctgcagaggaagatggccgagcggcccacagctgcccccaggtccatgacccacgccaagagggcccggcagcccctgtctgaggccagcaaccagcagcccctgagcggcggggaggagaagagctgcaccaagcccagccccagcaagaagcgctgcagcgacaacacagaggtggaggtgagcaacctggagaacaagcagcctgtggagagcaccagcgccaagagctgcagccccagccctgtgagcccccaggtgcagccccaggccgctgacaccatcagtgacagcgtggccgtgcctgccagcctgctgggcatgagaagaggcctgaacagccggctggaggccacagctgccagctctgtgaagaccaggatgcagaagctggccgagcagaggcggcgctgggacaatgatgacatgacagatgacatccctgagagcagcctcttcagccccatgcccagcgaggagaaggccgccagccccccccggcccctgctgagcaatgccagcgccacccctgtgggccggcggggccgcctggccaacctggccgccaccatctgctcctgggaggatgatgtgaaccacagctttgccaagcagaacagcgtgcaggagcagcccggcacagcctgcctgagcaagttcagcagcgccagcggggccagcgcccgcatcaacagcagctctgtgaagcaggaggccaccttctgcagccagagagatggagatgccagcctgaacaaggccctgagcagcagcgcagatgatgccagcctggtgaatgccagcatcagcagctctgtgaaggccaccagccctgtgaagagcaccaccagcatcacagatgccaagagctgtgagggccagaaccctgagctgctgcccaagacccccatcagccccctgaagacaggagtgtccaagcccatcgtgaagagcaccctgagccagacagtgcccagcaaaggagagctgagccgggagatctgcctgcagagccagagcaaggacaagagcaccaccccaggcggcaccggcatcaagcccttcctggagagatttggagagcgctgccaggagcacagcaaggagagccctgcccggagcaccccccacaggacccccatcatcacccccaacaccaaggccatccaggagcggctcttcaagcaggacaccagcagcagcaccacccacctggcccagcagctgaagcaggagcggcagaaggagctggcctgcctgcggggccgctttgacaagggcaacatctggagcgctgagaagggcggcaacagcaagagcaagcagctggagaccaagcaggagacccactgccagagcacccccctgaagaagcaccagggcgtgtccaagacccagagcctgcctgtgacagagaaggtgacagagaaccagatcccagccaagaacagcagcacagagcccaaggaggtgatccgggagattgagatgtctgtggatgatgatgacatcaacagcagcaaggtgatcaatgacctcttcagtgatgtgctggaggagggggagctggacatggagaagagccaggaggagatggaccaggccctggccgagagcagcgaggagcaggaggatgccctgaacatcagctccatgagcctgctggcccccctggcccagacagtgggcgtggtgtccccagagagcctggtgtccaccccccggctggagctgaaggacaccagcagaagtgatgagagccccaagccaggcaagttccagaggaccagggtgcccagggctgagagcggggacagcctgggcagcgaggaccgggacctgctgtacagcattgatgcctaccgcagccagcgcttcaaggagacagagcggcccagcatcaagcaggtgattgtgaggaaggaggatgtgaccagcaagctggatgagaagaacaatgccttcccctgccaggtgaacatcaagcagaagatgcaggagctgaacaatgagatcaacatgcagcagaccgtcatctaccaggccagccaggccctgaactgctgcgtggatgaggagcacggcaagggcagcctggaggaggccgaggccgagcggctgctgctgattgccaccgggaagaggaccctgctgattgatgagctgaacaagctgaagaatgaaggcccccagaggaagaacaaggccagcccccagagcgagttcatgcccagcaagggctctgtgaccctgtctgagatccggctgcccctgaaggctgactttgtgtgcagcacagtgcagaagccagatgctgccaactactactacctgatcatcctgaaggccggggctgagaacatggtggccacccccctggccagcaccagcaacagcctgaatggagatgccctgaccttcaccaccaccttcaccctgcaggatgtgtccaatgactttgagatcaacatcgaggtgtacagcctggtgcagaagaaggaccccagcggcctggacaagaagaagaagaccagcaagagcaaggccatcacccccaagaggctgctgaccagcatcaccaccaagagcaacatccacagctctgtgatggccagccctgggggcctgtctgctgtgaggaccagcaactttgccctggtgggcagctacaccctgagcctgagctctgtgggcaacaccaagtttgtgctggacaaggtgcccttcctgagcagcctggagggccacatctacctgaagatcaagtgccaggtgaacagctctgtggaggagcggggcttcctgaccatctttgaagatgtgtctggctttggagcctggcaccggcgctggtgtgtgctgagcggcaactgcatctcctactggacctacccagatgatgagaagaggaagaaccccatcggccgcatcaacctggccaactgcaccagccggcagattgaaccagccaaccgggagttctgtgcccggaggaacacctttgagctgatcaccgtgcggccccagagagaagatgaccgggagaccctggtgtcccagtgccgggacaccctgtgtgtgaccaagaactggctgtctgctgacaccaaggaggagcgggacctgtggatgcagaagctgaaccaggtgctggtggacatccggctgtggcagccagatgcctgctacaagcccatcggcaagccctag

SEQ ID NO: 103670 - DNA, 4661 bp, Artificial Sequence
  derived and/or modified sequence
ggctcggcgctgaaattcaaatttgaacggctgcagaggccgagtccgtcactggaagccgagaggagaggacagctggttgtgggagagttcccccgcctcagactcctggttttttccaggagacacactgagctgagactcacttttctcttcctgaatttgaaccaccgtttccatcgtctcgtagtccgacgcctggggcgatggatccgtttacggagaaactgctggagcgaacccgtgccaggcgagagaatcttcagagaaaaatggctgagaggcccacagcagctccaaggtctatgactcatgctaagcgagctagacagccactttcagaagcaagtaaccagcagcccctctctggtggtgaagagaaatcttgtacaaaaccatcgccatcaaaaaaacgctgttctgacaacactgaagtagaagtttctaacttggaaaataaacaaccagttgagtcgacatctgcaaaatcttgttctccaagtcctgtgtctcctcaggtgcagccacaagcagcagataccatcagtgattctgttgctgtcccggcatcactgctgggcatgaggagagggctgaactcaagattggaagcaactgcagcctcctcagttaaaacacgtatgcaaaaacttgcagagcaacggcgccgttgggataatgatgatatgacagatgacattcctgaaagctcactcttctcaccaatgccatcagaggaaaaggctgcttcccctcccagacctctgctttcaaatgcctcggcaactccagttggcagaaggggccgtctggccaatcttgctgcaactatttgctcctgggaagatgatgtaaatcactcatttgcaaaacaaaacagtgtacaagaacagcctggtaccgcttgtttatccaaattttcctctgcaagtggagcatctgctaggatcaatagcagcagtgttaagcaggaagctacattctgttcccaaagggatggcgatgcctctttgaataaagccctatcctcaagtgctgatgatgcgtctttggttaatgcctcaatttccagctctgtgaaagctacttctccagtgaaatctactacatctatcactgatgctaaaagttgtgagggacaaaatcctgagctacttccaaaaactcctattagtcctctgaaaacgggggtatcgaaaccaattgtgaagtcaactttatcccagacagttccatccaagggagaattaagtagagaaatttgtctgcaatctcaatctaaagacaaatctacgacaccaggaggaacaggaattaagcctttcctggaacgctttggagagcgttgtcaagaacatagcaaagaaagtccagctcgtagcacaccccacagaacccccattattactccaaatacaaaggccatccaagaaagattattcaagcaagacacatcttcatctactacccatttagcacaacagctcaagcaggaacgtcaaaaagaactagcatgtcttcgtggccgatttgacaagggcaatatatggagtgcagaaaaaggcggaaactcaaaaagcaaacaactagaaaccaaacaggaaactcactgtcagagcactcccctcaaaaaacaccaaggtgtttcaaaaactcagtcacttccagtaacagaaaaggtgaccgaaaaccagataccagccaaaaattctagtacagaacctaaagaagtgatacgtgaaattgagatgagtgtggatgatgatgatatcaatagttcgaaagtaattaatgacctcttcagtgatgtcctagaggaaggtgaactagatatggagaagagccaagaggagatggatcaagcattagcagaaagcagcgaagaacaggaagatgcactgaatatctcctcaatgtctttacttgcaccattggcacaaacagttggtgtggtaagtccagagagtttagtgtccacacctagactggaattgaaagacaccagcagaagtgatgaaagtccaaaaccaggaaaattccaaagaactcgtgtccctcgagctgaatctggtgatagccttggttctgaagatcgtgatcttctttacagcattgatgcatatagatctcaaagattcaaagaaacagaacgtccatcaataaagcaggtgattgttcggaaggaagatgttacttcaaaactggatgaaaaaaataatgcctttccttgtcaagttaatatcaaacagaaaatgcaggaactcaataacgaaataaatatgcaacagacagtgatctatcaagctagccaggctcttaactgctgtgttgatgaagaacatggaaaagggtccctagaagaagctgaagcagaaagacttcttctaattgcaactgggaagagaacacttttgattgatgaattgaataaattgaagaacgaaggacctcagaggaagaataaggctagtccccaaagtgaatttatgccatccaaaggatcagttactttgtcagaaatccgcttgcctctaaaagcagattttgtctgcagtacggttcagaaaccagatgcagcaaattactattacttaattatactaaaagcaggagctgaaaatatggtagccacaccattagcaagtacttcaaactctcttaacggtgatgctctgacattcactactacatttactctgcaagatgtatccaatgactttgaaataaatattgaagtttacagcttggtgcaaaagaaagatccctcaggccttgataagaagaaaaaaacatccaagtccaaggctattactccaaagcgactcctcacatctataaccacaaaaagcaacattcattcttcagtcatggccagtccaggaggtcttagtgctgtgcgaaccagcaacttcgcccttgttggatcttacacattatcattgtcttcagtaggaaatactaagtttgttctggacaaggtcccctttttatcttctttggaaggtcatatttatttaaaaataaaatgtcaagtgaattccagtgttgaagaaagaggttttctaaccatatttgaagatgttagtggttttggtgcctggcatcgaagatggtgtgttctttctggaaactgtatatcttattggacttatccagatgatgagaaacgcaagaatcccataggaaggataaatctggctaattgtaccagtcgtcagatagaaccagccaacagagaattttgtgcaagacgcaacacttttgaattaattactgtccgaccacaaagagaagatgaccgagagactcttgtcagccaatgcagggacacactctgtgttaccaagaactggctgtctgcagatactaaagaagagcgggatctctggatgcaaaaactcaatcaagttcttgttgatattcgcctctggcaacctgatgcttgctacaaacctattggaaagccttaaaccgggaaatttccatgctatctagaggtttttgatgtcatcttaagaaacacacttaagagcatcagatttactgattgcattttatgctttaagtacgaaagggtttgtgccaatattcactacgtattatgcagtatttatatcttttgtatgtaaaactttaactgatttctgtcattcatcaatgagtagaagtaaatacattatagttgattttgctaaatcttaatttaaaagcctcattttcctagaaatctaattattcagttattcatgacaatatttttttaaaagtaagaaattctgagttgtcttcttggagctgtaggtcttgaagcagcaacgtctttcaggggttggagacagaaacccattctccaatctcagtagttttttcgaaaggctgtgatcatttattgatcgtgatatgacttgttactagggtactgaaaaaaatgtctaaggcctttacagaaacatttttagtaatgaggatgagaactttttcaaatagcaaatatatattggcttaaagcatgaggctgtcttcagaaaagtgatgtggacataggaggcaatgtgtgagacttgggggttcaatattttatatagaagagttaataagcacatggtttacatttactcagctactatatatgcagtgtggtgcacattttcacagaattctggcttcattaagatcattatttttgctgcgtagcttacagacttagcatattagttttttctactcctacaagtgtaaattgaaaaatctttatattaaaaaagtaaactgttatgaagctgctatgtactaataatactttgcttgccaaagtgtttgggttttgttgttgtttgtttgtttgtttgtttttggttcatgaacaacagtgtctagaaacccattttgaaagtggaaaattattaagtcacctatcacctttaaacgcctttttttaaaattataaaatattgtaaagcagggtctcaacttttaaatacactttgaacttcttctctgaattattaaagttctttatgacctcatttataaacactaaattctgtcacctcctgtcattttattttttattcattcaaatgtattttttcttgtgcatattataaaaatatattttatgagctcttactcaaataaatacctgtaaatgtctaaaggaa

SEQ ID NO: 103671 - DNA, 3264 bp, Artificial Sequence
  derived and/or modified sequence
atggaccccttcaccgagaagctgctggagcggacccgggcccggagggaaaatctccagaggaaaatggccgagcgccccactgctgccccacggagcatgacgcatgccaagcgggcacgccaacccctgtctgaggcgtctaatcagcaacccctctctggaggcgaggaaaagtcatgcaccaagcctagcccctccaagaagcggtgttctgataacaccgaagtggaggtatccaacctggagaataagcagcctgttgaatcaacaagcgctaaatcttgttcaccttcacccgtgtcaccacaagtacagccccaggcagcggacaccatctcagattctgtggccgtccctgcgagtctcctgggaatgaggcgtggtctgaactctcgcttagaagctactgccgccagctccgtcaagacccggatgcaaaaactggctgagcagcgacggcgctgggataacgatgacatgacggacgatatccctgaatccagcctatttagcccaatgccctctgaagagaaagccgcatcacctccccgcccacttttgtccaatgcatccgccacaccagttggcaggaggggccggttggccaaccttgcggccacaatttgctcttgggaggatgacgtcaaccatagctttgcaaaacagaacagtgttcaggaacagcctgggactgcttgcctctcaaagttcagttctgcatctggggcctctgcaagaattaattccagttccgtaaaacaggaggctacattctgcagtcagagggacggtgacgccagccttaacaaggccttatcatcatcagccgacgacgcatctttggtgaacgcaagtatttcctccagcgtcaaggcaacctcaccggtgaagtcgactactagcataacagacgccaagtcctgcgaggggcagaatcctgagctgctacctaaaacgccgattagccccttgaagacaggagtgtccaaacctattgtgaagtccacattgtcccaaacagtgccttccaagggtgaactgtctcgagaaatctgcttacaatctcagtccaaggacaagagcacaacaccagggggaactggcatcaagccattcctggagcgatttggtgaaaggtgccaggaacactcaaaagaatctccggcaaggagtacgcctcatcggaccccaattatcactcctaataccaaggctatccaggagagactgtttaagcaagataccagttcctcaacgacacatctggcccagcagctgaaacaagagagacagaaggaactggcttgtcttagaggacgatttgacaaggggaatatatggagtgccgagaaagggggaaacagcaagtctaagcagctcgaaacaaagcaggagacacactgccagtctaccccgttgaagaaacatcagggtgtgtcgaaaacccagagcctgccagtaaccgagaaggtgactgagaatcaaatcccagccaaaaactccagtaccgagccaaaagaagttatccgcgaaatcgagatgtctgtggacgacgatgacatcaactcatccaaagtgattaatgatttgttctcagatgtcctggaagaaggcgaactcgatatggagaagagccaggaagaaatggaccaggcgcttgccgagtcttctgaggaacaagaggatgcactgaacatctcctctatgagccttcttgctcctctggcgcagactgttggcgtcgtatccccagaaagcctcgttagtacaccaagactggagctcaaggacactagtcgttctgatgagtcacccaaacctggcaagttccagcgcaccagggtgccgagagccgagagtggcgactccctgggaagtgaagaccgcgatctattatattccatcgacgcttaccggtctcagcgatttaaggagacagaaagaccttctatcaagcaggtgatcgtccgcaaggaagacgtcacatccaaactggacgagaagaataacgcgtttccgtgccaagttaatattaagcagaagatgcaggagctgaataacgagattaatatgcagcagacagtgatttaccaggcatctcaggcgctcaattgctgtgtagacgaggagcatggcaaaggcagcctggaggaggcagaggccgagcgtctgctcctgattgctaccggcaaacgtaccttactgatcgacgagctgaataagctgaaaaatgagggcccccagagaaagaacaaggcctccccccagagtgagtttatgcccagtaaaggctcggtaacactttcggaaattcgactccctctcaaagcagactttgtttgctcaactgtgcagaaacctgacgcagcaaattactactatcttatcatcctgaaggccggggcagaaaacatggtggctacccctctcgccagtacttctaattcgcttaacggagacgcactcacgttcactaccactttcaccctgcaagacgtgagcaatgatttcgagattaacatcgaagtctacagcctggtgcaaaagaaggacccctctggcctagataagaaaaaaaagaccagtaagtccaaagccatcaccccaaagaggcttctcacctcaatcacaaccaaatccaatatacactcttcagtcatggcttcccctggcggcctgagcgcagttagaaccagcaattttgccctcgtgggatcctataccctctcactgtcatctgttggcaataccaaatttgttctggataaggtcccgttcctgtctagcctcgaaggccacatatatctaaagatcaaatgtcaagttaactccagcgtcgaggaacggggattcctaactatcttcgaagacgtgtccggtttcggggcttggcataggcgatggtgcgttctctcaggaaattgcattagttactggacataccccgatgacgagaagcgcaaaaaccccataggtagaattaatttagcgaattgtacctcccggcagatagagcctgctaacagagaattttgcgcgagaagaaacaccttcgagttgatcaccgtccgcccacagagagaggacgacagagaaacactggtttcacagtgtcgagatacactttgcgtgacgaaaaactggctgtctgcggataccaaggaagaacgggatctgtggatgcagaaactgaaccaagtgctggtggatatccgtctctggcagcccgacgcctgttataagcccatcggtaagccttag

SEQ ID NO: 103672 - DNA, 3264 bp, Artificial Sequence
  derived and/or modified sequence
atggacccattcacagaaaaattgttggaaagaacacgcgctcgccgtgaaaatctacagaggaagatggccgagaggcctaccgctgcccctcgtagcatgacccatgctaaacgtgcgagacagccattgagcgaggctagcaatcagcaaccactgagtggaggtgaggaaaagagctgcacaaagcctagcccgagtaagaagaggtgctcggataacaccgaagtagaagtgagcaatctggagaataaacagcctgtggagtccaccagcgctaagtcatgcagccctagcccggtgtcgccacaggtgcagccccaagccgctgatacaatctccgattccgtcgcggtccctgctagcctgctcggaatgcgacgtggccttaactcaaggctggaggccacagcagccagcagcgtcaagactcggatgcaaaaattggccgaacagcgccgacgctgggataacgatgacatgacggatgatatcccagagtcctccctctttagtcccatgcctagcgaagagaaggctgcctctcctccccgtccgctattgagtaatgcgagcgccactcctgtcggcaggagggggcgtctcgcgaatctggccgcaacaatctgttcatgggaggacgatgttaatcatagcttcgctaagcagaactcagttcaggagcagcctggtaccgcctgtctgagcaaattcagctctgcctccggagcctctgcaaggattaattcaagctccgtgaagcaggaggccaccttttgtagccagcgcgacggcgatgcctctctgaacaaggccttgtcctcgagcgcggatgatgcatctctggtgaacgccagcattagtagttctgtgaaggcgacctctccagtgaagtccaccacctcaatcaccgacgccaagtcttgcgaagggcagaatcccgagctgcttcccaagacaccaatttctcccttaaagacaggtgtctcaaagccaatcgttaagagcaccctcagccaaactgtccctagcaaaggggagctgtccagggagatttgtctgcagagccagtccaaggataagagcacaacaccagggggaacaggcattaaacccttcttagagcgctttggagaacgatgccaagaacactcaaaggagtctcccgcaaggtccaccccacacagaacccccataattacacccaacacaaaagctattcaggaacggttatttaaacaggatacctcttctagtacaacccatctggctcagcagcttaagcaagagaggcaaaaagagctggcttgtttgcgtggacggttcgacaaggggaatatctggagtgccgagaaagggggaaactccaagagcaagcagctcgaaaccaagcaggaaacgcactgccagagtacccctcttaagaagcatcagggcgtgagtaaaacccagagcctcccagtgactgagaaggtcaccgaaaatcaaattccggcaaaaaacagttcaactgaacccaaggaagtgatacgggagattgagatgtcagtggatgacgatgacattaacagcagtaaggtcatcaacgacctgttttcagacgtgctagaggaaggagagttggatatggaaaaatctcaggaggagatggaccaggccttagcggaatcatccgaagagcaggaagacgcactgaacatctcgtctatgagtctgctcgccccactcgcgcagaccgttggcgttgtgagccctgagagcctagtgtctacaccccgacttgaattgaaggacacgtcgagatcagacgagtcacccaagcctggtaagtttcagcggaccagggtgccgagagccgagagtggagattctctcgggtctgaagaccgtgacctactctactctattgatgcgtataggagccagcggttcaaagaaacagagagaccaagtatcaaacaggtcatagtccgcaaggaggacgtgacatccaagctagacgaaaagaataatgccttcccttgtcaggtgaatattaagcagaaaatgcaggagctgaacaatgagatcaacatgcaacaaacggttatctaccaggcgagccaggcactgaattgctgcgtggatgaagaacacgggaaaggcagcttagaagaggcggaagctgagaggctgctattgatcgccaccggcaaacgcacactgctgattgatgagctaaataaattgaaaaacgagggtccacagcgaaagaacaaagcttccccacaatccgagtttatgccatctaaggggtccgtgaccctttccgagatccgcctgcctctgaaagcagacttcgtgtgtagcacagttcaaaaacctgatgcagccaattactattacctaatcatcctaaaagctggggcagagaacatggttgctacaccgttggcaagcacctccaacagcctgaacggagacgctctgaccttcaccaccacattcaccctgcaggatgtttctaacgacttcgaaatcaacatcgaagtctactccctggttcaaaagaaagatccatccggattagataagaagaaaaagacgtccaagtcaaaggctattacccctaagcggctgctgaccagcatcaccacaaaatccaacatccattcctctgttatggcttcgccgggtggcctgtccgcagtgagaacgagcaattttgctctggttggttcttatacgttgagcttaagctctgtgggaaatacgaagttcgtgctagacaaagtgccgttcctgtcgtctctggagggacacatctatctgaagatcaagtgtcaggtaaactcaagcgttgaagagagaggcttcctgacaatatttgaggacgtcagcggtttcggagcatggcaccgccgttggtgcgtcctgagcggtaactgtatctcttactggacatacccagatgatgagaaaaggaagaatccaatcggcaggattaacctggccaactgtacatcgagacagatagagccagcgaacagagagttctgtgctagacggaacacgttcgagctcattacagtgcgccctcaaagggaggatgatagagaaacattggtgagccagtgcagggataccctgtgtgtcaccaagaactggctgtctgctgatacaaaagaagagcgagacctgtggatgcagaaactgaaccaggtcctggtggatatccgcctgtggcagcccgatgcgtgctacaagcccataggaaaaccatag

SEQ ID NO: 103673 - protein, 439 aa, Artificial Sequence
  derived and/or modified sequence
MASDGARKQFWKRSNSKLPGSLLRSTAKMPTTPVKAKRVSTFQEFESNTSDAWDAGEDDDELLAMAAESLNSEVVMETANRVLRNHSQRQGRPTLQEGPGLQQKPRPEAEPPSPPSGDLRLVKSVSESHTSCPAEELRRLSWSGIPKPVRPMTWKLLSGYLPANVDRRPATLQRKQKEYFAFIEHYYDSRNDEVHQDTYRQIHIDIPRMSPEALILQPKVTEIFERILFIWAIRHPASGYVQGINDLVTPFFVVFICEYIEAEEVDTVDVSGVPAEVLCNIEADTYWCMSKLLDGIQDNYTFAQPGIQMKVKMLEELVSRIDEQVHRHLDQHEVRYLQFAFRWMNNLLMREVPLRCTIRLWDTYQSEPDGFSHFHLYVCAAFLVRWRKEILEEKDFQELLLFLQNLPTAHWDDEDISLLLAEAYRLKFAFADAPNHYKK

SEQ ID NO: 103674 - DNA, 1320 bp, Artificial Sequence
  derived and/or modified sequence
atggccagcgacggcgccagaaagcagttctggaagagaagcaacagcaagctgcccggcagcctgctgagaagcaccgccaagatgcccaccacccccgtgaaggccaagagagtgagcaccttccaggagttcgagagcaacaccagcgacgcctgggacgccggcgaggacgacgacgagctgctggccatggccgccgagagcctgaacagcgaggtggtgatggagaccgccaacagagtgctgagaaaccacagccagagacagggcagacccaccctgcaggagggccccggcctgcagcagaagcccagacccgaggccgagccccccagcccccccagcggcgacctgagactggtgaagagcgtgagcgagagccacaccagctgccccgccgaggagctgagaagactgagctggagcggcatccccaagcccgtgagacccatgacctggaagctgctgagcggctacctgcccgccaacgtggacagaagacccgccaccctgcagagaaagcagaaggagtacttcgccttcatcgagcactactacgacagcagaaacgacgaggtgcaccaggacacctacagacagatccacatcgacatccccagaatgagccccgaggccctgatcctgcagcccaaggtgaccgagatcttcgagagaatcctgttcatctgggccatcagacaccccgccagcggctacgtgcagggcatcaacgacctggtgacccccttcttcgtggtgttcatctgcgagtacatcgaggccgaggaggtggacaccgtggacgtgagcggcgtgcccgccgaggtgctgtgcaacatcgaggccgacacctactggtgcatgagcaagctgctggacggcatccaggacaactacaccttcgcccagcccggcatccagatgaaggtgaagatgctggaggagctggtgagcagaatcgacgagcaggtgcacagacacctggaccagcacgaggtgagatacctgcagttcgccttcagatggatgaacaacctgctgatgagagaggtgcccctgagatgcaccatcagactgtgggacacctaccagagcgagcccgacggcttcagccacttccacctgtacgtgtgcgccgccttcctggtgagatggagaaaggagatcctggaggagaaggacttccaggagctgctgctgttcctgcagaacctgcccaccgcccactgggacgacgaggacatcagcctgctgctggccgaggcctacagactgaagttcgccttcgccgacgcccccaaccactacaagaagtag

SEQ ID NO: 103675 - DNA, 1377 bp, Artificial Sequence
  derived and/or modified sequence
atggccagcgacggcgccagaaagcagttctggaagagaagcaacagcaagctgcccggcagcatccagcacgtgtacggcgcccagcacccccccttcgaccccctgctgcacggcaccctgctgagaagcaccgccaagatgcccaccacccccgtgaaggccaagagagtgagcaccttccaggagttcgagagcaacaccagcgacgcctgggacgccggcgaggacgacgacgagctgctggccatggccgccgagagcctgaacagcgaggtggtgatggagaccgccaacagagtgctgagaaaccacagccagagacagggcagacccaccctgcaggagggccccggcctgcagcagaagcccagacccgaggccgagccccccagcccccccagcggcgacctgagactggtgaagagcgtgagcgagagccacaccagctgccccgccgaggagctgagaagactgagctggagcggcatccccaagcccgtgagacccatgacctggaagctgctgagcggctacctgcccgccaacgtggacagaagacccgccaccctgcagagaaagcagaaggagtacttcgccttcatcgagcactactacgacagcagaaacgacgaggtgcaccaggacacctacagacagatccacatcgacatccccagaatgagccccgaggccctgatcctgcagcccaaggtgaccgagatcttcgagagaatcctgttcatctgggccatcagacaccccgccagcggctacgtgcagggcatcaacgacctggtgacccccttcttcgtggtgttcatctgcgagtacatcgaggccgaggaggtggacaccgtggacgtgagcggcgtgcccgccgaggtgctgtgcaacatcgaggccgacacctactggtgcatgagcaagctgctggacggcatccaggacaactacaccttcgcccagcccggcatccagatgaaggtgaagatgctggaggagctggtgagcagaatcgacgagcaggtgcacagacacctggaccagcacgaggtgagatacctgcagttcgccttcagatggatgaacaacctgctgatgagagaggtgcccctgagatgcaccatcagactgtgggacacctaccagagcgagcccgacggcttcagccacttccacctgtacgtgtgcgccgccttcctggtgagatggagaaaggagatcctggaggagaaggacttccaggagctgctgctgttcctgcagaacctgcccaccgcccactgggacgacgaggacatcagcctgctgctggccgaggcctacagactgaagttcgccttcgccgacgcccccaaccactacaagaagtag

SEQ ID NO: 103676 - DNA, 1320 bp, Artificial Sequence
  derived and/or modified sequence
atggcaagtgatggcgccaggaagcagttctggaaaaggtctaactcaaaactgccagggagtctactccgttctactgcgaaaatgcccaccaccccggttaaggcaaagagagtctctaccttccaagaatttgaatccaatactagcgacgcctgggacgcaggcgaggacgatgatgaattactggctatggccgcagaaagcctcaattcggaggtcgttatggagactgccaatcgcgttctgaggaatcactcacagcgtcagggtcggcctaccctacaggaagggcccggactgcaacagaagccgcggcctgaagccgagcccccctcacctccctcaggcgacctgaggctcgtgaaatctgtgtccgagagtcatactagctgtcccgccgaggaactgagacgcttatcctggtcaggtataccaaaacccgtacgccctatgacctggaaactactctccggctatctccctgcgaacgtcgatcgaaggccggccaccttacagcggaaacagaaggagtactttgcgttcatcgagcactactatgattcccgcaacgatgaagtccatcaagacacttataggcagattcacatcgacatccccagaatgagccccgaggctctgatattgcagcctaaggtgactgaaatttttgagcgaatcctgtttatttgggccatccgccaccccgctagtggttatgtgcagggcattaacgatctggtgactccttttttcgttgtgttcatctgtgagtacatagaagccgaggaagtggacactgtggatgtctctggggtacccgccgaggtcctctgtaatattgaagccgacacctattggtgcatgagtaagttgctcgacggaatccaggacaattatacgtttgcacagcctggtattcagatgaaggtcaagatgctagaggagctggtctcacgcattgacgaacaggttcacaggcacctcgatcagcatgaggtacggtacctgcagttcgcgttccgttggatgaacaacctgctgatgcgagaggtacccctgcgctgtaccattcgcttgtgggacacataccagagcgagccagacggctttagccacttccatctgtatgtgtgcgctgctttcctggtgcgctggcgtaaggagattttggaagaaaaagacttccaagaactgcttctctttctgcagaatctgcctacagcccattgggatgatgaggatatatcgctcctgttggcggaggcttaccgcctcaagtttgcgttcgctgatgctccgaatcactacaagaagtag

SEQ ID NO: 103677 - DNA, 1377 bp, Artificial Sequence
  derived and/or modified sequence
atggcatccgacggggcacggaagcagttctggaagaggagtaacagcaaactgcctggctctatccagcacgtgtatggagcccagcacccgcctttcgatcccctgctgcacggcacactactacgaagcacggccaagatgcctactactccagttaaggccaagcgggtgagcacctttcaggaatttgagtccaatacatcggatgcatgggatgctggggaagacgacgatgaattgctcgcaatggcggccgaaagcctgaattccgaggtggtgatggaaaccgctaatcgcgtgttgcgcaaccactcccagcgccagggtcgaccgacattacaggaagggcccggcctgcaacagaagccaaggcctgaggccgagccaccatccccgcctagcggagatcttagactggtaaaaagcgtttctgagagtcatacgtcctgtcccgccgaggaattgcggcggctttcctggagcggaattcctaagcccgtccggcctatgacctggaaactactttccggctatctacccgccaacgtggacagacgccccgctacgctgcaacgaaagcaaaaggagtacttcgctttcatcgagcattactacgactccaggaatgatgaagtgcaccaggatacttacagacaaatccacattgatattccgagaatgtctccagaagcactcattctacagcccaaagtaaccgaaattttcgagcgcatcctgtttatttgggccattcgtcatccagcctcaggttacgtgcaaggtattaacgaccttgtcacccctttctttgtggtatttatatgtgagtatattgaagcggaggaggttgatactgtcgacgtgagcggggtccctgcagaggtattatgtaacatagaagcagatacctactggtgcatgagtaaactcctcgacgggatccaggacaactatacgttcgctcagcctgggatccagatgaaggtgaagatgctggaagagctggtgtcacgaatcgacgagcaggtgcacaggcacctggaccagcacgaggtgagatacctgcagttcgcatttagatggatgaacaacctgctgatgcgcgaggttccgctgaggtgtactataagactgtgggatacgtaccaatcggagcccgatggctttagtcattttcatttgtacgtgtgtgccgcatttctcgttcgatggcgaaaggagattctggaagaaaaagacttccaggagcttctgctcttccttcagaacctccctactgcccactgggacgatgaggacatcagccttttgctggccgaagcctatcgcctgaaatttgcctttgctgacgcgccaaatcactacaaaaagtag

SEQ ID NO: 103678 - DNA, 1320 bp, Artificial Sequence
  derived and/or modified sequence
atggccagtgatggagccaggaagcagttctggaagaggagcaacagcaagctgcccggcagcctgctgcggagcacagccaagatgcccaccacccctgtgaaggccaagagggtgtccaccttccaggagtttgagagcaacaccagtgatgcctgggatgctggagaagatgatgatgagctgctggccatggctgctgagagcctgaacagcgaggtggtgatggagacagccaacagagtgctgaggaaccacagccagaggcagggccggcccaccctgcaggagggccctggcctgcagcagaagcccaggcctgaggccgagccccccagcccccccagcggggacctgcggctggtgaagtctgtgtctgagagccacaccagctgcccagctgaggagctgcggcggctgtcctggagcggcatccccaagcctgtgcggcccatgacctggaagctgctgagcggctacctgcctgccaacgtggacagaagacctgccaccctgcagaggaagcagaaggagtactttgccttcatcgagcactactatgacagcagaaatgatgaggtgcaccaggacacctaccggcagatccacatcgacatccccaggatgagccctgaggccctgatcctgcagcccaaggtgacagagatctttgagcgcatcctcttcatctgggccatccgccacccagccagcggctacgtgcagggcatcaatgacctggtgacccccttctttgtggtgttcatctgtgagtacatcgaggccgaggaggtggacacagtggatgtgtctggagtgcctgctgaggtgctgtgcaacattgaagctgacacctactggtgcatgagcaagctgctggatggcatccaggacaactacacctttgcccagcccggcatccagatgaaggtgaagatgctggaggagctggtgtccagaattgatgagcaggtgcaccgccacctggaccagcacgaggtgcgctacctgcagtttgccttccgctggatgaacaacctgctgatgagggaggtgcccctgcgctgcaccatccggctgtgggacacctaccagagcgagccagatggcttcagccacttccacctgtatgtgtgtgccgccttcctggtgcgctggaggaaggagatcctggaggagaaggacttccaggagctgctgctcttcctgcagaacctgcccacagcccactgggatgatgaggacatcagcctgctgctggccgaggcctaccgcctgaagtttgcctttgctgatgcccccaaccactacaagaagtag

SEQ ID NO: 103679 - DNA, 1377 bp, Artificial Sequence
  derived and/or modified sequence
atggccagtgatggagccaggaagcagttctggaagaggagcaacagcaagctgcccggcagcatccagcacgtgtatggagcccagcaccccccatttgaccccctgctgcacggcaccctgctgcggagcacagccaagatgcccaccacccctgtgaaggccaagagggtgtccaccttccaggagtttgagagcaacaccagtgatgcctgggatgctggggaggatgatgatgagctgctggccatggctgctgagagcctgaacagcgaggtggtgatggagacagccaacagagtgctgaggaaccacagccagaggcagggccggcccaccctgcaggagggccctggcctgcagcagaagcccaggcctgaggccgagccccccagccccccatctggggacctgcggctggtgaagtctgtgtctgagagccacaccagctgcccagctgaggagctgcggcggctgtcctggagcggcatccccaagcctgtgcggcccatgacctggaagctgctgagcggctacctgcctgccaacgtggaccggcggcctgccaccctgcagaggaagcagaaggagtactttgccttcatcgagcactactatgacagcagaaatgatgaggtgcaccaggacacctaccggcagatccacatcgacatccccaggatgagccctgaggccctgatcctgcagcccaaggtgacagagatctttgagcgcatcctcttcatctgggccatccgccacccagccagcggctacgtgcagggcatcaatgacctggtgacccccttctttgtggtgttcatctgtgagtacattgaagctgaggaggtggacacagtggatgtgtctggagtgcctgctgaggtgctgtgcaacatcgaggccgacacctactggtgcatgagcaagctgctggatggcatccaggacaactacacctttgcccagcccggcatccagatgaaggtgaagatgctggaggagctggtgtccagaattgatgagcaggtgcaccgccacctggaccagcacgaggtgcgctacctgcagtttgccttccgctggatgaacaacctgctgatgagggaggtgcccctgcgctgcaccatccggctgtgggacacctaccagagcgagccagatggcttcagccacttccacctgtatgtgtgtgccgccttcctggtgcgctggaggaaggagatcctggaggagaaggacttccaggagctgctgctcttcctgcagaacctgcccacagcccactgggatgatgaggacatcagcctgctgctggccgaggcctaccgcctgaagtttgcctttgctgatgcccccaaccactacaagaagtag

SEQ ID NO: 103680 - DNA, 1320 bp, Artificial Sequence
  derived and/or modified sequence
atggccagcgacggcgcccggaagcagttctggaagcggagcaactccaagcttcctggcagtctgctacgctcaaccgcaaagatgcccacgacccctgttaaagctaaacgagtttccacgttccaggaatttgaaagcaacacgagtgacgcttgggatgcaggagaggacgatgatgaactcctggcaatggccgccgaaagccttaacagcgaggtggtcatggaaacagccaacagagtgttgcgcaaccatagtcaacgccagggtcgtcctaccctgcaggaaggtcctggactacagcaaaagccgcggccggaagcagagccgccttctcccccgtcgggcgaccttcgcttagttaagtctgttagcgagtcacatactagctgcccggctgaggagctgcgaagactgtcatggtcaggcattcccaagcctgtgcggcctatgacatggaaattgttatccggatatctgcctgcgaatgtcgaccgccggcctgcgacccttcagcgcaaacagaaggagtactttgcattcatcgagcactattatgactctcgaaacgatgaggtgcatcaggacacctaccgccagatccacattgacatccctaggatgtcccctgaagcgcttatcttgcaaccgaaagttactgagatattcgagcgtattctcttcatttgggccatcaggcacccagccagcggatacgtgcagggcattaatgatcttgtgaccccgttctttgtcgtctttatttgtgagtacattgaggccgaagaagtggacaccgtcgacgtttccggcgtgccggcggaggtcctatgcaacattgaagcagacacctattggtgcatgtcaaaactgttggacggtatccaggacaattacaccttcgcacaaccaggtattcagatgaaggtgaagatgctggaggaactcgttagtagaattgatgaacaagttcacaggcacctggatcagcacgaggtgcggtatttgcaatttgccttccggtggatgaacaacttgctaatgcgcgaggtccccctgcgctgtacgatcagactttgggatacataccagtcggaaccggacggattcagccactttcatctgtatgtgtgcgccgcgttcttggtccgatggagaaaagagattctggaagagaaagatttccaggaacttctgctgtttctccagaatttacccacagctcactgggatgacgaagatatctcattgctattggctgaggcataccgactcaaatttgcgttcgccgatgcccctaatcactataaaaagtag

SEQ ID NO: 103681 - DNA, 1377 bp, Artificial Sequence
  derived and/or modified sequence
atggccagcgacggcgcccggaagcagttctggaagcggagcaacagcaagctaccgggatctatacagcatgtgtatggcgcccaacaccccccctttgatcctctacttcacggaaccctgttacgcagtacagccaaaatgcccactacacctgtgaaggcaaagagagtgtcaaccttccaggaattcgagtcaaacacctccgatgcatgggacgcaggagaggacgacgacgagttactggctatggccgccgagagtctaaacagtgaagtcgtgatggaaacggccaaccgggtcctgcgtaatcatagtcaaaggcagggcagaccgacgctccaggagggccccggattgcagcaaaagcccagacctgaggcagaacccccatcaccacctagcggcgacctgcgtctggtaaaatctgtgtcggagtcacacacatcttgccctgcagaggagttgagaagactgagctggagtggtatcccgaagccagtgaggccaatgacatggaagttgctcagtggttacctaccagctaacgtcgaccggagacctgccaccttgcagcggaaacagaaggagtatttcgcatttattgaacactattatgattcgagaaatgacgaggtacatcaggatacctataggcaaatccacattgacatcccgaggatgtcccctgaggccctcattttgcagcccaaagtaacggaaatctttgaacggatcttgttcatctgggcaattagacacccggccagcggttacgtgcaggggatcaacgatctcgtgactccttttttcgtagtatttatctgcgagtatatcgaggcggaagaggtggatactgtggatgttagcggggtccctgccgaggtactctgtaacatcgaagcggatacgtactggtgtatgtctaaattgcttgacggtatccaggataattatacatttgcccagcctgggattcagatgaaagtgaagatgttggaggaacttgtgagccggatagacgagcaagttcatcgccatctggaccagcacgaggtacgctatctgcaatttgcctttagatggatgaacaatctccttatgcgagaagtgcccctgaggtgcaccatccgtttatgggacacctatcagagtgagccagacggcttttcccacttccatctctatgtgtgcgctgcattcctggttcggtggcgcaaagagatcttagaggaaaaggatttccaagagctgctcctgtttctccagaacctgcccaccgcacattgggatgatgaagacatctcgctgctccttgctgaggcgtatagactcaaatttgcatttgctgacgcgcctaatcattataagaaatag

SEQ ID NO: 103682 - DNA, 1320 bp, Artificial Sequence
  derived and/or modified sequence
atggccagcgacggcgctcggaagcagttctggaagagatctaatagcaagttaccaggcagccttctgcgcagtacagccaaaatgcccaccaccccggtgaaggccaaacgggtgtcaaccttccaagaatttgaatccaacacctctgatgcatgggatgctggagaagacgatgatgaactgctggctatggcagctgagtctctgaattccgaggtggtcatggaaaccgctaatcgtgtgctcagaaatcatagccagcgccagggtcgaccaaccctccaagaggggcctggactccaacagaaaccccgtccagaagctgaaccccctagcccaccctccggggacttgaggctcgtcaagagtgtctcagaatctcacacatcgtgtcccgctgaagaactgagacggctgagttggagtggtatcccaaagccagtgcggcctatgacttggaagctactctcgggatacttgccagccaacgtggataggcggcctgctacccttcagcgcaagcaaaaggagtattttgcgtttatcgaacattattacgactcaaggaacgatgaggtgcatcaggacacgtatcgacagatccatattgacatcccgcgaatgtctcctgaggcattgatccttcaaccaaaagtgaccgaaatattcgagcgaatcttattcatttgggctataagacacccggcttctgggtacgttcaaggcattaacgacctcgtcaccccttttttcgtggtatttatttgcgagtacatcgaggctgaggaggtggacaccgtggacgtgtcaggagttcctgctgaagttctctgtaatattgaggcagatacttattggtgcatgtctaagttactagacgggatccaggataactacacgtttgcccagccaggcattcagatgaaggtcaaaatgctggaagaactagtgagccgcattgatgagcaagtgcacaggcatttggatcaacatgaagtgcgttatcttcagttcgcctttcggtggatgaataaccttttaatgcgcgaggtgccgctgcggtgcaccatacggctgtgggacacctatcagagcgaacctgacggctttagccatttccacctgtatgtctgcgcagcattcctagtcaggtggagaaaggaaatcctggaggagaaagatttccaagagctgcttctgttcctccagaatctgcccacggcacactgggatgatgaggatatttccctactgttggccgaagcctaccggctcaagtttgcgttcgctgatgcaccgaaccactacaagaagtag

SEQ ID NO: 103683 - DNA, 1377 bp, Artificial Sequence
  derived and/or modified sequence
atggcctccgacggcgcacgcaaacagttctggaagcggtccaattcaaagctgcccggatcaatccaacacgtttatggtgcccagcatcccccattcgatcctctcctgcacggaactctcctcagaagcacggcgaagatgccaactacaccagtcaaggccaagcgggtgtctacatttcaggagttcgagagcaacacttctgacgcttgggatgctggcgaagacgacgacgagttgctcgccatggctgctgaatccctgaatagcgaggtcgtaatggaaaccgcgaaccgggtgcttcgcaaccactcacaacgccagggaaggcctaccctacaggaggggcctggccttcagcagaagcctaggcctgaggccgagccgccttctccaccttcaggtgacctgagactcgtcaagtccgtttcggagtcgcacactagttgtcctgcggaagaactgagaaggttgtcatggtctggcattccgaaacccgtgcggccaatgacctggaaactcctttctggatacctgccagcgaatgtcgacagaaggccagcaaccctccagaggaagcagaaggagtactttgcttttatagaacactactatgactcacggaatgatgaggtccaccaggatacctatcgacagattcatatcgacattccaagaatgtccccagaggccctaattctgcaacctaaggtgaccgagatatttgagcgcatacttttcatttgggccatcagacaccccgcatccggctacgtccagggcattaatgatctcgtcacccctttttttgtggtttttatctgcgaatacatcgaggccgaagaagtggataccgtggatgtgagtggagtgccagccgaggttctctgtaatatcgaagccgacacctattggtgtatgagcaaactacttgacggcattcaggacaactacacctttgcccagccgggtatccagatgaaagtgaagatgcttgaggaacttgtgtcccggatcgatgaacaggttcatcggcatctggaccagcacgaagtgcgatatttacagttcgcctttcgatggatgaacaacctcctcatgagagaggtgccccttcgatgcacaattcggctgtgggacacgtatcagtccgaaccagatggattcagccacttccatctctacgtgtgtgctgctttcttagtccgctggaggaaggagatcctcgaagagaaggacttccaggagctgcttctttttctgcaaaatctcccgacagcacactgggacgatgaggacatttcactgctgttggctgaggcctacagactgaagttcgcctttgccgacgcacctaaccactataaaaagtag

SEQ ID NO: 103684 - DNA, 1886 bp, Artificial Sequence
  derived and/or modified sequence
cccgggagcagtgaggggccacccggggcacaggaaagggccgctaggggagggccgggtgcactcggggtgtctgggccgcgggtctgagggatgaggaggggccatggccagcgacggggccaggaagcaattctggaagcgcagcaacagcaagctcccgggcagtttgctcaggtccacggccaagatgccgaccacaccagtgaaggccaagagggtcagcaccttccaggagtttgagagcaataccagcgatgcctgggacgctggggaggacgacgatgagctcctggccatggcggcggagagcctgaactccgaggtggtcatggagacggccaaccgtgtgctgcgtaaccacagccagcggcaggggcggcccacgctgcaggaggggccagggcttcagcagaagcccaggcccgaggcagagccgccctcaccccccagcggcgacctccggctggtgaagtcggtcagtgagagccacacgtcctgtcctgcagaggaattacggaggttgagctggtccggaatccctaagccagtgcgtccaatgacgtggaagctcctctcaggttaccttcccgccaatgtagaccggagaccagccactctccagagaaaacaaaaagaatattttgcatttattgagcactattacgattctaggaacgacgaagttcaccaggacacatacaggcagatccacatagacatccctcgcatgagccctgaagcgttgatcctgcagcccaaggtgacggagatttttgaaaggatcttgttcatatgggcgatccgccacccagccagtggatacgttcagggtataaatgatctcgtcactcctttctttgtggtcttcatttgtgaatacatagaggcagaggaggtggacacggtggacgtctccggcgtgcccgcagaggtgctgtgcaacatcgaggccgacacctactggtgcatgagcaagctgctggatggcattcaggacaactacacctttgcccaacctgggattcaaatgaaagtgaaaatgttagaagaactcgtgagccggattgatgagcaagtgcaccggcacctggaccaacacgaagtgagatacctgcagtttgccttccgctggatgaacaacctgctgatgagggaggtgcccctgcgttgtaccatccgcctgtgggacacctaccagtctgaaccggacggcttttctcatttccacttgtacgtgtgcgctgcttttctcgtgagatggaggaaggaaatactagaagaaaaagattttcaagagctgctgctcttcctccagaacctgcccacagcccactgggatgatgaggacatcagcctgttgctggccgaggcctaccgcctcaagtttgcttttgccgacgcccccaatcactacaagaaatgagcccaggcccacccgcagctggcctcactgtcccgggtggcgcgccccacctgcctggctggtggtaggcccctgtgagctggtcccgggctgctaaaaggccttgtgaggtggccccaccctccaggggagctggtgaagatgggccacagacctggtctagggctgacaaagacagggacagcctttgttttctgagataccaaagagagccaggggagggccccgggttcggcggccagaggcaggtcaggggtcccctctccctctccctgcaatgtccttgccaaatgactgcctcgtgctgcccctagtccggggcagcctaggaggccgaccctctttggagtcctgctgtctgggtgccagggccggaacgaggtagtggccatctcatacctactctgaaatgcaaaacttctattctgttgagtgaaagaataaaatgtagacaaaatct

SEQ ID NO: 103685 - DNA, 1949 bp, Artificial Sequence
  derived and/or modified sequence
ctctggagtcccgggagcagtgaggggccacccggggcacaggaaagggccgctaggggagggccgggtgcactcggggtgtctgggccgcgggtctgagggatgaggaggggccatggccagcgacggggccaggaagcaattctggaagcgcagcaacagcaagctcccgggcagcatccagcacgtgtatggtgcccagcaccccccctttgatccactgttacatggcactttgctcaggtccacggccaagatgccgaccacaccagtgaaggccaagagggtcagcaccttccaggagtttgagagcaataccagcgatgcctgggacgctggggaggacgacgatgagctcctggccatggcggcggagagcctgaactccgaggtggtcatggagacggccaaccgtgtgctgcgtaaccacagccagcggcaggggcggcccacgctgcaggaggggccagggcttcagcagaagcccaggcccgaggcagagccgccctcaccccccagcggcgacctccggctggtgaagtcggtcagtgagagccacacgtcctgtcctgcagaggaattacggaggttgagctggtccggaatccctaagccagtgcgtccaatgacgtggaagctcctctcaggttaccttcccgccaatgtagaccggagaccagccactctccagagaaaacaaaaagaatattttgcatttattgagcactattacgattctaggaacgacgaagttcaccaggacacatacaggcagatccacatagacatccctcgcatgagccctgaagcgttgatcctgcagcccaaggtgacggagatttttgaaaggatcttgttcatatgggcgatccgccacccagccagtggatacgttcagggtataaatgatctcgtcactcctttctttgtggtcttcatttgtgaatacatagaggcagaggaggtggacacggtggacgtctccggcgtgcccgcagaggtgctgtgcaacatcgaggccgacacctactggtgcatgagcaagctgctggatggcattcaggacaactacacctttgcccaacctgggattcaaatgaaagtgaaaatgttagaagaactcgtgagccggattgatgagcaagtgcaccggcacctggaccaacacgaagtgagatacctgcagtttgccttccgctggatgaacaacctgctgatgagggaggtgcccctgcgttgtaccatccgcctgtgggacacctaccagtctgaaccggacggcttttctcatttccacttgtacgtgtgcgctgcttttctcgtgagatggaggaaggaaatactagaagaaaaagattttcaagagctgctgctcttcctccagaacctgcccacagcccactgggatgatgaggacatcagcctgttgctggccgaggcctaccgcctcaagtttgcttttgccgacgcccccaatcactacaagaaatgagcccaggcccacccgcagctggcctcactgtcccgggtggcgcgccccacctgcctggctggtggtaggcccctgtgagctggtcccgggctgctaaaaggccttgtgaggtggccccaccctccaggggagctggtgaagatgggccacagacctggtctagggctgacaaagacagggacagcctttgttttctgagataccaaagagagccaggggagggccccgggttcggcggccagaggcaggtcaggggtcccctctccctctccctgcaatgtccttgccaaatgactgcctcgtgctgcccctagtccggggcagcctaggaggccgaccctctttggagtcctgctgtctgggtgccagggccggaacgaggtagtggccatctcatacctactctgaaatgcaaaacttctattctgttgagtgaaagaataaaatgtagacaaaa

SEQ ID NO: 103686 - protein, 1111 aa, Artificial Sequence
  derived and/or modified sequence
MVRERKCILCHIVYSSKKEMDEHMRSMLHHRELENLKGRFGIEMVPLVQNEQEALDLDGEPDLSSLEGFQWEGVSISSSPGLARKRSLSESSVIMDRAPSVYSFFSEEGTGKENEPQQMVSPSNSLRAGQSQKATMHLKQEVTPRAASLRTGERAENVATQRRHSAQLSSDHIIPLMHLAKDLNSQERSIPPSENQNSQESNGEGNCLSSSASSALAISSLADAATDSSCTSGAEQNDGQSIRKKRRATGDGSSPELPSLERKNKRRKIKGKKERSQVDQLLNISLREEELSKSLQCMDNNLLQARAALQTAYVEVQRLLMLKQQITMEMSALRTHRIQILQGLQETYEPSEHPDQVPCSLTRERRNSRSQTSIDAALLPTPFFPLFLEPPSSHVSPSPTGASLQITTSPTFQTHGSVPAPDSSVQIKQEPMSPEQDENVNAVPPSSACNVSKELLEANREISDSCPVYPVITARLSLPESTESFHEPSQELKFSVEQRNTRNRENSPSSQSAGLSSINKEGEEPTKGNSGSEACTSSFLRLSFASETPLEKEPHSPADQPEQQAESTLTSAETRGSKKKKKLRKKKSLRAAHVPENSDTEQDVLTVKPVRKVKAGKLIKGGKVTTSTWEDSRTGREQESVRDEPDSDSSLEVLEIPNPQLEVVAIDSSESGEEKPDSPSKKDIWNSTEQNPLETSRSGCDEVSSTSEIGTRYKDGIPVSVAETQTVISSIKGSKNSSEISSEPGDDDEPTEGSFEGHQAAVNAIQIFGNLLYTCSADKTVRVYNLVSRKCIGVFEGHTSKVNCLLVTQTSGKNAALYTGSSDHTIRCYNVKSRECVEQLQLEDRVLCLHSRWRILYAGLANGTVVTFNIKNNKRLEIFECHGPRAVSCLATAQEGARKLLVVGSYDCTISVRDARNGLLLRTLEGHSKTILCMKVVNDLVFSGSSDQSVHAHNIHTGELVRIYKGHNHAVTVVNILGKVMVTACLDKFVRVYELQSHDRLQVYGGHKDMIMCMTIHKSMIYTGCYDGSIQAVRLNLMQNYRCWWHGCSLIFGVVDHLKQHLLTDHTNPNFQTLKCRWKNCDAFFTARKGSKQDAAGHIERHAEDDSKIDS

SEQ ID NO: 103687 - DNA, 3336 bp, Artificial Sequence
  derived and/or modified sequence
atggtgagagagagaaagtgcatcctgtgccacatcgtgtacagcagcaagaaggagatggacgagcacatgagaagcatgctgcaccacagagagctggagaacctgaagggcagattcggcatcgagatggtgcccctggtgcagaacgagcaggaggccctggacctggacggcgagcccgacctgagcagcctggagggcttccagtgggagggcgtgagcatcagcagcagccccggcctggccagaaagagaagcctgagcgagagcagcgtgatcatggacagagcccccagcgtgtacagcttcttcagcgaggagggcaccggcaaggagaacgagccccagcagatggtgagccccagcaacagcctgagagccggccagagccagaaggccaccatgcacctgaagcaggaggtgacccccagagccgccagcctgagaaccggcgagagagccgagaacgtggccacccagagaagacacagcgcccagctgagcagcgaccacatcatccccctgatgcacctggccaaggacctgaacagccaggagagaagcatcccccccagcgagaaccagaacagccaggagagcaacggcgagggcaactgcctgagcagcagcgccagcagcgccctggccatcagcagcctggccgacgccgccaccgacagcagctgcaccagcggcgccgagcagaacgacggccagagcatcagaaagaagagaagagccaccggcgacggcagcagccccgagctgcccagcctggagagaaagaacaagagaagaaagatcaagggcaagaaggagagaagccaggtggaccagctgctgaacatcagcctgagagaggaggagctgagcaagagcctgcagtgcatggacaacaacctgctgcaggccagagccgccctgcagaccgcctacgtggaggtgcagagactgctgatgctgaagcagcagatcaccatggagatgagcgccctgagaacccacagaatccagatcctgcagggcctgcaggagacctacgagcccagcgagcaccccgaccaggtgccctgcagcctgaccagagagagaagaaacagcagaagccagaccagcatcgacgccgccctgctgcccacccccttcttccccctgttcctggagccccccagcagccacgtgagccccagccccaccggcgccagcctgcagatcaccaccagccccaccttccagacccacggcagcgtgcccgcccccgacagcagcgtgcagatcaagcaggagcccatgagccccgagcaggacgagaacgtgaacgccgtgccccccagcagcgcctgcaacgtgagcaaggagctgctggaggccaacagagagatcagcgacagctgccccgtgtaccccgtgatcaccgccagactgagcctgcccgagagcaccgagagcttccacgagcccagccaggagctgaagttcagcgtggagcagagaaacaccagaaacagagagaacagccccagcagccagagcgccggcctgagcagcatcaacaaggagggcgaggagcccaccaagggcaacagcggcagcgaggcctgcaccagcagcttcctgagactgagcttcgccagcgagacccccctggagaaggagccccacagccccgccgaccagcccgagcagcaggccgagagcaccctgaccagcgccgagaccagaggcagcaagaagaagaagaagctgagaaagaagaagagcctgagagccgcccacgtgcccgagaacagcgacaccgagcaggacgtgctgaccgtgaagcccgtgagaaaggtgaaggccggcaagctgatcaagggcggcaaggtgaccaccagcacctgggaggacagcagaaccggcagagagcaggagagcgtgagagacgagcccgacagcgacagcagcctggaggtgctggagatccccaacccccagctggaggtggtggccatcgacagcagcgagagcggcgaggagaagcccgacagccccagcaagaaggacatctggaacagcaccgagcagaaccccctggagaccagcagaagcggctgcgacgaggtgagcagcaccagcgagatcggcaccagatacaaggacggcatccccgtgagcgtggccgagacccagaccgtgatcagcagcatcaagggcagcaagaacagcagcgagatcagcagcgagcccggcgacgacgacgagcccaccgagggcagcttcgagggccaccaggccgccgtgaacgccatccagatcttcggcaacctgctgtacacctgcagcgccgacaagaccgtgagagtgtacaacctggtgagcagaaagtgcatcggcgtgttcgagggccacaccagcaaggtgaactgcctgctggtgacccagaccagcggcaagaacgccgccctgtacaccggcagcagcgaccacaccatcagatgctacaacgtgaagagcagagagtgcgtggagcagctgcagctggaggacagagtgctgtgcctgcacagcagatggagaatcctgtacgccggcctggccaacggcaccgtggtgaccttcaacatcaagaacaacaagagactggagatcttcgagtgccacggccccagagccgtgagctgcctggccaccgcccaggagggcgccagaaagctgctggtggtgggcagctacgactgcaccatcagcgtgagagacgccagaaacggcctgctgctgagaaccctggagggccacagcaagaccatcctgtgcatgaaggtggtgaacgacctggtgttcagcggcagcagcgaccagagcgtgcacgcccacaacatccacaccggcgagctggtgagaatctacaagggccacaaccacgccgtgaccgtggtgaacatcctgggcaaggtgatggtgaccgcctgcctggacaagttcgtgagagtgtacgagctgcagagccacgacagactgcaggtgtacggcggccacaaggacatgatcatgtgcatgaccatccacaagagcatgatctacaccggctgctacgacggcagcatccaggccgtgagactgaacctgatgcagaactacagatgctggtggcacggctgcagcctgatcttcggcgtggtggaccacctgaagcagcacctgctgaccgaccacaccaaccccaacttccagaccctgaagtgcagatggaagaactgcgacgccttcttcaccgccagaaagggcagcaagcaggacgccgccggccacatcgagagacacgccgaggacgacagcaagatcgacagctag

SEQ ID NO: 103688 - DNA, 3336 bp, Artificial Sequence
  derived and/or modified sequence
atggtcagggaaaggaagtgcatactgtgtcatatcgtatattccagtaagaaggagatggacgaacacatgcgctctatgttacaccacagggagttggagaacctgaaaggtcggttcggcatagagatggttccactcgtacaaaacgaacaggaggctctggatctggacggagagccagacctgagttcacttgagggtttccagtgggaaggggtctccatttcttctagccccggactggccagaaagcggagcctgagtgaaagtagtgtcataatggatagggccccttccgtttacagtttcttcagcgaagagggcactggcaaggagaatgagcctcagcagatggtttcaccttcgaatagcctgagggcgggccagtctcaaaaagctaccatgcacctcaagcaagaagtcacaccgagagcagcatccctgcgaaccggcgaaagggctgagaacgtggcgacccaacggcggcatagcgctcaactttcttccgatcatatcatccctcttatgcatctagcgaaggacttgaactcccaagaaagatccattccaccctcggaaaatcagaactcacaggagagcaacggtgaagggaactgcctgagctccagcgcctcgtcagctctggcgatcagcagcctggcggatgcagctacggactcctcctgcacaagcggcgccgaacaaaacgacggacagagcattcggaagaagaggcgggccaccggtgatggctcgagccccgaactgccctccttggaacggaaaaataagcgccgcaaaattaagggcaagaaggaacgttctcaggtggatcagctcctcaacatctcactgagagaagaagaactgtccaaaagtttgcagtgcatggataacaatctactgcaggcccgtgcagccctgcaaactgcatacgtcgaggtccagcggcttctgatgctgaagcagcagatcaccatggagatgtccgccttgcgaacacatcgtattcagatcctgcaaggactacaagagacgtacgagccttccgaacacccagatcaagtgccctgttctttgacaagagaaaggcggaattctcggagtcagacttcaattgacgcagccctcttaccaacacctttctttccgctgttcctggagccgcccagcagccatgtcagcccttctcccacaggggctagcttgcagataacaacctcacccacttttcagacacacggtagcgtgccagccccagattccagtgtgcagatcaagcaggagcccatgagcccggagcaagatgaaaacgtgaacgcagttcctccttcctcagcctgtaatgtgtcgaaagagctgctagaggcaaatagggagatctcagactcttgtccagtatatcccgtgatcaccgcccgtctctcgctgcctgaaagtacggagagtttccacgagccatcacaggaactgaaattctcagtggagcagcggaacactcgcaatcgtgaaaactctccgagctctcagtcagccggtctctcatctataaacaaggagggggaagaacccaccaaaggcaactcagggagcgaggcttgcacatcttcatttctaaggctgtctttcgcctccgaaactccactggagaaggaaccacattctcccgcagaccaacccgaacagcaggctgagagtacactcacctccgccgaaacaaggggcagcaagaagaagaaaaagctgaggaaaaagaaatctcttcgcgccgctcatgtccctgaaaatagcgacacggagcaggatgtcctgactgtgaagccagtgcggaaagtgaaagcgggaaaactgataaagggcggtaaggtcacaactagcacatgggaagactccaggacaggccgcgagcaggagtccgtgcgagacgaaccagatagcgattcctctctcgaagtgttggagatccctaatccccagctcgaggtcgtggcaattgacagctccgaatccggagaggagaagcccgactccccaagtaagaaggacatttggaactcaaccgaacagaatcccttagagacaagtaggtccggatgtgatgaggtctccagtaccagtgaaatcggtactagatataaggacggcatccctgtgagcgttgcagagacacagaccgtgatatcctcgattaagggatccaaaaacagttctgaaataagcagcgagcccggggatgatgacgaaccaacagagggctcctttgagggacaccaggccgcagttaacgcaatccaaatctttggcaatctgctgtatacatgcagtgctgataagaccgttagagtctacaatctggtcagccgtaagtgtattggagtgtttgaaggccacaccagcaaagtgaattgcctccttgttacccagacctctgggaagaacgcggccctgtacacaggttctagcgaccacacgattcgttgttataatgtgaaatcacgggaatgtgtcgaacagctgcagctcgaggacagggtgctgtgtctgcattcacggtggcgcatcttatatgcggggctcgctaatggaaccgttgtgacatttaacatcaagaacaacaagcgccttgaaattttcgagtgccatggccctcgggctgtctcctgcctggcgaccgctcaggaaggcgcccggaagctccttgtcgtgggatcttacgattgcaccatctctgtcagggatgcccgcaatggactcttactgaggactctggaggggcactctaagactatcttatgcatgaaggtggtcaacgatttggtctttagcggttcgtccgatcagtctgtgcacgcccacaacattcacaccggggagcttgtacgaatatataaagggcacaaccacgctgtcacagtcgtgaacatcctggggaaggtgatggttaccgcctgcctagacaaatttgtgcgggtgtatgagctgcagtcacatgaccgactccaggtgtatggaggtcataaggatatgattatgtgtatgaccatacacaagtccatgatctacacaggatgctacgatggcagcatccaggccgtacggctgaacctcatgcaaaattacagatgttggtggcacggctgttccctaatatttggcgtagttgatcacctgaaacagcatctgctcacagaccacacaaatccaaactttcaaaccttgaagtgccgctggaagaactgtgatgcttttttcactgcaagaaaaggcagtaaacaggatgcagcggggcacattgagcgtcatgccgaagacgacagcaaaatcgattcctag

SEQ ID NO: 103689 - DNA, 3336 bp, Artificial Sequence
  derived and/or modified sequence
atggtgcgggagaggaagtgcatcctgtgccacatcgtgtacagcagcaagaaggagatggatgagcacatgaggtccatgctgcaccaccgggagctggagaacctgaagggccgcttcggcatcgagatggtgcccctggtgcagaatgagcaggaggccctggacctggatggagagccagacctgagcagcctggagggcttccagtgggagggcgtgtccatcagcagcagccctggcctggccaggaagaggagcctgtctgagagcagcgtcatcatggaccgggcccccagcgtgtacagcttcttcagcgaggagggcaccgggaaggaaaatgagccccagcagatggtgagccccagcaacagcctgcgggccggccagagccagaaggccaccatgcacctgaagcaggaggtgaccccccgggccgccagcctgaggactggagagcgggcagaaaatgtggccacccagaggaggcacagcgcccagctgagcagtgaccacatcatccccctgatgcacctggccaaggacctgaacagccaggagaggagcatccccccatctgagaaccagaacagccaggagagcaatggagagggcaactgcctgagcagcagcgccagcagcgccctggccatcagcagcctggctgatgctgccacagacagcagctgcaccagcggggctgagcagaatgatggccagagcatcaggaagaagaggcgggccactggagatggcagcagccctgagctgcccagcctggagaggaagaacaagaggaggaagatcaagggcaagaaggagaggagccaggtggaccagctgctgaacatcagcctgcgggaggaggagctgagcaagagcctgcagtgcatggacaacaacctgctgcaggcccgggccgccctgcagacagcctacgtggaggtgcagaggctgctgatgctgaagcagcagatcaccatggagatgtctgccctgcggacccaccgcatccagatcctgcagggcctgcaggagacctatgagcccagcgagcacccagaccaggtgccctgcagcctgacccgggagaggaggaacagccgcagccagaccagcattgatgctgccctgctgcccacccccttcttccccctcttcctggagccccccagcagccacgtgagccccagccccaccggggccagcctgcagatcaccaccagccccaccttccagacccacggctctgtgcctgccccagacagctctgtgcagatcaagcaggagcccatgagccctgagcaggatgaaaatgtgaatgctgtgccccccagcagcgcctgcaatgtgtccaaggagctgctggaggccaaccgggagatcagtgacagctgccctgtgtaccctgtgatcacagcccggctgagcctgcctgagagcacagagagcttccacgagcccagccaggagctgaagttctctgtggagcagaggaacaccaggaaccgggagaacagccccagcagccagagcgctggcctgagcagcatcaacaaggagggggaggagcccaccaagggcaacagcggcagcgaggcctgcaccagcagcttcctgcggctgagctttgccagcgagacccccctggagaaggagccccacagccctgctgaccagcctgagcagcaggccgagagcaccctgaccagcgctgagacccggggcagcaagaagaagaagaagctgaggaagaagaagagcctgcgggccgcccacgtgcctgagaacagcgacacagagcaggatgtgctgactgtgaagcctgtgaggaaggtgaaggccggcaagctgatcaagggcggcaaggtgaccaccagcacctgggaggacagcaggacaggccgggagcaggagagcgtgagagatgagccagacagcgacagcagcctggaggtgctggagatccccaacccccagctggaggtggtggccatcgacagcagcgagagcggggaggagaagccagacagccccagcaagaaggacatctggaacagcacagagcagaaccccctggagaccagccgcagcggctgtgatgaggtgagcagcaccagcgagatcggcacccgctacaaggatggcatccctgtgtctgtggccgagacccagaccgtcatcagcagcatcaagggcagcaagaacagcagcgagatcagcagcgagcctggagatgatgatgagcccacagagggcagctttgagggccaccaggccgctgtgaatgccatccagatcttcggcaacctgctgtacacctgcagcgctgacaagacagtgcgggtgtacaacctggtgtccaggaagtgcatcggcgtgtttgagggccacaccagcaaggtgaactgcctgctggtgacccagaccagcggcaagaatgctgccctgtacacaggcagcagtgaccacaccatccgctgctacaacgtgaagagcagagaatgtgtggagcagctgcagctggaggacagagtgctgtgcctgcacagccgctggaggatcctgtatgccggcctggccaacggcaccgtggtgaccttcaacatcaagaacaacaagaggctggagatctttgagtgccacggccccagggctgtgtcctgcctggccacagcccaggagggcgccaggaagctgctggtggtgggcagctatgactgcaccatctctgtgagagatgccagaaatggcctgctgctgcggaccctggagggccacagcaagaccatcctgtgcatgaaggtggtgaatgacctggtgttttctggcagcagtgaccagagcgtgcacgcccacaacatccacactggagagctggtgcgcatctacaagggccacaaccacgctgtgacagtggtgaacatcctgggcaaggtgatggtgacagcctgcctggacaagtttgtgcgggtgtatgagctgcagagccatgaccggctgcaggtgtatggaggccacaaggacatgatcatgtgcatgaccatccacaagtccatgatctacacaggctgctatgatggcagcatccaggccgtgcggctgaacctgatgcagaactaccgctgctggtggcacggctgcagcctcatcttcggcgtggtggaccacctgaagcagcacctgctgacagaccacaccaaccccaacttccagaccctgaagtgccgctggaagaactgtgatgccttcttcaccgccaggaagggcagcaagcaggatgctgctggccacatcgagagacatgctgaagatgacagcaagattgacagctag

SEQ ID NO: 103690 - DNA, 3336 bp, Artificial Sequence
  derived and/or modified sequence
atggtgcgggagcggaagtgcatcctgtgccacatcgtgtacagctcaaagaaagagatggatgaacacatgcggagcatgctacaccaccgcgaactggagaacctgaaggggagattcggaattgaaatggtgcccctcgtgcagaacgagcaagaggcattagacttggatggagagccagacttgagctctctagaaggtttccagtgggaaggggtgagcattagttctagcccggggctcgcgcggaagcgctctctctccgaatcctctgtcattatggatagagccccaagtgtctacagcttcttttcagaagaaggcacagggaaggagaatgagcctcagcagatggttagcccctccaacagcttacgagccggccagtctcaaaaagcaacaatgcacctgaagcaggaagtgacccctcgagcagcgagcctgagaaccggggagagagcagagaacgtagccactcagagacgacacagcgcccaactctcatccgatcacattatccccctgatgcatttggcaaaagatctgaacagccaggaacgttccatacccccgtctgagaaccagaacagccaagagagtaacggggagggcaattgtctctcaagcagtgccagtagcgctctggctatctccagcttagccgacgccgccacggatagctcctgcacctcgggtgcagaacagaatgacggacagtccatccggaaaaaaagaagagcaacaggcgacgggagctcccctgagctgccaagtctggagagaaagaacaagagacgtaagataaaaggaaagaaagaaagatctcaagtcgatcaactcttgaacatttcccttagggaggaggaactgagtaagagcctacagtgtatggataacaatctcttgcaggccagggccgccctgcagacggcatacgtcgaggtacagcgccttctcatgctgaagcagcaaattacaatggagatgagtgcactgcgcacacaccgcatccagatcttgcagggacttcaggagacctacgagccatccgagcacccagatcaagttccctgctccttaacgcgtgaaaggaggaactcccgttcacagaccagtatcgacgctgcattgctccctaccccctttttccccttgttcttggagccacccagctctcatgtaagtcccagcccgaccggcgccagtctgcagataacaacatcgccgacctttcaaacacacggatccgttccagctcccgattcttccgtacaaatcaaacaggaaccaatgagccccgaacaggatgaaaatgttaacgccgttcctccatcttctgcatgcaatgtgtcaaaggaactcctcgaggccaacagagaaatctcggactcctgtcccgtatacccggtaattaccgccaggctttctctcccagagtccactgaaagtttccatgagcctagtcaggagctcaagtttagcgtggagcagagaaatacccgcaatcgtgaaaattcacccagctctcagtccgccggtctgtcttccattaataaggaaggagaggaacctaccaaaggcaatagcggctcagaggcctgcaccagctcctttttgcgattgtccttcgcatctgaaactcccctggagaaggaaccgcactccccggctgaccaaccggagcagcaggccgagagtaccctgactagtgccgagacgagaggttcaaagaagaagaagaagctgcgcaaaaaaaagtccctgcgcgctgctcacgttccggaaaactcagacaccgaacaggatgtattaacggttaaaccagtaaggaaggtaaaagcaggcaagctcatcaagggaggcaaggtgacaacttcaacatgggaagactcccggacaggcagagaacaagaatccgttcgcgacgagcctgattcggatagcagtctcgaggtgcttgagattccaaatccacaacttgaagttgtggcgatagattcaagcgagagtggcgaggagaagcccgattctccttcaaagaaggatatctggaattccactgaacaaaatccactggaaacgtccagaagtgggtgtgacgaggtgagcagcactagtgagatcgggacgcgctacaaggacggaatccctgtgagcgttgcagaaacccagacagttataagcagcatcaagggctccaagaactcttccgagatctcatctgaacctggcgacgacgacgagccgaccgaggggtcttttgagggacaccaggctgctgtgaacgccatccagatattcggcaatctgctgtacacctgctctgctgacaagactgttagggtctacaacctagtgagtagaaagtgtataggagtgttcgagggccacacttcaaaggttaattgcctcctagtgactcagacatccggtaaaaacgcggcgctttataccgggtcctctgaccacactattagatgttacaacgtcaagagcagagagtgcgtcgagcagctgcagctagaggatagggtgctgtgtctgcattccaggtggcgcattttatacgccggactggccaatggaaccgtggtcacatttaacatcaaaaataacaagaggctggagatttttgagtgtcacggacctagggccgttagttgtctggcgactgctcaggaaggtgccaggaaactccttgtcgttggctcatatgattgcaccatttcggtcagggacgctagaaacgggctcctgctccgaaccctcgaagggcactccaagaccatcctgtgtatgaaggtggttaatgacctcgtattttctggcagcagtgaccaatccgtccatgcacataacatacacaccggggaactggttcggatttataaaggccataaccatgcagtgacggtagtcaacattttaggcaaagtgatggtgacagcctgcctggacaagtttgtgcgcgtgtacgagctgcagtctcatgaccgcctgcaggtctatggcggccataaagacatgattatgtgcatgactattcacaaatctatgatttacacaggttgttacgacgggtccatccaggctgtgaggctgaacctcatgcagaactaccgatgttggtggcacggctgcagcctcatctttggtgtggtggaccacctgaagcagcacctgttgactgaccatacgaatccaaatttccagacactgaagtgtagatggaagaattgcgatgcattcttcaccgctcgcaagggcagtaagcaggatgcagcagggcatatcgagcggcatgcagaagatgattcaaagattgatagttag

SEQ ID NO: 103691 - DNA, 3336 bp, Artificial Sequence
  derived and/or modified sequence
atggtccgtgagagaaagtgtattctctgccacattgtgtactcttcaaagaaggaaatggacgagcacatgaggagtatgttacatcaccgcgagctggagaatcttaagggtcggttcggtatcgaaatggtgcctttagtgcaaaatgaacaggaggccctcgacctcgacggtgaaccggatctgtcctccctggagggcttccagtgggagggcgtgtccatatcctctagccctggactggctaggaaacgcagtctaagcgaaagttcggttatcatggaccgggcaccatccgtctactcatttttctccgaggaggggactggaaaagagaacgagcctcagcagatggtctccccgtcgaatagcttgagagctgggcagtctcagaaggcaaccatgcatttaaagcaagaggttacccctcgcgctgcctcccttaggacaggcgaaagagccgagaatgtggcaacccaaaggcgacactccgcccaattatcctcagaccacatcattccacttatgcatcttgcgaaggatctgaacagccaagaaaggtccatcccaccttcggagaatcagaacagccaggagtctaacggggaggggaattgtctgagctcgtctgcttcttctgccctcgcaatcagctcacttgcagacgctgccacagatagtagctgtacctcaggcgcagaacagaatgatggacagagcattcgcaagaaacgtcgcgcaacgggcgatggttcttcccccgagctgccctccctcgaaaggaagaataaacgtaggaaaataaagggaaagaaggaaagatcccaggttgaccaactactaaatatttctctccgcgaggaggagttatccaaatctctccagtgcatggacaacaatctattgcaagccagagctgctcttcagaccgcttatgtggaagttcaacgcctactgatgctaaaacagcagattacgatggagatgagcgctctccggacccacagaatacagatcctgcagggactgcaggaaacctacgaacccagcgagcaccccgatcaggtgccttgctccttaacaagggagagaagaaattcacgcagccagactagtatcgatgctgccctgctgccaacgccatttttcccgctgtttcttgaacccccttcaagtcatgttagcccctcccccactggcgcaagtctgcagattacaactagcccaacttttcagactcacggaagtgtgccggctcccgatagcagcgttcagatcaagcaggagcctatgtcccctgaacaagatgaaaacgtaaatgcggtccccccatcctcagcctgcaacgtgtccaaggaacttctggaggcaaacagggagatctccgatagctgtccggtttatcctgttatcaccgcacggctgtcactcccggagagcactgaaagctttcacgaaccgagtcaagagctgaaattttctgttgagcagaggaataccagaaatagagaaaatagccccagttcccaatccgccggtttgtcctctatcaacaaggaaggtgaggaacccacaaaaggcaactctggatctgaggcctgcacatcttctttcctgcggttgtcatttgcttctgaaacacccctggagaaagaacctcattctcccgcagatcagcccgaacagcaagctgaatccactctgacgtctgcagagactcgtggatccaaaaaaaagaagaagctgagaaagaagaagtcactacgggctgcccacgttcccgagaacagcgatacagagcaggacgtgctgacggtgaaaccggtccgcaaagttaaggcaggtaagctcattaaaggcggtaaagtgacaacttccacttgggaagatagccgtacaggtagagaacaagaaagtgtaagggatgagcccgacagcgattcatcacttgaggtactggagattcccaatccacagttggaagttgtcgccatcgattcctcagaatccggagaggagaagccagactccccttccaaaaaggatatctggaactctacggagcagaatcctctcgagaccagtcgctcaggctgcgatgaggtctcgtccacatccgagattgggacccgctacaaggatggcattcccgtgtctgttgcagagacgcagacggtgatctccagcattaagggctctaagaactcaagtgagatttcttctgaacccggtgacgacgatgagccaaccgagggctcattcgagggccaccaggctgcagtgaatgcaatacagattttcgggaatctgctctacacttgttccgcagacaagacagtgagggtttacaacctcgtgagtcgaaaatgtatcggcgtgttcgaaggacacaccagtaaagtgaattgcctactcgtgactcagacaagcgggaagaacgctgcgctatacactggctcctcagaccatactattcggtgttataacgttaaaagccgggaatgtgtggaacaattacagctcgaagatagggtcctctgccttcatagtcgctggagaatcttatacgcaggcctagcaaacggtacggtggtcacatttaacatcaagaataacaagcgcctggaaatttttgagtgtcacggaccaagggccgttagctgcttggcgacagcacaggaaggcgctcggaagcttctcgtggtgggatcatatgattgcacaataagcgtgagagatgcacggaatggtcttcttttgagaacactggaaggtcactccaagacgatcctgtgcatgaaggtggttaacgatttggtgttctccggcagctctgaccagtcggtgcatgctcacaatatacatacaggcgagttggtgaggatttataagggacataatcacgccgtaaccgtggtgaatatcctcgggaaggttatggtcacggcgtgtctcgacaagtttgttagagtgtacgagctacaaagtcatgaccggctgcaggtgtacggcggtcacaaggacatgataatgtgtatgaccatacacaaaagcatgatatacacaggttgttacgatggtagcatccaagcggtgagactcaatctgatgcagaactaccgatgctggtggcacggctgttctctcattttcggcgttgtagatcatctcaagcagcatctcctcacggatcacactaatcccaattttcagacattaaagtgccgctggaagaactgcgatgcattttttaccgctcggaaaggctcaaagcaggatgctgccggacacattgaaaggcacgctgaggatgattccaaaatcgactcttag

SEQ ID NO: 103692 - DNA, 3652 bp, Artificial Sequence
  derived and/or modified sequence
gtgcgcctgcgcgttggcggcggctgtggcggggcccggcggggagctccctcgcctggctctcggcggcctgatggagtaagaggggttggctgtgaatctgtgacgttgagtgcttcagatctggtcactatggtacgagaacgaaaatgcatattatgccacatcgtgtacagctcaaaaaaggagatggacgaacacatgcggagcatgttgcatcacagggaacttgagaacctcaagggcaggtttggcatagaaatggtaccccttgttcaaaatgaacaagaagccttagatttggatggggaacctgatctgtccagtctagaaggattccagtgggaaggtgtttccatttcctcgtcccctggcttggcaagaaagcgaagcctttctgagagcagcgtgatcatggacagagctccttctgtgtatagcttcttcagtgaggaaggtacaggcaaagaaaatgagccccagcagatggtttcacctagtaactcattgagggctggacagagccagaaagcaaccatgcacctcaaacaagaagtgacacctcgggctgcctccctccgaacaggtgaaagggctgaaaatgttgctacccaaaggcgacatagtgcacaattatcctctgaccatataatacctttgatgcatttggcaaaagacttgaacagccaggagaggtctataccaccgtcagagaatcagaattcccaggagagtaatggagagggaaactgtctgtcatcaagcgcatcctcagcccttgcgatctccagtttagcggatgcagccacagatagtagctgtacctctggtgctgaacaaaatgatggccaaagtattagaaagaaacgaagagccactggagatggatcttctcctgaactcccaagtcttgagagaaaaaataaaagaaggaaaattaaaggaaaaaaagaacgttctcaggttgaccagctgctgaatatttctttaagggaggaagaacttagtaagtcattgcagtgcatggataacaatcttctgcaagcccgtgcagcccttcagacagcttatgtggaagttcagaggctacttatgctcaagcagcagataactatggagatgagtgcactgaggacccatagaatacagattctacagggattacaagaaacatatgaaccttctgagcacccagaccaggttccctgtagcctcacacgagaacgaaggaacagtagatctcaaacatccattgatgccgcactgctgcccactccctttttcccactttttctggagcctccatcttcccatgtgtctccatcacccaccggagcctctcttcaaataaccacgtctcctactttccaaacccatggcagtgtccctgctccagactcatcagttcagattaaacaagagcccatgtctcctgaacaagatgagaatgtgaatgctgtgccaccaagctctgcctgcaatgtgtccaaggaattactggaagctaatagagagatcagtgacagttgtccagtttatccagtcatcactgctagattgtccttaccagagtcaacagaaagtttccatgagcctagccaagaactgaagttttctgtggagcaaagaaataccagaaacagagaaaactctccctcttcccaatcagctggtctttctagcataaataaagaaggggaagagccaaccaaaggcaatagtgggtctgaagcctgtaccagttcttttctaagattgtcttttgcttcagaaacccctttggagaaggaaccccactctccagctgaccagcctgaacaacaggcagaatccactttgacatcagctgagactaggggaagcaagaaaaagaagaaactccggaagaagaaaagtctacgggctgcccatgttcctgagaatagtgacactgaacaggatgttttgactgttaaacctgtaaggaaagtaaaagctggaaagttaattaaaggggggaaagtaacaacctccacttgggaagacagcaggactggtcgggagcaggagagtgtcagagatgagccagatagtgactcgtctctggaagtcctagaaattcctaatcctcagttagaagtagtagccattgattcttcagaatcaggagaagagaaaccagacagcccatctaaaaaggatatttggaactctacagagcaaaacccactagaaacgtctcgttctgggtgtgatgaagttagctctaccagtgaaattggcactcgctataaagatggcatccctgtaagtgtggcagaaactcagactgtgatctcctccataaaaggatcaaagaattcttcagaaatatcttcagagccaggagatgatgatgaacccacagaaggaagctttgagggacaccaagctgccgtaaatgcaattcagatatttgggaacttgctatatacctgttcagcagataaaactgttcgggtttataatctggtgagtcggaaatgtattggtgtctttgagggtcatacctccaaagttaactgcctcctggttactcagacctccgggaagaatgctgccctttacaccgggtccagtgaccataccatccgctgctataatgttaagagccgagagtgtgtggagcagttacagctggaagaccgggtcctctgcctccacagtagatggcgaatcctctatgcgggactggcaaatggcactgtggtcaccttcaacataaagaacaacaaacgacttgagatctttgaatgccatggccctcgggcagtcagctgtcttgctacagctcaggaaggtgcccgaaaactgctggtcgtggggtcttatgactgcacaattagtgtacgcgatgcccggaatggactgctcctcagaactctggagggccatagcaaaaccattctttgcatgaaggtggtgaatgatctcgtgttcagtggctccagtgatcagtcagtccatgctcacaacattcacactggtgagctcgtgcggatctataaaggtcacaatcatgcagtgactgtggtgaatatcctaggaaaagtgatggtgactgcttgcctggataaatttgttcgtgtctatgaattacagtctcatgatcgattacaagtttatggaggacacaaagacatgattatgtgtatgaccatccataaaagcatgatttacactggctgttatgatggcagtattcaggccgtgaggcttaatctgatgcagaattaccgctgttggtggcatggttgctctctgatatttggcgttgtagatcatttaaaacaacacttgctgaccgaccacactaatcccaacttccagactctgaaatgtcgctggaagaactgcgatgcttttttcactgctaggaaaggatccaaacaggatgctgcaggacatattgaacgacatgctgaagatgacagcaaaattgattcatgaagttttttgcctcccacgttgggaagtcattagttgaactattttcacattggccccccacacaggccactctcttccctttcttggtgaagtaaggaaggagaaagtggttactagccaggcatacccctagcataagtctgggcagctctatgggatgataaattacacttttaagttcttg

SEQ ID NO: 103693 - protein, 385 aa, Artificial Sequence
  derived and/or modified sequence
MFQFVFSRVYCINPARRKWKEFEKMLGCAEEGHASLGRDPDWASYTLGVFICLSCSGIHRNIPQVSKVKSVRLDAWEEAQVEFMASHGNDAARARFESKVPSFYYRPTPSDCQLLREQWIRAKYERQEFIYPEKQEPYSAGYREGFLWKRGRDNGQFLSRKFVLTEREGALKYFNRNDAKEPKAVMKIEHLNATFQPAKIGHPHGLQVTYLKDNSTRNIFIYHEDGKEIVDWFNALRAARFHYLQVAFPGAGDADLVPKLSRNYLKEGYMEKTGPKQTEGFRKRWFTMDDRRLMYFKDPLDAFARGEVFIGSKESGYTVLHGFPPSTQGHHWPHGITIVTPDRKFLFACETESDQREWVAAFQKAVDRPMLPQEYAVEAHFKHKP

SEQ ID NO: 103694 - DNA, 1158 bp, Artificial Sequence
  derived and/or modified sequence
atgttccagttcgtgttcagcagagtgtactgcatcaaccccgccagaagaaagtggaaggagttcgagaagatgctgggctgcgccgaggagggccacgccagcctgggcagagaccccgactgggccagctacaccctgggcgtgttcatctgcctgagctgcagcggcatccacagaaacatcccccaggtgagcaaggtgaagagcgtgagactggacgcctgggaggaggcccaggtggagttcatggccagccacggcaacgacgccgccagagccagattcgagagcaaggtgcccagcttctactacagacccacccccagcgactgccagctgctgagagagcagtggatcagagccaagtacgagagacaggagttcatctaccccgagaagcaggagccctacagcgccggctacagagagggcttcctgtggaagagaggcagagacaacggccagttcctgagcagaaagttcgtgctgaccgagagagagggcgccctgaagtacttcaacagaaacgacgccaaggagcccaaggccgtgatgaagatcgagcacctgaacgccaccttccagcccgccaagatcggccacccccacggcctgcaggtgacctacctgaaggacaacagcaccagaaacatcttcatctaccacgaggacggcaaggagatcgtggactggttcaacgccctgagagccgccagattccactacctgcaggtggccttccccggcgccggcgacgccgacctggtgcccaagctgagcagaaactacctgaaggagggctacatggagaagaccggccccaagcagaccgagggcttcagaaagagatggttcaccatggacgacagaagactgatgtacttcaaggaccccctggacgccttcgccagaggcgaggtgttcatcggcagcaaggagagcggctacaccgtgctgcacggcttcccccccagcacccagggccaccactggccccacggcatcaccatcgtgacccccgacagaaagttcctgttcgcctgcgagaccgagagcgaccagagagagtgggtggccgccttccagaaggccgtggacagacccatgctgccccaggagtacgccgtggaggcccacttcaagcacaagccctag

SEQ ID NO: 103695 - DNA, 1158 bp, Artificial Sequence
  derived and/or modified sequence
atgttccagtttgtttttagccgagtctattgcatcaatccagctaggaggaaatggaaggagttcgagaagatgctggggtgtgccgaagaaggtcatgcgtcattggggcgggaccccgactgggcgagctacacgctcggtgtgtttatttgtctgtcctgctcggggatccaccgaaatatcccacaggtttcaaaggtcaaaagcgtgcgcctcgacgcatgggaggaggctcaggtggaatttatggccagtcatggcaacgatgcagcccgcgccaggttcgagtcaaaagtaccatccttctactacagacccacacctagcgattgccagctcctgcgagagcagtggatcagagccaagtatgaacgccaagagtttatttaccctgagaagcaggaaccttactccgccggctatagagaggggttcctgtggaaaagagggagagacaatggccagttcttgtcgaggaagtttgtgctgactgaaagggagggggcgctgaagtatttcaacaggaacgatgcaaaagaaccaaaagccgttatgaaaatagaacacttgaacgcgaccttccaaccggctaaaatagggcacccccacggacttcaggtgacctacttgaaggacaatagtacacgcaatatcttcatttatcatgaggacggaaaagaaatcgttgattggttcaatgcattgagggctgcacggtttcattacctgcaggttgccttccctggcgccggggacgctgatcttgtgcccaagctctctcgtaactacctgaaggagggatatatggaaaagacaggtccaaaacaaaccgaaggcttcaggaagcggtggtttacaatggatgataggcggctgatgtacttcaaggatcctttggatgcttttgcaagaggagaggtcttcatcggctctaaggagagcggatatactgttttgcacggatttccacctagcactcaggggcaccattggccccatggtataacaattgtgacacctgataggaagttcctgtttgcttgtgagaccgaaagcgaccagcgagagtgggttgccgctttccagaaggccgtagataggcctatgctcccacaggaatacgcagtggaggcccacttcaaacacaagccatag

SEQ ID NO: 103696 - DNA, 1158 bp, Artificial Sequence
  derived and/or modified sequence
atgttccagtttgtgttcagccgggtgtactgcatcaacccagcccggaggaagtggaaggagtttgagaagatgctgggctgtgccgaggagggccacgccagcctgggccgggaccctgactgggccagctacaccctgggcgtcttcatctgcctgagctgcagcggcatccacaggaacatcccccaggtgtccaaggtgaagtctgtgcggctggatgcctgggaggaggcccaggtggagttcatggccagccatggaaatgatgctgcccgggccaggtttgagagcaaggtgcccagcttctactaccggcccacccccagcgactgccagctgctgcgggagcagtggatccgggccaagtatgaaaggcaggagttcatctacccagagaagcaggagccctacagcgctggctaccgggagggcttcctgtggaagaggggccgggacaatggccagttcctgagcaggaagtttgtgctgacagagcgggagggcgccctgaagtacttcaacagaaatgatgccaaggagcccaaggctgtgatgaagattgagcacctgaatgccaccttccagcctgccaagattggccacccccacggcctgcaggtgacctacctgaaggacaacagcaccaggaacatcttcatctaccatgaagatggcaaggagatcgtggactggttcaatgccctgcgggccgcccgcttccactacctgcaggtggccttccctggagctggagatgctgacctggtgcccaagctgagcaggaactacctgaaggagggctacatggagaagacaggccccaagcagacagagggcttcaggaagcgctggttcaccatggatgaccggcggctgatgtacttcaaggaccccctggatgcctttgcccggggggaggtgttcatcggcagcaaggagagcggctacacagtgctgcacggcttcccccccagcacccagggccaccactggccccacggcatcaccatcgtgaccccagacaggaagttcctgtttgcctgtgaaacagaaagtgaccagcgggagtgggtggccgccttccagaaggctgtggaccggcccatgctgccccaggagtatgctgtggaggcccacttcaagcacaagccctag

SEQ ID NO: 103697 - DNA, 1158 bp, Artificial Sequence
  derived and/or modified sequence
atgttccagttcgtgttcagccgggtgtactgcatcaaccccgccaggagaaaatggaaggagtttgaaaagatgcttgggtgtgccgaagagggccatgcttccctgggcagagatcccgactgggcgagttacactctgggcgtcttcatctgcctcagctgttcagggatacatagaaacataccccaggtgagtaaggttaaatctgtgcggttagacgcctgggaggaggcccaagtggagtttatggccagccacggcaatgatgcggcacgcgcacgcttcgagtccaaagtccccagtttttactacagaccaacaccctcggactgtcagctgctgcgcgagcaatggatccgggccaaatacgagcgccaggagttcatctatccagaaaaacaagagccttacagcgctggctacagggagggattcctgtggaaacggggccgagacaatggtcaattcctctctcgcaagttcgtcttgactgagagggaaggtgcactaaagtatttcaaccggaatgacgccaaagagccgaaggcggtgatgaagatcgagcatctcaacgctacctttcagcctgccaaaatcggacaccctcatggtcttcaggttacctatctgaaggacaattccactaggaacatcttcatctaccacgaagacggcaaggaaattgtggactggttcaacgctttgcgggctgcaagattccactatctgcaagtggctttcccgggggctggagatgccgatctggtcccgaagctgagccggaactatttaaaggaggggtacatggagaagacagggccgaaacagaccgagggatttaggaagaggtggttcaccatggacgacaggcgccttatgtactttaaggatccactagacgcatttgcccgaggagaggttttcatcgggtcgaaggaatcaggctataccgtgttacacggattccctccctctacacagggtcaccattggccacacggaattaccatagtgacgccggacagaaaattcctcttcgcatgcgagacggaaagcgaccagagggagtgggtggcagcttttcagaaggcagtagatcgtccgatgctcccccaggaatatgccgttgaagcccacttcaagcataagccatag

SEQ ID NO: 103698 - DNA, 1369 bp, Artificial Sequence
  derived and/or modified sequence
atgttccagtttgttttcagccgggtgtactgcattaaccctgcaagaagaaaatggaaagaatttgaaaagatgctggggtgtgcagaggaagggcacgcgagtctgggaagagatcccgactgggcctcctacactctgggcgtcttcatctgcctgagctgctcgggaatccaccggaatatcccccaggtcagcaaggtgaagtccgtccgcctggacgcctgggaggaggcccaagtggagttcatggcctcccacgggaacgacgccgcgagagccaggtttgagtccaaagtaccctccttctactaccggcccacgccctccgactgccagctccttcgagagcagtggatccgggccaagtacgagcgacaggagttcatctacccggagaagcaggagccctactcggcagggtaccgtgagggttttctctggaagcgtggccgggacaacgggcagtttttgagccggaagtttgtgctgacagaacgagagggtgctctgaagtatttcaacagaaatgatgccaaggagcccaaggccgtgatgaagatcgagcacctgaacgccaccttccagccggccaagatcggccacccccacggcctgcaggtcacctacctgaaggacaacagcacccgtaacatcttcatctaccatgaggacgggaaggagattgtggactggttcaatgcactccgagctgctcgcttccactacctgcaggtggcattcccaggggccggcgacgcagatctggtgccaaagctctccaggaactacctgaaggaaggctacatggagaagacggggcccaagcaaacggaaggcttccggaagcgctggttcaccatggatgaccgcaggctcatgtacttcaaagaccccctggacgccttcgcccgaggggaagtcttcattggcagcaaggagagtggctacacggtgctgcatgggttcccgccgtccacccagggccaccactggccacatggcatcaccatcgtcacgcccgaccgcaagtttctgtttgcctgcgagacggagtccgaccagagggagtgggtggcggccttccagaaggcggtggacaggcccatgctgccccaggagtacgcagtggaggcgcacttcaagcataaaccttagcgagtgcggctggaggaccacggacattggactcactgtggctggacggaggggacccgtggatgggggggctctggcgtcctgaggccacctggccccacctgctcctcagggcagcccggcgcggccaggtagggcccgagcttcagcttccaggatgcttctctggaacctcaaggcaggcagcccaggccctgggcctgatctctaa

SEQ ID NO: 103699 - DNA, 1158 bp, Artificial Sequence
  derived and/or modified sequence
atgtttcagttcgttttttcaagggtgtattgcattaacccagcaaggcgcaaatggaaggagtttgagaaaatgctaggatgcgccgaagagggacatgccagtctgggaagagaccctgattgggcttcctacacactaggtgtcttcatctgcctgagctgcagtggcatccataggaatatcccccaggtgtccaaggtcaaaagcgtccgcttggacgcctgggaagaggcacaggtggaattcatggctagtcacggaaacgacgccgctagagccagattcgagagtaaagtgccgtctttctactatcggccaacaccttccgattgtcagctattgcgagaacaatggatccgtgcaaagtacgaaagacaggaatttatttatccggagaagcaagagccctactcggccggttatcgggaggggtttctgtggaagagaggacgcgataatggccaatttctgtcccggaaattcgtgctcacagaaagagagggtgccctaaaatactttaatcgcaatgacgccaaagaaccaaaagctgtgatgaagattgaacacctgaacgctaccttccagcctgctaagatcgggcatccccacgggctgcaggttacttacctgaaggataacagcacgagaaacatctttatataccatgaggacggcaaggagatcgtagactggtttaatgctctgcgagccgctagattccactaccttcaggttgctttccccggtgccggagacgccgatctcgtgcctaaactgtcccgcaattacctgaaggagggttacatggaaaagacaggtccaaaacaaaccgagggcttccgtaaaaggtggttcactatggacgaccgccgactgatgtactttaaggacccattggatgcatttgcgagaggcgaagtctttattgggtctaaagagtcgggttatacggtgttgcacggatttcctccctctacacagggtcaccactggccccatggcatcacaattgtaactcctgatagaaaattccttttcgcatgtgagaccgaaagtgatcagcgcgagtgggtggctgctttccagaaggccgtggatagacctatgctgccccaggagtatgctgtggaagcccacttcaagcataagccctag

SEQ ID NO: 103700 - DNA, 909 bp, Artificial Sequence
  derived and/or modified sequence
atggccagccacggcaacgacgccgccagagccagattcgagagcaaggtgcccagcttctactacagacccacccccagcgactgccagctgctgagagagcagtggatcagagccaagtacgagagacaggagttcatctaccccgagaagcaggagccctacagcgccggctacagagagggcttcctgtggaagagaggcagagacaacggccagttcctgagcagaaagttcgtgctgaccgagagagagggcgccctgaagtacttcaacagaaacgacgccaaggagcccaaggccgtgatgaagatcgagcacctgaacgccaccttccagcccgccaagatcggccacccccacggcctgcaggtgacctacctgaaggacaacagcaccagaaacatcttcatctaccacgaggacggcaaggagatcgtggactggttcaacgccctgagagccgccagattccactacctgcaggtggccttccccggcgccggcgacgccgacctggtgcccaagctgagcagaaactacctgaaggagggctacatggagaagaccggccccaagcagaccgagggcttcagaaagagatggttcaccatggacgacagaagactgatgtacttcaaggaccccctggacgccttcgccagaggcgaggtgttcatcggcagcaaggagagcggctacaccgtgctgcacggcttcccccccagcacccagggccaccactggccccacggcatcaccatcgtgacccccgacagaaagttcctgttcgcctgcgagaccgagagcgaccagagagagtgggtggccgccttccagaaggccgtggacagacccatgctgccccaggagtacgccgtggaggcccacttcaagcacaagccctag

SEQ ID NO: 103701 - DNA, 909 bp, Artificial Sequence
  derived and/or modified sequence
atggcttcacacggtaacgacgctgcgcgggctcggtttgagtctaaagtcccttcattttattaccggcccaccccctctgactgccagcttctcagagaacagtggatacgcgctaagtacgaaaggcaagagttcatctaccccgaaaaacaggaaccctattctgctggttatagagagggattcctatggaaacgcgggagggacaacgggcaatttctttccagaaagttcgtgctgactgagagagagggggcgttgaaatactttaaccgcaacgacgcaaaggagcctaaagcagttatgaagatcgagcacctgaatgccacattccagccggctaagatcggccacccacacgggctacaggtaacttacctcaaggataatagcaccagaaacatatttatctaccacgaggacggtaaagagattgttgactggtttaatgcattgcgcgcagcccggtttcattatctgcaggtggcttttccaggcgctggcgacgcagacttagttcctaaacttagcaggaattaccttaaggagggctatatggaaaagacaggacctaagcagaccgagggttttaggaaaaggtggttcacgatggacgatcgcaggctcatgtatttcaaggaccccttggacgcctttgccaggggcgaggtgtttattggcagcaaggaaagtggatatacagttttacacggcttccccccctccacccaaggtcatcactggccacatggaattacaatcgtgactcccgatcggaagttcttatttgcttgcgagactgagagtgaccagcgggaatgggtggcagcattccaaaaagccgtggaccgtcctatgttgccacaggagtacgccgtggaagcccatttcaagcacaaaccatag

SEQ ID NO: 103702 - DNA, 909 bp, Artificial Sequence
  derived and/or modified sequence
atggccagccacggcaatgatgctgcccgggccaggtttgagagcaaggtgcccagcttctactaccggcccacccccagcgactgccagctgctgcgggagcagtggatccgggccaagtatgagcggcaggagttcatctacccagagaagcaggagccctacagcgctggctaccgggagggcttcctgtggaagaggggccgggacaatggccagttcctgagcaggaagtttgtgctgacagagcgggagggcgccctgaagtacttcaacagaaatgatgccaaggagcccaaggctgtgatgaagattgagcacctgaatgccaccttccagcctgccaagattggccacccccacggcctgcaggtgacctacctgaaggacaacagcaccaggaacatcttcatctaccatgaagatggcaaggagatcgtggactggttcaatgccctgcgggccgcccgcttccactacctgcaggtggccttccctggagctggagatgctgacctggtgcccaagctgagcaggaactacctgaaggagggctacatggagaagacaggccccaagcagacagagggcttcaggaagcgctggttcaccatggatgaccggcggctgatgtacttcaaggaccccctggatgcctttgcccggggggaggtgttcatcggcagcaaggagagcggctacacagtgctgcacggcttcccccccagcacccagggccaccactggccccacggcatcaccatcgtgaccccagacaggaagttcctgtttgcctgtgaaacagaaagtgaccagcgggagtgggtggccgccttccagaaggctgtggaccggcccatgctgccccaggagtatgctgtggaggcccacttcaagcacaagccctag

SEQ ID NO: 103703 - DNA, 909 bp, Artificial Sequence
  derived and/or modified sequence
atggccagccacggcaacgacgccgcccgggcccggttcgagagcaaggtcccaagcttttactacaggcccacacccagtgattgtcaacttttgcgggaacagtggattagagcgaagtacgagcgccaggagttcatctacccggagaagcaggagccgtattctgccggttaccgggaaggctttctctggaaaagaggcagggacaacgggcaattcctgagtaggaagtttgtcctgaccgagcgggagggcgcgctcaaatactttaataggaatgatgccaaggaaccaaaagcggtgatgaaaattgagcacctgaacgctaccttccagcctgccaaaatcggccatcctcatggcctgcaggttacctatctgaaagataactcaaccagaaatatatttatttatcatgaagatggcaaagagattgtggactggtttaacgcattaagagccgcccgttttcactacctgcaggtcgctttccccggcgcaggcgatgccgatctggtccctaaactctcccggaactatctcaaggaggggtatatggagaagaccggacccaagcagacagaggggtttagaaaaaggtggtttaccatggacgatcgcagactcatgtacttcaaggaccctctggatgcctttgcaagaggggaagtcttcattggctccaaggagtcaggatatactgtgttgcacgggttcccaccttccactcagggacatcattggccacatggcataacaatcgtcactccggacagaaaattcttatttgcgtgcgagacagagtctgatcagcgggaatgggtcgccgcctttcaaaaggccgtagatagacctatgctgcctcaagagtacgccgtcgaggcccactttaagcacaaaccatag

SEQ ID NO: 103704 - DNA, 2085 bp, Artificial Sequence
  derived and/or modified sequence
tttccttctccctcagcctgtttcgtaaacatgttctgggtccctgcagtgtgtccctgcagagtcccctcagagactctgtcctagccacatctgggtctctcgctcaccagcccatctccaggcccccgtgtctggcgcctgttggctctttgctaaatttcatggcctcccacgggaacgacgccgcgagagccaggtttgagtccaaagtaccctccttctactaccggcccacgccctccgactgccagctccttcgagagcagtggatccgggccaagtacgagcgacaggagttcatctacccggagaagcaggagccctactcggcagggtaccgtgagggttttctctggaagcgtggccgggacaacgggcagtttttgagccggaagtttgtgctgacagaacgagagggtgctctgaagtatttcaacagaaatgatgccaaggagcccaaggccgtgatgaagatcgagcacctgaacgccaccttccagccggccaagatcggccacccccacggcctgcaggtcacctacctgaaggacaacagcacccgtaacatcttcatctaccatgaggacgggaaggagattgtggactggttcaatgcactccgagctgctcgcttccactacctgcaggtggcattcccaggggccggcgacgcagatctggtgccaaagctctccaggaactacctgaaggaaggctacatggagaagacggggcccaagcaaacggaaggcttccggaagcgctggttcaccatggatgaccgcaggctcatgtacttcaaagaccccctggacgccttcgcccgaggggaagtcttcattggcagcaaggagagtggctacacggtgctgcatgggttcccgccgtccacccagggccaccactggccacatggcatcaccatcgtcacgcccgaccgcaagtttctgtttgcctgcgagacggagtccgaccagagggagtgggtggcggccttccagaaggcggtggacaggcccatgctgccccaggagtacgcagtggaggcgcacttcaagcataaaccttagcgagtgcggctggaggaccacggacattggactcactgtggctggacggaggggacccgtggatgggggggctctggcgtcctgaggccacctggccccacctgctcctcagggcagcccggcgcggccaggtagggcccgagcttcagcttccaggatgcttctctggaacctcaaggcaggcagcccaggccctgggcctgatctctaaccccgtcatgctgctgctgaccacacccagccaacctgcccctccctgacccggggccccctttcctccagggcccagtctggctcccgagctcagacacagcccccaggagccgcccaccacggctgtgggaacttccaggcctcagcgcagagccctgcttggggccagcacggtgggcagctgccggccgctggggactgggccctgctcgcatgccgccccgccctccccccacctccacgactatttattgagcgcctgttgtgtgtcacggggctatgagggccgtggggtgtttgggtggattatccacacaggtcccggcccctgcccgggctggagttgccacagcctgtgctcctggtcctcacctggaggggccagcaggctgccgtcccaccacacgtggcctctgcgcccagcacggtgctcgccgacagtggtgtctgaacccttggggacgagggcctgggccgcggtgaggccaccagaggcaggagtggccctgggggtcccgggcactgtcgcgcttgctgcaggcggcccagccgtgtatttatttttcacctatctccttcctgtcaaggcaggccgggctccagggctccccttgcgtggggcatgtaggtgggggaggcgtctgcaggtcacctggggggcccagccctctcccagccttgcctggctgagctgtgttccaggggagccctggacaagccctcataggcagggagggggtttccgaggccaggcatccgccgccccgtgtcgcatcctggaataaaatgtggctctggc

SEQ ID NO: 103705 - DNA, 909 bp, Artificial Sequence
  derived and/or modified sequence
atggccagtcacggtaacgacgctgccagagcgcgattcgagtctaaagtccctagcttctactataggcccactccttcagattgtcagctcctgcgagaacagtggattagggcaaaatacgaacgccaggagttcatctacccagagaaacaggagccctacagcgccggatatagggagggattcctgtggaaaagagggagggataacgggcagttcctatctaggaaattcgtcctcaccgagcgcgagggggctctcaagtactttaataggaatgacgctaaagagcccaaggctgttatgaaaatcgaacatctcaacgcaacctttcagccagcaaagatcgggcacccacacggcctacaagtaacgtatctcaaagacaactctacacggaatatttttatctatcacgaagatggaaaggagattgtggactggtttaacgccctgagggcggctcgcttccactatttgcaagtagccttccccggtgccggagacgcagatctggtgccgaagctgagcagaaactatctcaaagagggttacatggagaagacgggacccaaacaaaccgagggcttcaggaaaaggtggttcactatggatgacaggcgcctgatgtatttcaaggatccactggacgccttcgccaggggtgaggtctttatcggctcaaaggagagcgggtacaccgtactgcatggctttccaccatcaacacagggccatcattggccgcacggaataactattgtcacacctgaccgaaaatttctgtttgcatgtgagactgaatcagatcagagagaatgggtggccgctttccagaaagcagtagatcgcccaatgctgccccaagaatacgctgttgaggctcatttcaagcacaaaccatag

SEQ ID NO: 103706 - protein, 260 aa, Artificial Sequence
  derived and/or modified sequence
MVLASLELLREQWIRAKYERQEFIYPEKQEPYSAGYREGFLWKRGRDNGQFLSRKFVLTEREGALKYFNRNDAKIGHPHGLQVTYLKDNSTRNIFIYHEDGKEIVDWFNALRAARFHYLQVAFPGAGDADLVPKLSRNYLKEGYMEKTGPKQTEGFRKRWFTMDDRRLMYFKDPLDAFARGEVFIGSKESGYTVLHGFPPSTQGHHWPHGITIVTPDRKFLFACETESDQREWVAAFQKAVDRPMLPQEYAVEAHFKHKP

SEQ ID NO: 103707 - DNA, 603 bp, Artificial Sequence
  derived and/or modified sequence
atgaagatcgagcacctgaacgccaccttccagcccgccaagatcggccacccccacggcctgcaggtgacctacctgaaggacaacagcaccagaaacatcttcatctaccacgaggacggcaaggagatcgtggactggttcaacgccctgagagccgccagattccactacctgcaggtggccttccccggcgccggcgacgccgacctggtgcccaagctgagcagaaactacctgaaggagggctacatggagaagaccggccccaagcagaccgagggcttcagaaagagatggttcaccatggacgacagaagactgatgtacttcaaggaccccctggacgccttcgccagaggcgaggtgttcatcggcagcaaggagagcggctacaccgtgctgcacggcttcccccccagcacccagggccaccactggccccacggcatcaccatcgtgacccccgacagaaagttcctgttcgcctgcgagaccgagagcgaccagagagagtgggtggccgccttccagaaggccgtggacagacccatgctgccccaggagtacgccgtggaggcccacttcaagcacaagccctag

SEQ ID NO: 103708 - DNA, 783 bp, Artificial Sequence
  derived and/or modified sequence
atggtgctggccagcctggagctgctgagagagcagtggatcagagccaagtacgagagacaggagttcatctaccccgagaagcaggagccctacagcgccggctacagagagggcttcctgtggaagagaggcagagacaacggccagttcctgagcagaaagttcgtgctgaccgagagagagggcgccctgaagtacttcaacagaaacgacgccaagatcggccacccccacggcctgcaggtgacctacctgaaggacaacagcaccagaaacatcttcatctaccacgaggacggcaaggagatcgtggactggttcaacgccctgagagccgccagattccactacctgcaggtggccttccccggcgccggcgacgccgacctggtgcccaagctgagcagaaactacctgaaggagggctacatggagaagaccggccccaagcagaccgagggcttcagaaagagatggttcaccatggacgacagaagactgatgtacttcaaggaccccctggacgccttcgccagaggcgaggtgttcatcggcagcaaggagagcggctacaccgtgctgcacggcttcccccccagcacccagggccaccactggccccacggcatcaccatcgtgacccccgacagaaagttcctgttcgcctgcgagaccgagagcgaccagagagagtgggtggccgccttccagaaggccgtggacagacccatgctgccccaggagtacgccgtggaggcccacttcaagcacaagccctag

SEQ ID NO: 103709 - DNA, 603 bp, Artificial Sequence
  derived and/or modified sequence
atgaagatcgagcatctgaacgcgaccttccagcccgctaaaatcggacacccccacggcctgcaagtgacctatctgaaagacaattccacccgaaacatctttatctaccacgaggatggcaaggagatagtagactggtttaatgcccttcgcgccgcaagatttcactacctccaggtcgcattccctggcgccggggatgcggacctggtcccaaaattatccaggaattacctgaaggaaggctatatggaaaagaccggccccaagcagactgagggctttcgcaagcgttggtttactatggacgacagacgcctgatgtactttaaggaccccttggacgcctttgcaaggggggaagtttttattggctctaaagagtcaggttacaccgtactccatggattccccccttctacccaaggacatcactggccacatggaataacgatagtgaccccagatcgtaaatttctgttcgcatgtgagacagagagcgaccaacgggagtgggtcgccgccttccagaaggccgtcgatagaccaatgctcccccaggaatacgcagtggaggcccacttcaaacacaagccctag

SEQ ID NO: 103710 - DNA, 783 bp, Artificial Sequence
  derived and/or modified sequence
atggtgctcgcatcgctggaactactacgagagcagtggattcgtgctaagtacgaaaggcaggagtttatctatcccgaaaagcaagaaccatattcagccgggtacagggagggctttctttggaagagaggtcgtgacaacggccagttcctctctcgcaagtttgtgttgactgaaagggagggagcactcaagtactttaataggaacgacgcaaaaattggccacccgcatgggttacaggtcacgtatctcaaagacaacagcactcggaacatatttatataccacgaggatggaaaggaaatagtggactggtttaacgccctccgagccgccagatttcactacctccaggtggcctttcctggagctggtgatgcggacctggtaccaaaactgtctcggaactatctgaaggagggctatatggagaagactggccctaaacagactgagggattcagaaagcgatggtttactatggacgacaggcgacttatgtactttaaggatccattggacgcgttcgcccgcggagaggtcttcatcgggagcaaagaatctgggtataccgtcctacatggttttccaccctccacacagggccaccactggccccacggaataacaatagtgactcctgatcgcaagtttctgttcgcatgtgaaactgagtctgatcagcgagagtgggtggccgcctttcagaaagccgtcgatcgacctatgttaccacaagagtatgcagtggaggcacattttaagcataagccatag

SEQ ID NO: 103711 - DNA, 603 bp, Artificial Sequence
  derived and/or modified sequence
atgaagattgagcacctgaatgccaccttccagcctgccaagattggccacccccacggcctgcaggtgacctacctgaaggacaacagcaccaggaacatcttcatctaccatgaagatggcaaggagatcgtggactggttcaatgccctgcgggccgcccgcttccactacctgcaggtggccttccctggagctggagatgctgacctggtgcccaagctgagcaggaactacctgaaggagggctacatggagaagacaggccccaagcagacagagggcttcaggaagcgctggttcaccatggatgaccggcggctgatgtacttcaaggaccccctggatgcctttgcccggggggaggtgttcatcggcagcaaggagagcggctacacagtgctgcacggcttcccccccagcacccagggccaccactggccccacggcatcaccatcgtgaccccagacaggaagttcctgtttgcctgtgaaacagaaagtgaccagcgggagtgggtggccgccttccagaaggctgtggaccggcccatgctgccccaggagtatgctgtggaggcccacttcaagcacaagccctag

SEQ ID NO: 103712 - DNA, 783 bp, Artificial Sequence
  derived and/or modified sequence
atggtgctggccagcctggagctgctgcgggagcagtggatccgggccaagtatgaaaggcaggagttcatctacccagagaagcaggagccctacagcgctggctaccgggagggcttcctgtggaagaggggccgggacaatggccagttcctgagcaggaagtttgtgctgacagagcgggagggcgccctgaagtacttcaacagaaatgatgccaagattggccacccccacggcctgcaggtgacctacctgaaggacaacagcaccaggaacatcttcatctaccatgaagatggcaaggagatcgtggactggttcaatgccctgcgggccgcccgcttccactacctgcaggtggccttccctggagctggagatgctgacctggtgcccaagctgagcaggaactacctgaaggagggctacatggagaagacaggccccaagcagacagagggcttcaggaagcgctggttcaccatggatgaccggcggctgatgtacttcaaggaccccctggatgcctttgcccggggggaggtgttcatcggcagcaaggagagcggctacacagtgctgcacggcttcccccccagcacccagggccaccactggccccacggcatcaccatcgtgaccccagacaggaagttcctgtttgcctgtgaaacagaaagtgaccagcgggagtgggtggccgccttccagaaggctgtggaccggcccatgctgccccaggagtatgctgtggaggcccacttcaagcacaagccctag

SEQ ID NO: 103713 - DNA, 603 bp, Artificial Sequence
  derived and/or modified sequence
atgaagatcgagcacctgaacgccaccttccagcccgccaagatcggccacccgcacggcttgcaggtcacatacctcaaggataactctactcgcaatatatttatttaccacgaggacggtaaggagattgtggactggtttaacgcactgagggcagcgaggtttcattatcttcaggtcgcgttccctggcgctggggacgccgatctggttccaaagctgtccagaaattaccttaaggagggatacatggagaaaaccggacccaaacagacagagggatttaggaaacggtggttcacaatggacgaccgccgattgatgtacttcaaggatcccttggacgccttcgctcgaggagaggtgttcataggtagcaaggagtcaggttatacagtccttcacggtttcccgccatctacgcaagggcatcattggccacatggaatcacaattgtgacccctgatagaaagtttctatttgcctgcgaaacagagtctgatcagcgtgagtgggtagcggcatttcaaaaagcagtggataggcctatgcttccacaggagtacgccgtcgaagcacattttaagcataaaccatag

SEQ ID NO: 103714 - DNA, 783 bp, Artificial Sequence
  derived and/or modified sequence
atggtgctggccagcctggagctgctgcgggagcagtggatccgggcaaagtacgaacgacaggaattcatctatcccgagaagcaagaaccctattcggcaggttatcgggaaggcttcctatggaagagaggaagggataacggccagtttctgagccggaagtttgtcttgaccgagagagagggggccctgaaatactttaatcgaaacgatgccaagatcggacatccccatggactccaggtcacctacctaaaagacaattccactagaaacattttcatttatcacgaagacggtaaagagatcgtcgactggttcaacgccttgcgcgcggctagattccattacctccaggtggcattccccggcgcaggggatgctgatcttgtcccgaaactctcccgtaactaccttaaggagggctatatggagaagacgggccctaaacagacggaaggatttcggaagcggtggtttaccatggatgatagaaggctgatgtattttaaggaccccctggatgcgtttgcccgaggagaagttttcatcgggagcaaggaaagcggctatacagtattgcacggcttccccccatcaacacagggacaccactggccccacggcattactatcgtgacccccgacaggaaatttctcttcgcctgcgagaccgaatctgatcagagagaatgggtagccgcatttcagaaggccgtggataggccaatgctcccccaggaatatgcggtcgaagcacatttcaagcataagccttag

SEQ ID NO: 103715 - DNA, 2192 bp, Artificial Sequence
  derived and/or modified sequence
tcccttctcccttctcctttccctttctcctttccctttctcctttctcctttctcctttctcctttctcctttctcctttccctttctcctttctcctttctcctttccctttctcctttccctttctcctttccctttctcctttctcctttctcctttctcctttctcctttctcctttctcctttctcctttctcctttccctttctcctttctcctttctcctttctcctttctcctttccctttccctttccctgcccatcttcctatctccctgtctcctccatgtcccctctccccgtccgtctccccctgtccgtgtcccccgtccgtgtcccccgtgtcttctccccatgtcccctctgtcctgtccatcgtcactccttttgtttcctcccccccatccactgtcaccgactcgtgtcccctttcccccacagggtaccgtgagggttttctctggaagcgtggccgggacaacgggcagtttttgagccggaagtttgtgctgacagaacgagagggtgctctgaagtatttcaacagaaatgatgccaaggagcccaaggccgtgatgaagatcgagcacctgaacgccaccttccagccggccaagatcggccacccccacggcctgcaggtcacctacctgaaggacaacagcacccgtaacatcttcatctaccatgaggacgggaaggagattgtggactggttcaatgcactccgagctgctcgcttccactacctgcaggtggcattcccaggggccggcgacgcagatctggtgccaaagctctccaggaactacctgaaggaaggctacatggagaagacggggcccaagcaaacggaaggcttccggaagcgctggttcaccatggatgaccgcaggctcatgtacttcaaagaccccctggacgccttcgcccgaggggaagtcttcattggcagcaaggagagtggctacacggtgctgcatgggttcccgccgtccacccagggccaccactggccacatggcatcaccatcgtcacgcccgaccgcaagtttctgtttgcctgcgagacggagtccgaccagagggagtgggtggcggccttccagaaggcggtggacaggcccatgctgccccaggagtacgcagtggaggcgcacttcaagcataaaccttagcgagtgcggctggaggaccacggacattggactcactgtggctggacggaggggacccgtggatgggggggctctggcgtcctgaggccacctggccccacctgctcctcagggcagcccggcgcggccaggtagggcccgagcttcagcttccaggatgcttctctggaacctcaaggcaggcagcccaggccctgggcctgatctctaaccccgtcatgctgctgctgaccacacccagccaacctgcccctccctgacccggggccccctttcctccagggcccagtctggctcccgagctcagacacagcccccaggagccgcccaccacggctgtgggaacttccaggcctcagcgcagagccctgcttggggccagcacggtgggcagctgccggccgctggggactgggccctgctcgcatgccgccccgccctccccccacctccacgactatttattgagcgcctgttgtgtgtcacggggctatgagggccgtggggtgtttgggtggattatccacacaggtcccggcccctgcccgggctggagttgccacagcctgtgctcctggtcctcacctggaggggccagcaggctgccgtcccaccacacgtggcctctgcgcccagcacggtgctcgccgacagtggtgtctgaacccttggggacgagggcctgggccgcggtgaggccaccagaggcaggagtggccctgggggtcccgggcactgtcgcgcttgctgcaggcggcccagccgtgtatttatttttcacctatctccttcctgtcaaggcaggccgggctccagggctccccttgcgtggggcatgtaggtgggggaggcgtctgcaggtcacctggggggcccagccctctcccagccttgcctggctgagctgtgttccaggggagccctggacaagccctcataggcagggagggggtttccgaggccaggcatccgccgccccgtgtcgcatcctggaataaaatgtggctctgg

SEQ ID NO: 103716 - DNA, 1297 bp, Artificial Sequence
  derived and/or modified sequence
ggaaaaggctggggcggctgcctgtgcacctgggccgtgccgggcctgtgtgtgggtcgtggtttctgcaatggtattggcttcactcgagctccttcgagagcagtggatccgggccaagtacgagcgacaggagttcatctacccggagaagcaggagccctactcggcagggtaccgtgagggttttctctggaagcgtggccgggacaacgggcagtttttgagccggaagtttgtgctgacagaacgagagggtgctctgaagtatttcaacagaaatgatgccaagatcggccacccccacggcctgcaggtcacctacctgaaggacaacagcacccgtaacatcttcatctaccatgaggacgggaaggagattgtggactggttcaatgcactccgagctgctcgcttccactacctgcaggtggcattcccaggggccggcgacgcagatctggtgccaaagctctccaggaactacctgaaggaaggctacatggagaagacggggcccaagcaaacggaaggcttccggaagcgctggttcaccatggatgaccgcaggctcatgtacttcaaagaccccctggacgccttcgcccgaggggaagtcttcattggcagcaaggagagtggctacacggtgctgcatgggttcccgccgtccacccagggccaccactggccacatggcatcaccatcgtcacgcccgaccgcaagtttctgtttgcctgcgagacggagtccgaccagagggagtgggtggcggccttccagaaggcggtggacaggcccatgctgccccaggagtacgcagtggaggcgcacttcaagcataaaccttagcgagtgcggctggaggaccacggacattggactcactgtggctggacggaggggacccgtggatgggggggctctggcgtcctgaggccacctggccccacctgctcctcagggcagcccggcgcggccaggtagggcccgagcttcagcttccaggatgcttctctggaacctcaaggcaggcagcccaggccctgggcctgatctctaaccccgtcatgctgctgctgaccacacccagccaacctgcccctccctgacccggggccccctttcctccagggcccagtctggctcccgagctcagacacagcccccaggagccgcccaccacggctgtgggaacttccaggcctcagcgcagagccctgcttggggccagcacggtgggcagctgccggccgctggggactgggccctgctcgcatgccgccccgccctccc

SEQ ID NO: 103717 - DNA, 603 bp, Artificial Sequence
  derived and/or modified sequence
atgaagattgagcacctcaacgctacttttcagccggctaagattggacatccgcacgggctgcaggtcacctacctgaaagataattctacacggaacatctttatttatcacgaggatggcaaggaaatcgtggattggttcaatgctctccgcgctgctcgatttcattatctccaggtcgcgttccctggcgctggggacgctgatctggtacccaagctttcaagaaattacttgaaagagggctatatggaaaaaaccggacctaaacagactgaggggttccgcaaaaggtggtttaccatggacgataggcgactgatgtactttaaagaccctctggacgcttttgctagaggcgaagtatttatcgggtcgaaggaatccggatacacagtgttacacggcttccctcccagtacccagggtcaccactggccacacgggattaccattgtcactcccgaccggaaatttcttttcgcttgcgagactgagtctgaccagcgtgaatgggtcgcagcctttcagaaggctgtcgacagacccatgctcccacaggagtacgccgtggaggctcattttaaacataagccctag

SEQ ID NO: 103718 - DNA, 783 bp, Artificial Sequence
  derived and/or modified sequence
atggtgcttgcctcactagaattgctcagggaacagtggatccgcgctaagtatgagcgacaggaatttatttaccctgaaaagcaggaaccgtattctgcaggctaccgcgagggatttctatggaagaggggcagggataatggacagtttctcagtcggaagtttgtgctcactgagcgtgaaggtgccctgaaatattttaatcggaacgatgctaagatcggccatccccacggacttcaggttacttacctcaaagacaattcaacaagaaatatttttatttatcacgaggacggaaaagagatagtggattggttcaacgctctccgcgcagccagattccactatctgcaagtggctttccctggggcaggcgacgcagatctggtgcccaaattgagcagaaactatctcaaagaggggtatatggaaaaaaccgggcctaagcagaccgagggctttcgaaagaggtggtttaccatggacgacagacggctgatgtattttaaagaccctctggacgccttcgctcggggagaggtcttcataggcagcaaagagagcggctataccgttcttcacggattcccccctagtacccaggggcaccactggccacacgggatcaccattgtgacacctgatagaaagttcctatttgcttgtgaaactgagagtgatcaaagggagtgggtggcagcctttcagaaggcggtagacaggccaatgttgccccaggagtatgctgtagaagctcattttaagcacaaaccctag

SEQ ID NO: 103719 - DNA, 984 bp, Artificial Sequence
  derived and/or modified sequence
atggccagcttcctgaagggcgcccacgtgaccatcaacgccagagccgaggaggacgtggagcccgagtgcatcatggagaaggtggccaaggccagcggcgccaactacagcttccacaaggagagcggcagattccaggacgtgggcccccaggcccccgtgggcagcgtgtaccagaagaccaacgccgtgagcgagatcaagagagtgggcaaggacagcttctgggccaaggccgagaaggaggaggagaacagaagactggaggagaagagaagagccgaggaggcccagagacagctggagcaggagagaagagagagagagctgagagaggccgccagaagagagcagagataccaggagcagggcggcgaggccagcccccagagaacctgggagcagcagcaggaggtggtgagcagaaacagaaacgagcaggagagcgccgtgcaccccagagagatcttcaagcagaaggagagagccatgagcaccaccagcatcagcagcccccagcccggcaagctgagaagccccttcctgcagaagcagctgacccagcccgagacccacttcggcagagagcccgccgccgccatcagcagacccagagccgacctgcccgccgaggagcccgcccccagcacccccccctgcctggtgcaggccgaggaggaggccgtgtacgaggagccccccgagcaggagaccttctacgagcagccccccctggtgcagcagcagggcgccggcagcgagcacatcgaccaccacatccagggccagggcctgagcggccagggcctgtgcgccagagccctgtacgactaccaggccgccgacgacaccgagatcagcttcgaccccgagaacctgatcaccggcatcgaggtgatcgacgagggctggtggagaggctacggccccgacggccacttcggcatgttccccgccaactacgtggagctgatcgagtag

SEQ ID NO: 103720 - DNA, 984 bp, Artificial Sequence
  derived and/or modified sequence
atggcctccttcctgaaaggggcccatgtgactattaacgccagggcggaggaggatgtggagcctgaatgcatcatggaaaaagtggccaaggcctccggagcaaattactcattccacaaggagtcaggacgatttcaggatgtgggcccccaagcacccgtggggtctgtgtatcagaaaactaatgctgtcagtgagattaagagagttgggaaggacagcttctgggctaaggctgagaaagaggaagagaaccggcgattagaagagaagcgccgagcagaagaagcgcagaggcagcttgaacaggagaggcgggagcgggagcttcgggaggcagctagacgtgagcagcgatatcaagagcaagggggtgaggcctccccccagagaacatgggagcaacagcaggaggttgtcagccgcaatcggaacgaacaagaatccgctgtacatcctagggagatcttcaagcagaaggaacgagctatgtctactaccagcatctcttcccctcagcctggcaagctcaggtcaccgttccttcaaaaacaactcactcaacccgaaacccacttcggccgcgagcccgcagcggccatcagccgtccacgcgcggacttgcccgcggaggagcccgcccccagtacacctccctgcctagtacaggcagaagaggaagcagtctatgaggagccgccggagcaggaaacattctacgaacagcctcccctcgtgcagcagcaaggtgccggaagcgaacacatcgaccaccatattcaagggcaagggctgtcagggcagggcctctgtgctcgcgccttgtacgactaccaagctgccgacgacacagagatttcctttgaccccgaaaatctgatcacaggaattgaagtgattgatgaggggtggtggcggggttacggaccagacggacatttcggaatgttcccagccaactacgtcgagctgatcgagtag

SEQ ID NO: 103721 - DNA, 984 bp, Artificial Sequence
  derived and/or modified sequence
atggccagcttcctgaagggggcccacgtgaccatcaatgcccgggcagaggaggatgtggagcctgagtgcatcatggagaaggtggccaaggccagcggggccaactacagcttccacaaggagagcggccgcttccaggatgtgggcccccaggcccctgtgggctctgtgtaccagaagaccaatgctgtgtctgagatcaagagggtgggcaaggacagcttctgggccaaggccgagaaggaggaggagaacagaaggctggaggagaagagaagagctgaggaggcccagaggcagctggagcaggagcggcgggagcgggagctgcgggaggccgcccggcgggagcagcgctaccaggagcagggcggggaggccagcccccagaggacctgggagcagcagcaggaggtggtgtccaggaacagaaatgagcaggagagcgctgtgcacccccgggagatcttcaagcagaaggagcgggccatgagcaccaccagcatcagcagcccccagcccgggaagctgcggagccccttcctgcagaagcagctgacccagcctgagacccacttcggccgggagcctgctgctgccatcagccggcccagggctgacctgcctgctgaggagcccgcccccagcaccccaccctgcctggtgcaggccgaggaggaggccgtgtatgaggagcccccagagcaggagaccttctatgagcagccccccctggtgcagcagcagggcgccggcagcgagcacatcgaccaccacatccagggccagggcctgagcggccagggcctgtgtgcccgggccctgtatgactaccaggccgcagatgacacagagatcagctttgatcctgagaacctgatcaccggcatcgaggtgattgatgagggctggtggaggggctacggcccagatggccacttcggcatgtttcctgccaactacgtggagctgattgaatag

SEQ ID NO: 103722 - DNA, 984 bp, Artificial Sequence
  derived and/or modified sequence
atggccagcttcctgaagggcgcccacgtgaccatcaacgcccgggccgaagaggatgtcgaacccgaatgtatcatggaaaaagtggcgaaagcttcaggcgccaactactcttttcataaggagtccggcagatttcaggacgttggtcctcaagctcccgtggggagtgtgtaccagaagactaatgctgtatctgagattaaaagggtcggaaaagactccttctgggccaaggcggaaaaagaggaggaaaaccgacgcctggaggagaagcgtcgagctgaagaggctcagcgacagttagagcaggagcgtagggaaagagagctaagggaggctgctaggcgggagcagcgctaccaggagcagggcggagaggcatccccccagcgaacgtgggagcaacaacaggaagtggtgtctcgtaatcggaacgaacaagagagcgctgtccaccctcgcgaaatttttaagcaaaaagagcgggccatgtccaccacctcaatctcttcaccgcaacctggcaaactgagatcaccttttttacagaaacaattgacccagcccgaaacccatttcggaagggagcctgctgccgcaatttcccgaccacgggccgaccttcccgccgaggagccggctccctcaacacccccctgtctagtgcaggcagaagaagaagcggtgtatgaagagccgcccgaacaagagactttctacgagcagccacccttggtgcagcagcagggcgccgggtccgagcacatcgatcaccacatccagggccagggcttgtcaggccaggggctgtgcgcgcgcgctctttacgattaccaagccgctgacgacaccgaaattagcttcgaccctgaaaaccttatcactggcatcgaagtgatagacgaaggttggtggagggggtatggaccagacggccattttggcatgttccccgccaattatgtcgaattgatcgaatag

SEQ ID NO: 103723 - DNA, 984 bp, Artificial Sequence
  derived and/or modified sequence
atggcgtcattccttaagggcgcacacgtcacaattaatgccagggctgaagaggatgtcgaaccagagtgtatcatggaaaaggtggcaaaggcctccggggcaaattacagttttcataaggagtctgggcgttttcaggatgttggtccgcaagcccctgtgggatctgtctaccaaaagactaacgctgtgtctgaaattaagagagtaggcaaagattccttttgggccaaggccgaaaaggaagaggagaacaggcggttggaggaaaaacggagagccgaggaggcccaaagacaactggagcaggagcggagagaaagggaactgcgcgaagcggctcggagagagcagaggtatcaggaacaagggggtgaggcaagcccccagcggacgtgggagcagcagcaggaagtcgtctctcgtaatcggaacgagcaggagagcgccgtccacccgagggagattttcaagcagaaggagagagctatgtccacaacgtctatatcttcgccacagcccggaaaacttagatcccctttccttcaaaagcagctgacccagcccgagacccactttggtagagaacccgcagctgcaatttcccggccacgcgctgacctacctgctgaggaacccgctccaagtacacctccctgtctggttcaagccgaggaggaggcagtctacgaagagccacctgaacaggagacattttatgagcagccgcctttggttcagcagcagggcgcaggtagcgaacatattgatcaccacatacaggggcaggggctatccggacaagggctgtgtgcccgtgctttgtatgattatcaggcggcagacgacacagagatcagctttgacccagaaaacttgatcactgggatcgaagttattgatgagggatggtggcggggttatggcccagatggtcactttgggatgttccctgctaactatgtcgaactgattgagtag

SEQ ID NO: 103724 - protein, 336 aa, Artificial Sequence
  derived and/or modified sequence
MKATAMTSAWLAQGGAHVTINARAEEDVEPECIMEKVAKASGANYSFHKESGRFQDVGPQAPVGSVYQKTNAVSEIKRVGKDSFWAKAEKEEENRRLEEKRRAEEAQRQLEQERRERELREAARREQRYQEQGGEASPQSRTWEQQQEVVSRNRNEQESAVHPREIFKQKERAMSTTSISSPQPGKLRSPFLQKQLTQPETHFGREPAAAISRPRADLPAEEPAPSTPPCLVQAEEEAVYEEPPEQETFYEQPPLVQQQGAGSEHIDHHIQGQGLSGQGLCARALYDYQAADDTEISFDPENLITGIEVIDEGWWRGYGPDGHFGMFPANYVELIE

SEQ ID NO: 103725 - DNA, 1011 bp, Artificial Sequence
  derived and/or modified sequence
atgaaggccaccgccatgaccagcgcctggctggcccagggcggcgcccacgtgaccatcaacgccagagccgaggaggacgtggagcccgagtgcatcatggagaaggtggccaaggccagcggcgccaactacagcttccacaaggagagcggcagattccaggacgtgggcccccaggcccccgtgggcagcgtgtaccagaagaccaacgccgtgagcgagatcaagagagtgggcaaggacagcttctgggccaaggccgagaaggaggaggagaacagaagactggaggagaagagaagagccgaggaggcccagagacagctggagcaggagagaagagagagagagctgagagaggccgccagaagagagcagagataccaggagcagggcggcgaggccagcccccagagcagaacctgggagcagcagcaggaggtggtgagcagaaacagaaacgagcaggagagcgccgtgcaccccagagagatcttcaagcagaaggagagagccatgagcaccaccagcatcagcagcccccagcccggcaagctgagaagccccttcctgcagaagcagctgacccagcccgagacccacttcggcagagagcccgccgccgccatcagcagacccagagccgacctgcccgccgaggagcccgcccccagcacccccccctgcctggtgcaggccgaggaggaggccgtgtacgaggagccccccgagcaggagaccttctacgagcagccccccctggtgcagcagcagggcgccggcagcgagcacatcgaccaccacatccagggccagggcctgagcggccagggcctgtgcgccagagccctgtacgactaccaggccgccgacgacaccgagatcagcttcgaccccgagaacctgatcaccggcatcgaggtgatcgacgagggctggtggagaggctacggccccgacggccacttcggcatgttccccgccaactacgtggagctgatcgagtag

SEQ ID NO: 103726 - DNA, 1011 bp, Artificial Sequence
  derived and/or modified sequence
atgaaggctactgctatgaccagcgcctggctcgcccaggggggtgcacacgtcaccattaacgccagggcggaagaggacgtcgagcctgagtgtatcatggagaaggtggctaaagctagtggtgccaactatagcttccataaggaatctggccgtttccaggacgttggaccacaggccccagttgggtctgtgtatcagaaaactaatgccgtcagtgaaatcaaacgagtgggtaaagactcattttgggccaaggcagaaaaagaggaggaaaaccggcgcctggaggaaaagcgccgagcagaggaggcacaaagacagctggagcaagaacggcgcgaacgcgaactcagagaggcggcaagacgggagcagaggtatcaggaacagggcggcgaagcttctccccagtcaagaacctgggagcaacagcaggaagttgtgagccggaacagaaacgaacaagagtccgcggttcaccctagagagatcttcaagcaaaaggagcgcgccatgtccactacctcaatttccagcccacagccaggaaagctgcgctcgccttttttacaaaaacaactcacccaaccagagacacactttgggagggagccggcggctgctatttcacggccaagagcagacctgccagctgaggaaccagccccttctacacccccctgtcttgtgcaagcggaagaggaagctgtttatgaagagccacccgagcaggagaccttttacgaacagccaccgctggtgcagcagcagggggcgggatccgaacacatcgaccatcacatacaggggcaaggactgtcaggccagggattatgcgcacgagccctgtacgactaccaggctgcagacgatacagaaatatcctttgaccccgagaacctcatcactggcatcgaagtgatagacgagggttggtggcgggggtacggcccggatggacattttgggatgttccctgctaattacgtcgagctgattgagtag

SEQ ID NO: 103727 - DNA, 1011 bp, Artificial Sequence
  derived and/or modified sequence
atgaaggccacagccatgaccagcgcctggctggcccagggcggggcccacgtgaccatcaatgcccgggcagaggaggatgtggagcctgagtgcatcatggagaaggtggccaaggccagcggggccaactacagcttccacaaggagagcggccgcttccaggatgtgggcccccaggcccctgtgggctctgtgtaccagaagaccaatgctgtgtctgagatcaagagggtgggcaaggacagcttctgggccaaggccgagaaggaggaggagaacagaaggctggaggagaagagaagagctgaggaggcccagaggcagctggagcaggagcggcgggagcgggagctgcgggaggccgcccggcgggagcagcgctaccaggagcagggcggggaggccagcccccagagcaggacctgggagcagcagcaggaggtggtgtccaggaacagaaatgagcaggagagcgctgtgcacccccgggagatcttcaagcagaaggagcgggccatgagcaccaccagcatcagcagcccccagcccgggaagctgcggagccccttcctgcagaagcagctgacccagcctgagacccacttcggccgggagcctgctgctgccatcagccggcccagggctgacctgcctgctgaggagcccgcccccagcaccccaccctgcctggtgcaggccgaggaggaggccgtgtatgaggagcccccagagcaggagaccttctatgagcagccccccctggtgcagcagcagggcgccggcagcgagcacatcgaccaccacatccagggccagggcctgagcggccagggcctgtgtgcccgggccctgtatgactaccaggccgcagatgacacagagatcagctttgatcctgaaaatctcatcactggaattgaggtgattgatgagggctggtggaggggctacggcccagatggccacttcggcatgtttcctgccaactacgtggagctgattgaatag

SEQ ID NO: 103728 - DNA, 1011 bp, Artificial Sequence
  derived and/or modified sequence
atgaaggccaccgccatgaccagcgcctggctggcccagggcggcgctcacgtgaccattaatgcccgcgcagaggaagatgtggagccggagtgcataatggagaaggtagccaaggcctccggcgctaattactctttccacaaagagagtggccggttccaggacgtgggaccgcaggccccagttggatccgtgtaccaaaagactaacgctgttagtgaaattaagcgcgttggaaaagatagtttctgggctaaagcggaaaaagaggaagagaacaggaggctggaggagaaacgtagggcagaagaggctcagaggcagcttgagcaggagcggcgcgagagggaattgcgcgaagccgccagaagagaacagagatatcaagagcagggcggggaagctagcccacagagcaggacatgggaacagcagcaggaagtagtgtctaggaacaggaatgagcaggagagcgcagtgcatccccgtgaaatttttaagcagaaagagcgtgcaatgagcacaacctctatttcttcccctcagccaggcaagctgagatctccttttttacagaagcaactcacacagcccgaaactcatttcggtagagaacctgccgctgctatttcccgccccagggccgatctgcccgccgaggagcccgctccaagcactcccccctgcctcgttcaggctgaggaagaggctgtttatgaagaacccccggagcaagagactttctacgagcagcccccacttgtgcaacagcagggagcaggatctgaacacatcgatcatcacattcagggccaggggctatccggccaaggtctctgcgcccgagccttatatgactatcaggctgcggacgatacagaaatcagcttcgaccctgaaaacttaataaccggtatcgaagtaattgatgaaggctggtggcgagggtatggccccgatggacacttcggcatgtttcccgctaactacgtggagttgatcgagtag

SEQ ID NO: 103729 - DNA, 1011 bp, Artificial Sequence
  derived and/or modified sequence
atgaaagcgactgcgatgacaagtgcctggctagcacagggtggcgcacatgtgactatcaacgcccgtgcggaagaggacgtcgagccggagtgcatcatggagaaggttgccaaggcatctggcgcaaactattcttttcataaggagtcggggcgatttcaggacgtcggcccacaggcacctgttgggtccgtgtaccagaaaactaatgcggtgagcgagataaaacgtgtcggcaaggatagcttctgggccaaggcagagaaggaagaagaaaaccgtcgcctagaagagaagagacgggctgaggaagcccagcggcaactcgaacaggaacggcgtgagagggaactcagagaagctgctcgccgagaacagcgttatcaggagcaaggcggagaagcatcccctcagtcccggacctgggaacagcagcaggaagtagtgtcccgaaacagaaatgagcaggagtccgccgttcacccccgtgaaatattcaaacagaaagagcgggctatgagtacaacaagcattagcagcccccagccgggaaaactaaggagtccgtttcttcagaagcaactcacacagcccgaaacgcacttcgggagagaacctgccgctgccatttcacggcctcgtgccgatcttcccgcagaggagcctgcccctagcacccccccttgtcttgtccaagctgaggaggaggccgtctatgaagaaccccctgagcaggaaactttctacgagcagccccctctggtgcaacaacagggcgctggttccgagcacatcgaccatcatatacaggggcagggcctgtctggccaaggactctgcgctagagctctctacgattatcaggcggcagacgataccgaaatctcattcgacccagaaaatctcattaccggaatcgaagtgatagatgaaggctggtggcgcggatacggccctgatggccatttcggaatgtttccagccaattacgtcgagctcatcgaatag

SEQ ID NO: 103730 - DNA, 1447 bp, Artificial Sequence
  derived and/or modified sequence
gagactgcggggcgggccatggcggcgaacctgagccggaacgggccagcgctgcaagaggcctacgtgcgggtggtcaccgagaagtccccgaccgactgggctctctttacctatgaaggcaacagcaatgacatccgcgtggctggcacaggggggggcccatgtgaccatcaacgcacgggccgaggaggatgtggagcctgagtgcatcatggagaaggtggccaaggcttcaggtgccaactacagctttcacaaggagagtggccgcttccaggacgtgggaccccaggccccagtgggctctgtgtaccagaagaccaatgccgtgtctgagattaaaagggttggtaaagacagcttctgggccaaagcagagaaggaggaggagaaccgtcggctggaggaaaagcggcgggccgaggaggcacagcggcagctggagcaggagcgccgggagcgtgagctgcgtgaggctgcacgccgggagcagcgctatcaggagcagggtggcgaggccagcccccagagcaggacgtgggagcagcagcaagaagtggtttcaaggaaccgaaatgagcaggagtctgccgtgcacccgagggagattttcaagcagaaggagagggccatgtccaccacctccatctccagtcctcagcctggcaagctgaggagccccttcctgcagaagcagctcacccaaccagagacccactttggcagagagccagctgctgccatctcaaggcccagggcagatctccctgctgaggagccggcgcccagcactcctccatgtctggtgcaggcagaagaggaggctgtgtatgaggaacctccagagcaggagaccttctacgagcagcccccactggtgcagcagcaaggtgctggctctgagcacattgaccaccacattcagggccaggggctcagtgggcaagggctctgtgcccgtgccctgtacgactaccaggcagccgacgacacagagatctcctttgaccccgagaacctcatcacgggcatcgaggtgatcgacgaaggctggtggcgtggctatgggccggatggccattttggcatgttccctgccaactacgtggagctcattgagtgaggctgagggcacatcttgcccttcccctctcagacatggcttccttattgctggaagaggaggcctgggagttgacattcagcactcttccaggaataggacccccagtgaggatgaggcctcagggctccctccggcttggcagactcagcctgtcaccccaaatgcagcaatggcctggtgattcccacacatccttcctgcatcccccgaccctcccagacagcttggctcttgcccctgacaggatactgagccaagccctgcctgtggccaagccctgagtggccactgccaagctgcggggaagggtcctgagca

SEQ ID NO: 103731 - protein, 325 aa, Artificial Sequence
  derived and/or modified sequence
MRLPRRAALGLLPLLLLLPPAPEAAKKPTPCHRCRGLVDKFNQGMVDTAKKNFGGGNTAWEEKTLSKYESSEIRLLEILEGLCESSDFECNQMLEAQEEHLEAWWLQLKSEYPDLFEWFCVKTLKVCCSPGTYGPDCLACQGGSQRPCSGNGHCSGDGSRQGDGSCRCHMGYQGPLCTDCMDGYFSSLRNETHSICTACDESCKTCSGLTNRDCGECEVGWVLDEGACVECDSSCVGCTGEGPGNCKECISGYAREHGQCADVDECSLAEKTCVRKNENCYNTPGSYVCVCPDGFEETEDACVPPAEAEATEGESPTQLPSREDL

SEQ ID NO: 103732 - DNA, 1242 bp, Artificial Sequence
  derived and/or modified sequence
ggagctccggctgcgtcttcccgcagcgctacccgccatgcgcctgccgcgccgggccgcgctggggctcctgccgcttctgctgctgctgccgcccgcgccggaggccgccaagaagccgacgccctgccaccggtgccgggggctggtggacaagtttaaccaggggatggtggacaccgcaaagaagaactttggcggcgggaacacggcttgggaggaaaagacgctgtccaagtacgagtccagcgagattcgcctgctggagatcctggaggggctgtgcgagagcagcgacttcgaatgcaatcagatgctagaggcgcaggaggagcacctggaggcctggtggctgcagctgaagagcgaatatcctgacttattcgagtggttttgtgtgaagacactgaaagtgtgctgctctccaggaacctacggtcccgactgtctcgcatgccagggcggatcccagaggccctgcagcgggaatggccactgcagcggagatgggagcagacagggcgacgggtcctgccggtgccacatggggtaccagggcccgctgtgcactgactgcatggacggctacttcagctcgctccggaacgagacccacagcatctgcacagcctgtgacgagtcctgcaagacgtgctcgggcctgaccaacagagactgcggcgagtgtgaagtgggctgggtgctggacgagggcgcctgtgtggagtgtgactccagctgtgtgggctgcacaggggaaggcccaggaaactgtaaagagtgtatctctggctacgcgagggagcacggacagtgtgcagatgtggacgagtgctcactagcagaaaaaacctgtgtgaggaaaaacgaaaactgctacaatactccagggagctacgtctgtgtgtgtcctgacggcttcgaagaaacggaagatgcctgtgtgccgccggcagaggctgaagccacagaaggagaaagcccgacacagctgccctcccgcgaagacctgtaatgtgccggacttaccctttaaattattcagaaggatgtcccgtggaaaatgtggccctgaggatgccgtctcctgcagtggacagcggcggggagaggctgcctgctctctaacggttgattctcatttgtcccttaaacagctgcatttcttggttgttcttaaacagacttgtatattttgatacagttctttgtaataaaattgaccattgtaggtaatcagga

SEQ ID NO: 103733 - DNA, 978 bp, Artificial Sequence
  derived and/or modified sequence
atgcgcctgccaaggcgtgccgctttgggattgttgcccctgcttttgctgctgccacccgctcccgaggccgctaagaaacccacaccttgtcacaggtgtaggggattagtcgacaaattcaaccaaggcatggttgacacagccaagaaaaatttcggcggaggcaatacagcctgggaagaaaagactttgagcaagtacgaaagctcagagatccgactgctagaaatattagaggggttgtgtgaatccagcgactttgaatgtaatcagatgctggaagctcaggaggagcacctcgaggcctggtggcttcagctcaagagtgaataccctgatctattcgagtggttttgtgttaaaaccctgaaggtgtgttgcagccccggaacatatgggccagattgcctggcctgtcaggggggttcccagcgcccttgcagcggcaacgggcactgctctggtgacggctcacgccagggcgatgggagctgtcgttgccacatgggctatcaggggccactgtgtacagattgcatggacgggtatttctcaagtttgcggaatgagactcattcaatctgcaccgcatgtgatgaaagctgcaagacttgtagcgggctgaccaaccgggattgtggggagtgcgaggttggatgggtcctggatgagggggcttgcgtagagtgtgattcctcctgcgtgggctgtaccggagaagggcctgggaactgcaaggagtgtatttctggctacgcgagagagcatggccagtgcgcagatgtggacgaatgcagtttggctgagaagacttgtgtccgtaagaatgaaaattgctataacacacctggttcctatgtgtgtgtatgccctgatggcttcgaagaaaccgaagacgcctgcgtgccgccagcagaagccgaggcgacagagggcgagtcgcctactcagctgccaagccgggaagacttgtag

SEQ ID NO: 103734 - DNA, 978 bp, Artificial Sequence
  derived and/or modified sequence
atgagactcccaagaagggctgccctcggcttgctcccattgttattactgctgccacccgctccagaagccgccaagaagcctaccccgtgtcatcgttgcagggggctggtggacaagttcaaccaaggcatggtcgacaccgctaagaagaactttggtggcggcaataccgcctgggaggagaagacacttagcaagtatgagagtagcgagatcagattgctggaaattctggaagggttgtgtgagagttctgactttgagtgcaatcagatgctggaggcgcaagaggagcatttggaggcctggtggttacagttaaaatcggaataccccgacctattcgagtggttttgcgtaaagaccctgaaagtgtgctgtagtcccggaacatacggacctgattgtctggcatgtcagggcggatctcagcggccatgttcaggaaatggacactgttctggcgatggttctcgccagggtgatgggtcgtgtagatgtcatatggggtaccagggacctttatgtactgactgtatggacggatacttctcctctcttcgcaatgaaacccacagcatttgtacggcctgtgacgaaagctgtaagacctgttccggccttacaaatagagactgcggggaatgcgaagttgggtgggttttggacgaaggggcttgcgtggaatgcgactctagctgcgtggggtgcactggcgaaggtccgggcaattgtaaagaatgtatatccggctatgccagagagcacggccaatgtgcggatgtggatgagtgcagcttggcagagaaaacctgtgtgcgaaaaaatgaaaactgctataacacccctggtagctatgtatgtgtgtgccccgacgggtttgaagagactgaggatgcttgcgtacccccagccgaggctgaagcgaccgagggggaaagcccgacacagctgccaagcagagaagatctgtag

SEQ ID NO: 103735 - DNA, 978 bp, Artificial Sequence
  derived and/or modified sequence
atgagactgcctagacgagctgccctcggtttactccctctccttctcctcctgccccctgcgccagaagccgccaaaaagccaaccccatgtcaccgctgcagaggactggtcgataagtttaaccagggaatggtcgacaccgctaagaagaactttgggggcggcaacactgcttgggaagaaaagacgctgagtaaatacgagagcagcgagattcggttactggaaattctcgagggtttgtgtgagtcaagtgatttcgaatgcaaccagatgcttgaagcccaagaggagcacttggaggcctggtggttacagttaaaatcggaataccccgacctattcgagtggttttgcgtaaagaccctgaaagtgtgctgtagtcccggaacatacggacctgattgtctggcatgtcagggcggatctcagcggccatgttcaggaaatggacactgttctggcgatggttctcgccagggtgatgggtcgtgtagatgtcatatggggtaccagggacctttatgtactgactgtatggacggatacttctcctctcttcgcaatgaaacccacagcatttgtacggcctgtgacgaaagttgcaagacctgttcaggcttgaccaatagagactgcggtgagtgcgaggtaggatgggtgcttgatgaaggcgcctgcgtggaatgcgacagcagctgcgtcggttgcacaggagaaggccctggaaactgcaaagaatgtattagcggctacgccagagaacacggacagtgtgcagatgtggacgaatgttctctcgccgagaagacatgcgttaggaagaatgagaactgctataatacccccggcagctacgtgtgcgtgtgccccgacggcttcgaagaaacagaggatgcctgcgtccctcctgctgaagctgaagccaccgaaggagagtcaccaacacaactaccatcccgggaggacctctag

SEQ ID NO: 103736 - DNA, 978 bp, Artificial Sequence
  derived and/or modified sequence
atgagactgcccagaagagccgccctgggcctgctgcccctgctgctgctgctgccccccgcccccgaggccgccaagaagcccaccccctgccacagatgcagaggcctggtggacaagttcaaccagggcatggtggacaccgccaagaagaacttcggcggcggcaacaccgcctgggaggagaagaccctgagcaagtacgagagcagcgagatcagactgctggagatcctggagggcctgtgcgagagcagcgacttcgagtgcaaccagatgctggaggcccaggaggagcacctggaggcctggtggctgcagctgaagagcgagtaccccgacctgttcgagtggttctgcgtgaagaccctgaaggtgtgctgcagccccggcacctacggccccgactgcctggcctgccagggcggcagccagagaccctgcagcggcaacggccactgcagcggcgacggcagcagacagggcgacggcagctgcagatgccacatgggctaccagggccccctgtgcaccgactgcatggacggctacttcagcagcctgagaaacgagacccacagcatctgcaccgcctgcgacgagagctgcaagacctgcagcggcctgaccaacagagactgcggcgagtgcgaggtgggctgggtgctggacgagggcgcctgcgtggagtgcgacagcagctgcgtgggctgcaccggcgagggccccggcaactgcaaggagtgcatcagcggctacgccagagagcacggccagtgcgccgacgtggacgagtgcagcctggccgagaagacctgcgtgagaaagaacgagaactgctacaacacccccggcagctacgtgtgcgtgtgccccgacggcttcgaggagaccgaggacgcctgcgtgccccccgccgaggccgaggccaccgagggcgagagccccacccagctgcccagcagagaggacctgtag

SEQ ID NO: 103737 - DNA, 978 bp, Artificial Sequence
  derived and/or modified sequence
atgagattaccaagacgcgccgccctcggccttcttccccttcttctcctgctgcctccagcgcccgaggctgcgaaaaaacctacgccgtgtcatcggtgccggggcctggtcgataagttcaatcaggggatggtggataccgccaagaaaaacttcggtggtgggaatacggcttgggaggaaaagactctgtctaaatacgagtccagcgaaatcagactgctggaaatactagagggcctatgcgaatcatcagactttgagtgcaatcaaatgctggaggcccaggaagagcacttggaagcttggtggctccagctcaaatccgaatacccggacctgtttgagtggttttgcgttaaaactctgaaggtctgctgcagtcccggaacatatgggccagattgcctggcttgtcaaggagggagtcagagaccatgcagtggcaacggtcattgttcaggtgacggttcgcgccagggggacggatcatgtaggtgtcacatgggctatcaggggcccttatgtactgactgcatggacggatatttcagctcgctgaggaatgagactcactccatctgtactgcctgtgatgagagttgcaaaacttgttctggcctgactaacagggactgtggtgaatgtgaggtgggctgggtcctcgatgaaggagcctgtgtcgaatgcgacagcagttgcgtgggttgcaccggtgaaggaccaggcaactgtaaggaatgcatttccggctatgccagggaacacgggcagtgcgctgatgttgacgagtgctccttggcagagaaaacttgcgttcgaaaaaatgaaaattgttataacaccccggggtcatacgtatgtgtgtgtccagacggattcgaggaaaccgaggatgcttgtgtgccaccagctgaggctgaggccaccgagggtgagagtcccacccagcttcctagtagggaggatctgtag

SEQ ID NO: 103738 - DNA, 978 bp, Artificial Sequence
  derived and/or modified sequence
atgaggctgcccaggagagctgccctgggcctgctgcccctgctgctgctgctgcccccagcccctgaggccgccaagaagcccaccccctgccaccgctgccggggcctggtggacaagttcaaccagggcatggtggacacagccaagaagaactttggaggcggcaacacagcctgggaggagaagaccctgagcaaatatgagagcagcgagatccggctgctggagatcctggagggcctgtgtgagagcagtgactttgagtgcaaccagatgctggaggcccaggaggagcacctggaggcctggtggctgcagctgaagtctgagtacccagacctgtttgagtggttctgtgtgaagaccctgaaggtgtgctgcagccctggcacctacggccctgactgcctggcctgccagggcggcagccagaggccctgcagcggaaatggccactgcagcggagatggcagccggcagggagatggcagctgccgctgccacatgggctaccagggccccctgtgcacagactgcatggatggctacttcagcagcctgagaaatgagacccacagcatctgcacagcctgtgatgagagctgcaagacctgcagcggcctgaccaacagagactgtggggagtgtgaggtgggctgggtgctggatgagggcgcctgtgtggagtgtgacagcagctgtgtgggctgcacaggagagggccctggcaactgcaaggagtgcatcagcggctacgcccgggagcacggccagtgtgctgatgtggatgaatgttccctggccgagaagacctgtgtgaggaagaatgaaaactgctacaacaccccaggcagctatgtgtgtgtgtgcccagatggctttgaggagacagaagatgcctgtgtgcccccagctgaggccgaggccacagaaggagagagccccacccagctgcccagccgggaggacctgtag

SEQ ID NO: 103739 - DNA, 978 bp, Artificial Sequence
  derived and/or modified sequence
atgcggctgccccggcgggccgccctgggcctgctgcccctgctgctgctcctgcctcccgcacccgaagcagcaaaaaagcctactccatgccatagatgccggggattagttgacaaatttaaccaaggcatggttgacacagcaaaaaaaaattttgggggtggcaatactgcctgggaggaaaagaccctgtccaaatacgaatcgagcgagattcggctactcgagattctggagggattgtgcgaatcatcagatttcgaatgcaatcagatgctagaagcacaggaggagcacttggaagcatggtggctgcagttaaagagcgagtatccggatctcttcgaatggttctgcgtgaagactttgaaggtttgttgctcacccgggacatacggaccagattgtttagcctgccaaggaggatctcaacgcccctgcagcggcaatgggcactgctccggagacggctctaggcaaggcgatggctcctgccggtgccacatgggttatcaaggacccctgtgtacagattgtatggacggctatttctccagtctcaggaatgagacacatagcatttgtacagcatgtgatgaatcgtgtaaaacatgttccgggctcaccaaccgggactgtggtgaatgtgaagtgggttgggtgcttgacgaaggcgcttgtgttgagtgcgattctagttgtgtgggatgtaccggagagggccctggtaactgcaaagagtgcatttctggatatgcaagggaacacgggcagtgcgccgacgtcgacgagtgtagcttagccgagaaaacgtgtgtgcggaaaaacgagaactgctacaacacccctgggtcctatgtgtgtgtgtgcccagacggctttgaggaaactgaggacgcgtgcgttccccctgccgaggctgaagcgacagagggcgaatctcccacccagcttccaagcagagaggacctatag

SEQ ID NO: 103740 - RNA, 978 nt, Artificial Sequence
  derived and/or modified sequence
augagacucccaagaagggcugcccucggcuugcucccauuguuauuacugcugccacccgcuccagaagccgccaagaagccuaccccgugucaucguugcagggggcugguggacaaguucaaccaaggcauggucgacaccgcuaagaagaacuuugguggcggcaauaccgccugggaggagaagacacuuagcaaguaugagaguagcgagaucagauugcuggaaauucuggaaggguugugugagaguucugacuuugagugcaaucagaugcuggaggcgcaagaggagcauuuggaggccuggugguuacaguuaaaaucggaauaccccgaccuauucgagugguuuugcguaaagacccugaaagugugcuguagucccggaacauacggaccugauugucuggcaugucagggcggaucucagcggccauguucaggaaauggacacuguucuggcgaugguucucgccagggugaugggucguguagaugucauaugggguaccagggaccuuuauguacugacuguauggacggauacuucuccucucuucgcaaugaaacccacagcauuuguacggccugugacgaaagcuguaagaccuguuccggccuuacaaauagagacugcggggaaugcgaaguuggguggguuuuggacgaaggggcuugcguggaaugcgacucuagcugcguggggugcacuggcgaagguccgggcaauuguaaagaauguauauccggcuaugccagagagcacggccaaugugcggauguggaugagugcagcuuggcagagaaaaccugugugcgaaaaaaugaaaacugcuauaacaccccugguagcuauguaugugugugccccgacggguuugaagagacugaggaugcuugcguacccccagccgaggcugaagcgaccgagggggaaagcccgacacagcugccaagcagagaagaucuguag

SEQ ID NO: 103741 - RNA, 978 nt, Artificial Sequence
  derived and/or modified sequence
augagacugccuagacgagcugcccucgguuuacucccucuccuucuccuccugcccccugcgccagaagccgccaaaaagccaaccccaugucaccgcugcagaggacuggucgauaaguuuaaccagggaauggucgacaccgcuaagaagaacuuugggggcggcaacacugcuugggaagaaaagacgcugaguaaauacgagagcagcgagauucgguuacuggaaauucucgaggguuugugugagucaagugauuucgaaugcaaccagaugcuugaagcccaagaggagcacuuggaggccuggugguuacaguuaaaaucggaauaccccgaccuauucgagugguuuugcguaaagacccugaaagugugcuguagucccggaacauacggaccugauugucuggcaugucagggcggaucucagcggccauguucaggaaauggacacuguucuggcgaugguucucgccagggugaugggucguguagaugucauaugggguaccagggaccuuuauguacugacuguauggacggauacuucuccucucuucgcaaugaaacccacagcauuuguacggccugugacgaaaguugcaagaccuguucaggcuugaccaauagagacugcggugagugcgagguaggaugggugcuugaugaaggcgccugcguggaaugcgacagcagcugcgucgguugcacaggagaaggcccuggaaacugcaaagaauguauuagcggcuacgccagagaacacggacagugugcagauguggacgaauguucucucgccgagaagacaugcguuaggaagaaugagaacugcuauaauacccccggcagcuacgugugcgugugccccgacggcuucgaagaaacagaggaugccugcgucccuccugcugaagcugaagccaccgaaggagagucaccaacacaacuaccaucccgggaggaccucuag

SEQ ID NO: 103742 - protein, 321 aa, Artificial Sequence
  derived and/or modified sequence
MRLPRRAALGLLPLLLLLPPAPEAAKKPTPCHRCRGLVDKFNQGMVDTAKKNFGGGNTAWEEKTLSKYESSEIRLLEILEGLCESSDFECNQMLEAQEEHLEAWWLQLKSEYPDLFEWFCVKTLKVCCSPGTYGPDCLACQGGSQRPCSGNGHCSGDGSRQGDGSCRCHMGYQGPLCTDCMDGYFSSLRNETHSICTACDESCKTCSGLTNRDCGECEVGWVLDEGACVDVDECAAEPPPCSAAQFCKNANGSYTCEDVDECSLAEKTCVRKNENCYNTPGSYVCVCPDGFEETEDACVPPAEAEATEGESPTQLPSREDL

SEQ ID NO: 103743 - DNA, 1230 bp, Artificial Sequence
  derived and/or modified sequence
ggagctccggctgcgtcttcccgcagcgctacccgccatgcgcctgccgcgccgggccgcgctggggctcctgccgcttctgctgctgctgccgcccgcgccggaggccgccaagaagccgacgccctgccaccggtgccgggggctggtggacaagtttaaccaggggatggtggacaccgcaaagaagaactttggcggcgggaacacggcttgggaggaaaagacgctgtccaagtacgagtccagcgagattcgcctgctggagatcctggaggggctgtgcgagagcagcgacttcgaatgcaatcagatgctagaggcgcaggaggagcacctggaggcctggtggctgcagctgaagagcgaatatcctgacttattcgagtggttttgtgtgaagacactgaaagtgtgctgctctccaggaacctacggtcccgactgtctcgcatgccagggcggatcccagaggccctgcagcgggaatggccactgcagcggagatgggagcagacagggcgacgggtcctgccggtgccacatggggtaccagggcccgctgtgcactgactgcatggacggctacttcagctcgctccggaacgagacccacagcatctgcacagcctgtgacgagtcctgcaagacgtgctcgggcctgaccaacagagactgcggcgagtgtgaagtgggctgggtgctggacgagggcgcctgtgtggatgtggacgagtgtgcggccgagccgcctccctgcagcgctgcgcagttctgtaagaacgccaacggctcctacacgtgcgaagatgtggacgagtgctcactagcagaaaaaacctgtgtgaggaaaaacgaaaactgctacaatactccagggagctacgtctgtgtgtgtcctgacggcttcgaagaaacggaagatgcctgtgtgccgccggcagaggctgaagccacagaaggagaaagcccgacacagctgccctcccgcgaagacctgtaatgtgccggacttaccctttaaattattcagaaggatgtcccgtggaaaatgtggccctgaggatgccgtctcctgcagtggacagcggcggggagaggctgcctgctctctaacggttgattctcatttgtcccttaaacagctgcatttcttggttgttcttaaacagacttgtatattttgatacagttctttgtaataaaattgaccattgtaggtaatcagga

SEQ ID NO: 103744 - DNA, 966 bp, Artificial Sequence
  derived and/or modified sequence
atgaggctcccgagacgggctgccctggggctgctgccgctgcttcttctgcttccccctgctccagaagccgcaaagaagcccaccccatgccaccggtgtaggggtttagtggataagtttaatcagggtatggtggatacagctaagaaaaactttggcggaggaaataccgcttgggaggaaaaaactctctcaaagtatgaatcctcagaaatacggttgctagagattctggagggactctgcgaaagcagcgactttgagtgtaatcaaatgctggaagcccaggaggagcacctggaggcatggtggctccagctgaagagcgaataccctgatctgttcgaatggttctgtgtgaaaaccttgaaggtctgctgctcccccggaacctacggacctgactgcctggcctgccagggtggatcccagagaccttgtagcggtaacggtcactgctctggcgacggctctaggcagggcgatggaagctgccggtgtcacatgggataccagggacctctgtgcacggattgtatggatgggtacttttctagcctgagaaatgagacccatagtatctgcacagcctgtgacgaatcctgcaaaacttgttcaggactgactaatagagactgcggcgaatgtgaagtgggttgggtgctggatgaaggagcatgtgtggacgtggacgagtgcgccgctgagccacctccatgttctgcggcacagttttgtaaaaatgccaacggcagttatacgtgtgaggatgtcgacgagtgtagcctggcggaaaagacatgtgtccggaagaacgaaaattgctacaacaccccagggagttatgtgtgcgtctgtcctgatgggttcgaagagaccgaggacgcctgtgtgcccccagcagaggccgaggctactgagggagaatcccctactcaactgccctcccgcgaggacctgtag

SEQ ID NO: 103745 - DNA, 966 bp, Artificial Sequence
  derived and/or modified sequence
atgaggctgccccgtcgcgccgcactcgggctgctccccctgctgttattgttacctccggcccctgaagccgcaaagaaaccgacaccatgccaccggtgtagaggactggtggacaagtttaatcagggaatggtcgacacagctaaaaagaactttggaggtggcaacaccgcctgggaggagaagacactgagtaaatacgaatcctctgaaatcagactcttagaaatcctcgagggactgtgtgaatcatctgacttcgaatgcaatcagatgctggaagcccaggaggaacacctcgaagcctggtggctgcagctgaaatcagagtatcccgaccttttcgaatggttctgcgttaaaacattgaaggtctgctgttctccaggcacatatggcccagactgcctggcctgccagggcggctcacagagaccctgcagtggcaacggacattgctctggtgatggaagcagacagggggacggaagctgcaggtgccacatgggataccagggccctttgtgtacggattgcatggacggatatttttcctcactgcggaacgagactcatagtatctgtactgcttgcgacgagtcctgtaagacctgcagcgggctgaccaaccgagattgtggggaatgtgaagtcgggtgggtgttggacgaaggagcctgtgtggacgtggatgaatgtgccgctgaaccaccaccttgtagcgctgcccagttctgcaaaaacgctaacggatcttacacatgcgaagacgtcgacgaatgttccttggctgaaaaaacatgtgtcagaaaaaacgagaactgctacaacactcccggctcgtacgtctgcgtctgccccgacggattcgaggagactgaggatgcgtgcgtgccgcccgcagaggccgaagccacagaaggtgaaagccctacccagctgcctagccgcgaggatctgtag

SEQ ID NO: 103746 - DNA, 966 bp, Artificial Sequence
  derived and/or modified sequence
atgagactgccgagaagagccgctttggggttgctccccttgttactgctgctcccgcccgcacccgaggcagccaaaaagcccaccccgtgccacagatgccggggattggtggataagtttaaccagggtatggtcgatactgccaagaagaattttggtggcgggaacacagcctgggaggaaaaaactctgtccaaatacgaaagttctgaaataagactcctggaaattctcgaagggctgtgtgaatcttcagattttgaatgtaatcagatgctcgaagcccaggaggaacatctggaagcttggtggctgcagctcaagtccgaataccctgatctgttcgagtggttttgtgtgaagacacttaaggtgtgctgctctccaggcacctacgggcctgactgcctggcttgtcaaggaggaagccagagaccttgcagcgggaatggacattgttcaggcgacggtagcagacaaggcgatggatcctgtagatgccacatgggttatcagggccccctgtgcacggactgtatggacggatacttctcaagtctaagaaacgaaacgcacagcatttgtaccgcttgcgacgagagttgcaagacgtgctcaggtctgaccaatagggactgtggtgagtgtgaagttggatgggtactcgacgaaggagcctgtgtagatgttgatgaatgcgcagccgaacctccaccctgtagcgctgcccaattttgcaagaacgcaaacggatcgtatacatgtgaggatgtggatgagtgttcactggcagagaagacttgcgtgagaaaaaacgagaattgctacaacacccccggcagctatgtctgtgtctgtccagacggattcgaggagacagaagatgcttgtgtaccacctgctgaagctgaggccactgagggggaatctccaacacaactgccaagtcgcgaagatctctag

SEQ ID NO: 103747 - DNA, 966 bp, Artificial Sequence
  derived and/or modified sequence
atgagactgcccagaagagccgccctgggcctgctgcccctgctgctgctgctgccccccgcccccgaggccgccaagaagcccaccccctgccacagatgcagaggcctggtggacaagttcaaccagggcatggtggacaccgccaagaagaacttcggcggcggcaacaccgcctgggaggagaagaccctgagcaagtacgagagcagcgagatcagactgctggagatcctggagggcctgtgcgagagcagcgacttcgagtgcaaccagatgctggaggcccaggaggagcacctggaggcctggtggctgcagctgaagagcgagtaccccgacctgttcgagtggttctgcgtgaagaccctgaaggtgtgctgcagccccggcacctacggccccgactgcctggcctgccagggcggcagccagagaccctgcagcggcaacggccactgcagcggcgacggcagcagacagggcgacggcagctgcagatgccacatgggctaccagggccccctgtgcaccgactgcatggacggctacttcagcagcctgagaaacgagacccacagcatctgcaccgcctgcgacgagagctgcaagacctgcagcggcctgaccaacagagactgcggcgagtgcgaggtgggctgggtgctggacgagggcgcctgcgtggacgtggacgagtgcgccgccgagccccccccctgcagcgccgcccagttctgcaagaacgccaacggcagctacacctgcgaggacgtggacgagtgcagcctggccgagaagacctgcgtgagaaagaacgagaactgctacaacacccccggcagctacgtgtgcgtgtgccccgacggcttcgaggagaccgaggacgcctgcgtgccccccgccgaggccgaggccaccgagggcgagagccccacccagctgcccagcagagaggacctgtag

SEQ ID NO: 103748 - DNA, 966 bp, Artificial Sequence
  derived and/or modified sequence
atgcgcctgccccgtcgggctgccctgggcctgcttcccctgttgctcttattgccacctgcgcccgaagcggccaaaaaaccaaccccatgtcataggtgtcgtgggctggtggataagttcaatcagggcatggtggacacagccaagaagaattttggcggtggcaacactgcatgggaagagaagactctgtcaaagtatgagtcaagcgagattcgactgctggagatactagagggcctctgcgaaagttctgattttgagtgtaatcaaatgctggaagcccaggaagagcatctagaggcctggtggttacagttaaaaagtgagtatcctgatctttttgaatggttttgtgtgaagactctgaaagtgtgttgttctccggggacttacggacccgactgtttagcctgtcagggtggctcacagagaccgtgtagcgggaacgggcattgcagcggggacggttctagacagggcgacgggtcatgcaggtgtcatatgggctatcaaggacctctgtgcactgattgtatggatgggtacttcagctcgctccgtaatgagacgcactcaatctgcactgcctgcgatgagagttgtaagacctgtagcggactgacaaatcgggattgtggcgaatgcgaggttggatgggtgctcgacgagggagcctgcgtggatgtggacgagtgtgccgcggagcctcctccctgcagtgccgcccagttctgtaaaaatgccaacggcagttacacttgcgaagatgttgacgagtgttctcttgccgagaagacatgcgttcgcaaaaatgagaactgctacaatacccccgggagctacgtatgcgtgtgccctgacggattcgaggagacagaggacgcatgtgtcccgcccgccgaggccgaagcaacagagggtgaaagccccacccaattaccaagccgtgaagacctgtag

SEQ ID NO: 103749 - DNA, 966 bp, Artificial Sequence
  derived and/or modified sequence
atgaggctgcccaggagagctgccctgggcctgctgcccctgctgctgctgctgcccccagcccctgaggccgccaagaagcccaccccctgccaccgctgccggggcctggtggacaagttcaaccagggcatggtggacacagccaagaagaactttggaggcggcaacacagcctgggaggagaagaccctgagcaaatatgagagcagcgagatccggctgctggagatcctggagggcctgtgtgagagcagtgactttgagtgcaaccagatgctggaggcccaggaggagcacctggaggcctggtggctgcagctgaagtctgagtacccagacctgtttgagtggttctgtgtgaagaccctgaaggtgtgctgcagccctggcacctacggccctgactgcctggcctgccagggcggcagccagaggccctgcagcggaaatggccactgcagcggagatggcagccggcagggagatggcagctgccgctgccacatgggctaccagggccccctgtgcacagactgcatggatggctacttcagcagcctgagaaatgagacccacagcatctgcacagcctgtgatgagagctgcaagacctgcagcggcctgaccaacagagactgtggggagtgtgaggtgggctgggtgctggatgagggcgcctgtgtggatgtggatgaatgtgccgctgagcccccaccctgcagcgctgcccagttctgcaagaatgccaacggcagctacacctgtgaagatgtggatgaatgttccctggccgagaagacctgtgtgaggaagaatgaaaactgctacaacaccccaggcagctatgtgtgtgtgtgcccagatggctttgaggagacagaagatgcctgtgtgcccccagctgaggccgaggccacagaaggagagagccccacccagctgcccagccgggaggacctgtag

SEQ ID NO: 103750 - DNA, 966 bp, Artificial Sequence
  derived and/or modified sequence
atgcggctgccccggcgggccgccctgggcctgctgcccctgctgctccttttaccacctgccccagaggctgccaagaaaccaacaccttgccaccgatgcaggggcctcgtggacaaatttaaccagggaatggtagacacggcaaaaaagaattttggggggggaaacacagcgtgggaggagaagaccctgagcaagtatgaatctagcgagatccgtttgctggaaatactggaaggcctgtgcgagtcctctgacttcgagtgtaaccaaatgctggaggcccaggaggagcatctagaagcgtggtggttgcagctcaagtcagaatatcccgacttgtttgagtggttttgtgttaaaacacttaaggtgtgttgcagccccggtacctatggccctgattgtttagcctgccaagggggatcccagagaccctgtagcggcaatgggcattgctccggcgatggaagcagacagggcgatggctcttgtcgatgtcatatgggataccaaggcccattatgtacggattgtatggacgggtacttttcctcgctccgaaacgagacacactccatatgtactgcttgcgatgagagctgtaagacatgctctggattgacaaacagggactgcggagaatgtgaagtgggttgggttctcgacgagggcgcttgcgtggacgtggacgagtgtgctgctgagccccccccctgctcggctgcgcagttctgcaagaacgcaaacggtagctatacgtgtgaggatgtagatgaatgctctctagctgagaagacttgtgtaaggaagaacgagaattgctacaatactcctggctcttacgtttgcgtttgtcctgacgggttcgaagagaccgaggatgcctgcgtccccccagccgaggctgaggcaaccgaaggcgagagtcctacccaactgccctcaagagaggacttgtag

SEQ ID NO: 103751 - RNA, 966 nt, Artificial Sequence
  derived and/or modified sequence
augaggcugccccgucgcgccgcacucgggcugcucccccugcuguuauuguuaccuccggccccugaagccgcaaagaaaccgacaccaugccaccgguguagaggacugguggacaaguuuaaucagggaauggucgacacagcuaaaaagaacuuuggagguggcaacaccgccugggaggagaagacacugaguaaauacgaauccucugaaaucagacucuuagaaauccucgagggacugugugaaucaucugacuucgaaugcaaucagaugcuggaagcccaggaggaacaccucgaagccugguggcugcagcugaaaucagaguaucccgaccuuuucgaaugguucugcguuaaaacauugaaggucugcuguucuccaggcacauauggcccagacugccuggccugccagggcggcucacagagacccugcaguggcaacggacauugcucuggugauggaagcagacagggggacggaagcugcaggugccacaugggauaccagggcccuuuguguacggauugcauggacggauauuuuuccucacugcggaacgagacucauaguaucuguacugcuugcgacgaguccuguaagaccugcagcgggcugaccaaccgagauuguggggaaugugaagucggguggguguuggacgaaggagccuguguggacguggaugaaugugccgcugaaccaccaccuuguagcgcugcccaguucugcaaaaacgcuaacggaucuuacacaugcgaagacgucgacgaauguuccuuggcugaaaaaacaugugucagaaaaaacgagaacugcuacaacacucccggcucguacgucugcgucugccccgacggauucgaggagacugaggaugcgugcgugccgcccgcagaggccgaagccacagaaggugaaagcccuacccagcugccuagccgcgaggaucuguag

SEQ ID NO: 103752 - RNA, 966 nt, Artificial Sequence
  derived and/or modified sequence
augagacugccgagaagagccgcuuugggguugcuccccuuguuacugcugcucccgcccgcacccgaggcagccaaaaagcccaccccgugccacagaugccggggauugguggauaaguuuaaccaggguauggucgauacugccaagaagaauuuugguggcgggaacacagccugggaggaaaaaacucuguccaaauacgaaaguucugaaauaagacuccuggaaauucucgaagggcugugugaaucuucagauuuugaauguaaucagaugcucgaagcccaggaggaacaucuggaagcuugguggcugcagcucaaguccgaauacccugaucuguucgagugguuuugugugaagacacuuaaggugugcugcucuccaggcaccuacgggccugacugccuggcuugucaaggaggaagccagagaccuugcagcgggaauggacauuguucaggcgacgguagcagacaaggcgauggauccuguagaugccacauggguuaucagggcccccugugcacggacuguauggacggauacuucucaagucuaagaaacgaaacgcacagcauuuguaccgcuugcgacgagaguugcaagacgugcucaggucugaccaauagggacuguggugagugugaaguuggauggguacucgacgaaggagccuguguagauguugaugaaugcgcagccgaaccuccacccuguagcgcugcccaauuuugcaagaacgcaaacggaucguauacaugugaggauguggaugaguguucacuggcagagaagacuugcgugagaaaaaacgagaauugcuacaacacccccggcagcuaugucugugucuguccagacggauucgaggagacagaagaugcuuguguaccaccugcugaagcugaggccacugagggggaaucuccaacacaacugccaagucgcgaagaucucuag

SEQ ID NO: 103753 - DNA, 1059 bp, Artificial Sequence
  derived and/or modified sequence
atgacccaaaagcctcacaagaagcccggccccggcgagccattagtgttcgggaaaacttttacggatcacatgttgatggtagaatggaacgacaagggctggggccagccccgtatacagccgtttcagaatttaacgctccaccccgccagctcaagcctccattacagcctgcagctctttgaaggcatgaaagcctttaagggcaaggaccagcaggtgcgtctgtttcggccttggctaaacatggaccgcatgctacgctcggcgatgcgtctctgtttgccctccttcgacaaactagaactgctcgaatgcattaggcgcctcattgaagtggataaagattgggtccccgacgccgcgggcacatcactctacgtgcggccagtccttatcggcaacgaaccctcgcttggcgtgtcccagcctacgcgggcccttctgttcgtaatattatgccccgtgggagcctatttccctgggggttctgtcacaccagtttcgcttctagccgacccagctttcattagagcctgggttggcggagtcgggaactacaagctgggaggcaactacggaccaacagtgctggttcaacaagaggccttaaaacgcggttgcgaacaggttctgtggctttatggtcctgatcaccagctgactgaggtgggcaccatgaacatattcgtatactggacacatgaagacggggtattggagctggtgactcccccgctgaatggcgtaattctccctggagttgtgcgacagtctctgctggatatggcccaaacttggggagagtttagagtagtggagcgtaccattaccatgaaacaactccttagagcactggaagaaggccgggtgagggaggtcttcggttcgggcaccgcttgtcaggtctgccccgttcacaggatcctctataaagacaggaacttgcatattcctacaatggagaatggccctgagctgatcctgagattccagaaggaacttaaggaaatccagtacggaatcagagcccacgaatggatgtttccagtgtag

SEQ ID NO: 103754 - DNA, 1059 bp, Artificial Sequence
  derived and/or modified sequence
atgacccagaagccccacaagaagccaggccctggagagcccctggtgtttgggaagaccttcacagaccacatgctgatggtggagtggaatgacaagggctggggccagccccgcatccagcccttccagaacctgaccctgcacccagccagcagcagcctgcactacagcctgcagctgtttgagggcatgaaggccttcaagggcaaggaccagcaggtgcggctcttccggccctggctgaacatggacaggatgctgcggagcgccatgaggctgtgcctgcccagctttgacaagctggagctgctggagtgcatcagaagactcatcgaggtggacaaggactgggtgcctgatgctgctggcaccagcctgtatgtgcggcctgtgctgattggaaatgagcccagcctgggcgtgtcccagcccacccgggccctgctgtttgtgatcctgtgccctgtgggcgcctacttccctgggggctctgtgacccctgtgtccctgctggccgaccctgccttcatccgggcctgggtgggcggcgtgggcaactacaagctgggcggcaactacggccccaccgtgctggtgcagcaggaggccctgaagaggggctgtgagcaggtgctgtggctgtatggccctgaccaccagctgacagaggtgggcaccatgaacatctttgtgtactggacccatgaagatggagtgctggagctggtgaccccacccctgaatggagtcatcctgcccggggtggtgcggcagagcctgctggacatggcccagacctggggcgagttccgggtggtggagaggaccatcaccatgaagcagctgctgcgggccctggaggagggccgggtgcgggaggtgtttggcagcggcacagcctgccaggtgtgccctgtgcaccgcatcctgtacaaggacaggaacctgcacatccccaccatggagaatggacctgagctgatcctgcgcttccagaaggagctgaaggagatccagtatggcatccgggcccacgagtggatgtttcctgtgtag

SEQ ID NO: 103755 - DNA, 1059 bp, Artificial Sequence
  derived and/or modified sequence
atgacccagaagccccacaagaagcccggccccggcgagcccctggtgtttggcaagactttcactgatcacatgctgatggtggagtggaacgacaaaggttgggggcagcctcgcatccagcctttccaaaacctaaccttgcatcccgcctcctcatctcttcattattcccttcaactctttgaaggtatgaaggcctttaagggaaaagatcaacaagtgaggctgttccgaccctggctcaatatggatcgcatgctgcgaagtgccatgagattgtgcctgcctagttttgataaactggagctgctggagtgtattagaaggttgatcgaagtggacaaagactgggtgcctgatgctgccggtacatccttatatgtgcggcctgttctgatcggcaatgaaccatcgctgggggtttctcagcctactcgcgctcttctgttcgtgatcctgtgccctgttggggcctatttccccggcgggtcagtgacccccgtgagccttctggctgaccctgcatttattcgtgcctgggtcgggggggtagggaactacaagctcggtggcaactatggccctacagttctggtgcagcaggaggctcttaaacgggggtgcgagcaggtgttatggttgtacggccctgatcaccagttgaccgaagtcggaactatgaacatcttcgtctactggacccatgaggacggcgtccttgagcttgtgacccctccactaaacggagttattcttccgggtgtcgtgcggcaaagcttgctggacatggcccaaacatggggggagttccgcgtagtagagcggaccattacaatgaaacagctgcttcgggccctagaggaaggcagagtgagagaagtttttggatctggcacagcatgccaggtctgtcccgtgcaccgaatactgtataaagatagaaacctgcacataccgaccatggagaatggtccagaactaattctccgctttcagaaggagttaaaagagatccagtacggcattcgtgcccatgaatggatgtttcctgtctag

SEQ ID NO: 103756 - DNA, 1059 bp, Artificial Sequence
  derived and/or modified sequence
atgactcagaaacctcataaaaaacccggtcctggtgaacccctcgtgtttggaaaaacttttactgatcacatgttaatggtggagtggaatgataagggttggggacagccgaggatccagccttttcagaatttaaccctccatccagccagctcaagtttacattacagcttgcagctgtttgagggaatgaaagcattcaaaggaaaggaccagcaggtccgtctgtttcgcccatggctcaatatggatcgaatgctgcgatccgcgatgcggctctgcctgccaagctttgataagctggagctgctggaatgtatccgtcgattaatcgaggtcgacaaagactgggttcctgatgccgctggaacttccctttacgtccgcccagtactcatcggaaatgaaccatccctcggagtgagtcaacccacacgtgccctgttgtttgtcattctgtgcccagtgggagcctactttcctgggggttctgtaacaccggtgagcttgttagcagaccccgcatttatacgggcatgggtagggggagttgggaactataagctgggtggaaattacgggcctactgttctggtccagcaggaggctctcaaaagaggctgcgaacaggtcctctggctttacgggccagaccaccagctgactgaagttggtaccatgaatatcttcgtgtattggactcatgaggacggcgtcctagaactggtgacccccccacttaatggggttatcttgcccggtgtggtgcgccaatctttactggacatggcacagacctggggggagttcagagttgtggagagaaccattacaatgaagcagctcctgcgggcattggaggaaggccgagtccgcgaggtattcggttcaggcaccgcatgccaggtgtgcccagtgcaccgcattctatataaagatcgcaatctacacattcccaccatggaaaatggtcctgagctgatactccgcttccagaaagagctgaaagagatccagtatggaatcagagcccacgaatggatgtttccagtgtag

SEQ ID NO: 103757 - DNA, 1059 bp, Artificial Sequence
  derived and/or modified sequence
atgacccagaagccccacaagaagcccggccccggcgagcccctggtgttcggcaagaccttcaccgaccacatgctgatggtggagtggaacgacaagggctggggccagcccagaatccagcccttccagaacctgaccctgcaccccgccagcagcagcctgcactacagcctgcagctgttcgagggcatgaaggccttcaagggcaaggaccagcaggtgagactgttcagaccctggctgaacatggacagaatgctgagaagcgccatgagactgtgcctgcccagcttcgacaagctggagctgctggagtgcatcagaagactgatcgaggtggacaaggactgggtgcccgacgccgccggcaccagcctgtacgtgagacccgtgctgatcggcaacgagcccagcctgggcgtgagccagcccaccagagccctgctgttcgtgatcctgtgccccgtgggcgcctacttccccggcggcagcgtgacccccgtgagcctgctggccgaccccgccttcatcagagcctgggtgggcggcgtgggcaactacaagctgggcggcaactacggccccaccgtgctggtgcagcaggaggccctgaagagaggctgcgagcaggtgctgtggctgtacggccccgaccaccagctgaccgaggtgggcaccatgaacatcttcgtgtactggacccacgaggacggcgtgctggagctggtgaccccccccctgaacggcgtgatcctgcccggcgtggtgagacagagcctgctggacatggcccagacctggggcgagttcagagtggtggagagaaccatcaccatgaagcagctgctgagagccctggaggagggcagagtgagagaggtgttcggcagcggcaccgcctgccaggtgtgccccgtgcacagaatcctgtacaaggacagaaacctgcacatccccaccatggagaacggccccgagctgatcctgagattccagaaggagctgaaggagatccagtacggcatcagagcccacgagtggatgttccccgtgtag

SEQ ID NO: 103758 - protein, 508 aa, Artificial Sequence
  derived and/or modified sequence
MLPKRRRARVGSPSGDAASSTPPSTRFPGVAIYLVEPRMGRSRRAFLTGLARSKGFRVLDACSSEATHVVMEETSAEEAVSWQERRMAAAPPGCTPPALLDISWLTESLGAGQPVPVECRHRLEVAGPRKGPLSPAWMPAYACQRPTPLTHHNTGLSEALEILAEAAGFEGSEGRLLTFCRAASVLKALPSPVTTLSQLQGLPHFGEHSSRVVQELLEHGVCEEVERVRRSERAPAPPGPEHPSPAVRCRCPAAGGGGSCGAGPAWGHRHADRRLPQGLILYHQHQHSCCESPTRLAQQSHMDAFERSFCIFRLPQPPGAAVGGSTRPCPSWKAVRVDLVVAPVSQFPFALLGWTGSKLFQRELRRFSRKEKGLWLNSHGLFDPEQGSSSGKTPRSRKSCFCCRRHFSKRLQRKTSSDTWALSTFLQSRETPEPACVPHFHSGNWAAPNLATECLQADMLPPDPHLHPSPPRPGSSGGQLCLQDQLSPCWCAAGCDEVGALSASLITV

SEQ ID NO: 103759 - DNA, 1527 bp, Artificial Sequence
  derived and/or modified sequence
atgctgccaaaacgtaggcgggctagagtcgggtctccatcgggtgacgccgcaagttctactccaccgagcacccgctttcctggagtcgccatctatctggtggaacccagaatgggccggtctaggagagcattcctgactggccttgctaggtccaaaggtttccgcgttttggatgcctgtagttccgaagcaacacacgtagtgatggaggagacatcggctgaggaggctgtctcatggcaggagagaaggatggccgcagctccacctggatgtacccctccagccttgctggatatttcgtggcttacggaaagtctcggcgccggtcagccggtccccgtcgaatgcaggcacaggttggaggtggcggggcccagaaagggtcctctgtcccccgcatggatgcctgcttacgcttgtcaacgtccaacgcctttgacgcatcacaacaccggcttgagcgaagccctagaaatactggctgaagcggcaggatttgagggctccgaggggcgcttgctgactttttgtcgtgctgccagtgtactgaaggcgcttccaagccctgtgacgacattaagccagttacagggactgccccacttcggagaacactcaagccgggtggtccaggagctcctggagcatggagtgtgcgaggaggtggaacgtgttaggcgatccgagcgcgctccggcaccgccaggcccagagcatccctccccagccgttaggtgccggtgccctgccgcgggcggcgggggcagctgcggtgctggccctgcgtggggacacaggcatgcggacagaaggcttcctcagggtctcattctttaccaccagcatcagcattcgtgttgtgaatcccccacacggttagcacaacagagccacatggatgcattcgagcgaagtttttgtattttcaggctacctcagccgcccggagctgccgttggcgggagcacacgcccctgccccagctggaaagccgtgcgagtcgacctggtggttgcgccagtgagccagttcccgttcgctcttttaggatggacaggctctaaacttttccagcgggaactccgcaggttctctaggaaggaaaaaggcctgtggctgaattctcacggccttttcgaccccgaacaggggtcaagttcgggcaaaaccccccgaagtcgaaaaagctgtttctgctgcaggcgacattttagcaagagactgcagaggaagacctcgtcagacacatgggccctgtccactttcctgcagagtagggagaccccagaaccagcctgcgtgccacatttccattcgggaaattgggccgcacccaatttggccacggagtgtctgcaagcagatatgctgccgcctgacccccacctccatccatccccaccaagacccggaagctctggaggccagctttgtctgcaggatcagctttcaccatgctggtgcgccgcgggctgcgacgaagtgggggccctgtcagcctccttaatcactgtttag

SEQ ID NO: 103760 - DNA, 1527 bp, Artificial Sequence
  derived and/or modified sequence
atgctgcccaagagaagaagagcccgggtgggcagccccagcggagatgctgccagcagcaccccacccagcacccgcttccctggggtggccatctacctggtggagcccaggatgggccgcagcagaagagccttcctgaccggcctggcccggagcaagggcttccgggtgctggatgcctgcagcagcgaggccacccacgtggtgatggaggagaccagcgctgaggaggccgtgtcctggcaggagaggaggatggctgctgcccctcctggctgcaccccaccagccctgctggacatctcctggctgacagagagcctgggcgccggccagcctgtgcctgtggagtgccgccaccggctggaggtggccggccccaggaagggccccctgagccctgcctggatgcctgcctatgcctgccagaggcccacccccctgacccaccacaacacaggcctgtctgaggccctggagatcctggccgaggccgccggctttgagggcagcgagggccgcctgctgaccttctgccgggccgcctctgtgctgaaggccctgcccagccctgtgaccaccctgagccagctgcagggcctgccccactttggagagcacagcagccgggtggtgcaggagctgctggagcacggcgtgtgtgaggaggtggagcgggtgagaagaagtgagcgggccccagcccctcctggccctgagcaccccagccctgctgtgcgctgccgctgcccagctgctgggggcggcggcagctgtggggccggccctgcctggggccacagacatgctgaccggcggctgccccagggcctcatcctgtaccaccagcaccagcacagctgctgtgagagccccacccggctggcccagcagagccacatggatgcctttgagaggagcttctgcatcttccggctgccccagcccccaggagctgctgtgggcggcagcacccggccctgccccagctggaaggctgtgcgggtggacctggtggtggcccctgtgtcccagttcccctttgccctgctgggctggacaggcagcaagctgttccagcgggagctgcggcgcttcagcaggaaggagaagggcctgtggctgaacagccacggcctgtttgatcctgagcagggcagcagcagcggcaagacccccaggagcaggaagagctgcttctgctgccgccgccacttcagcaagaggctgcagaggaagaccagcagtgacacctgggccctgagcaccttcctgcagagccgggagaccccagagcccgcctgtgtgccccacttccacagcggcaactgggccgcccccaacctggccacagaatgtctgcaggccgacatgctgcccccagacccccacctgcaccccagcccccccaggcctggcagcagcggcggccagctgtgcctgcaggaccagctgagcccctgctggtgtgccgccggctgtgatgaggtgggcgccctgagcgccagcctcatcaccgtgtag

SEQ ID NO: 103761 - DNA, 2380 bp, Artificial Sequence
  derived and/or modified sequence
gagtttccctctgcgttcgctccgcgctgctggaggctgtcgtcccaatgctccccaaacggcggcgagcgcgggtcgggtcccctagcggcgatgccgcttcctccacgccgccctcgacgcgcttcccgggagtcgccatctacctggtcgagcctcgcatgggtcgcagccgccgggccttcctcacaggcctggcgcgctccaaaggcttccgcgtccttgacgcctgcagctccgaagcgacacatgttgtgatggaagagacctcagcagaggaggccgtcagctggcaggagcgcaggatggcagctgctcccccgggttgcacccccccagctctgctggacataagctggttaacagagagcctgggagctgggcagcctgtacctgtggagtgccggcaccgcctggaggtggctgggccaaggaaggggcctctgagcccagcatggatgcctgcctatgcctgccagcgccctacgcccctcacacaccacaacactggcctctccgaggctctggagatactggccgaggcagcaggctttgaaggcagtgagggccgcctcctcaccttctgcagagcagcctcggtgctcaaggcccttcccagccctgtcacaaccctgagccagctgcaggggcttccccactttggagaacactcctctagggttgtccaggagctgctggagcatggagtgtgtgaggaggtggagagagttcggcgctcagagagggctccagcaccaccaggacctgagcaccccagtcctgcggtccgatgtagatgccctgcagcaggtggtggaggaagctgtggggcaggccctgcctggggccaccgtcacgctgaccggcggcttccgcagggcctcatcctgtaccaccagcaccagcacagctgctgtgagtcccctacccgcctggcccaacagagccacatggacgcttttgagagaagtttctgcattttccgcctaccacaacctccaggggctgctgtggggggatccacgaggccctgcccatcctggaaggccgtgagagtggacttggtagttgcacccgtcagccagttccctttcgccctgctcggttggactggctccaagcttttccagcgggagctgcgccgcttcagccggaaggagaagggcctgtggctgaacagccatgggctgtttgacccggagcagggaagcagcagtggcaagactcctaggtcacggaagtcctgcttctgttgcagaagacatttttccaagcggcttcagaggaagacatcttcagacacctgggccttgagtaccttcctccagagcagagaaacgcctgagcctgcctgtgtcccccacttccactcaggaaattgggctgcccccaacctggccactgaatgtctccaggcagatatgctgccccctgacccccaccttcacccctccccgccaaggcctggctcttccggaggtcaattgtgcctgcaggatcagttgagcccctgctggtgtgctgcagggtgtgatgaggtgggagccctcagtgccagcctcatcactgtgtgaccctgggtctgctcttagcctccccatggctcacgttcctgccctggatgggatgtgagtggggcccacatcgtggagctgtggtggggcctgcagtcatgaatggcaagtggtccctgatgtgcagtgtctcattagttgcactgcagttaactgtggctcctgcagggcaccctgcccagaatgcccagaagagaaccatgcatacctgcactgcatttgagagccatgagctggaggctgtggttcgtgccagcaaggagcctactgtctggtgtgctgtaggcatctggagagggagagggcctgggtaggagctgggaggaagataattttcaactatggggcttcagtactgcagcgccccgagccaggctctgtgcttctgcctttaaggcctgttctcagcacaatgtctcaaaaataggtcatatcctgccactcccgtcgcagagccctttaatggttccaaaccctaagtccacacatagcccctggctctggcatctctccagccccactggccccgagctgcttgactcaccggcttcctatttgatgcacccaggcccccttgtggccaactccctccccttctcactgaggcagaagcactgaggtgggctggacatgggtgccctccacgtccctcatatccccaggcacactctggcctcaggttttgccctggccatgtcatctacctggagtgggccctccccttcttcaggccttgaatcaaaagccactttgttaggcgaggatttcccagaccactcatcacattaaaaaatattttgaaaaca

SEQ ID NO: 103762 - DNA, 1527 bp, Artificial Sequence
  derived and/or modified sequence
atgctgcccaagcggcggcgggcccgggtgggcagccccagcggcgacgcggcttcgtccactccgccttcaacacgcttcccaggagtggctatttacctggtggaacctaggatgggaagaagccggcgggcctttttgactggcctggctcggagcaaaggctttcgtgttctggacgcgtgttcctctgaggccacccacgttgtcatggaagagacctccgccgaggaggcagtgtcatggcaagagcggaggatggctgccgctccccccgggtgcacccccccagccctgctggatatcagctggcttacagagagcttgggcgctggccagcccgttccagtcgaatgtcgacaccgcctggaagtggcagggccaagaaaggggcccctgtctcccgcctggatgcccgcctatgcctgccagagacccacccccctcacccatcacaatactgggctctccgaagcattggagatcctggccgaggcagctgggtttgaagggtctgaaggtcggctcctgaccttttgtcgtgcagccagtgtcctgaaggcgcttcccagccccgttactaccctaagccagctccaggggctgccacacttcggggagcacagctctcgggtcgtgcaggaattactggaacatggggtctgcgaggaagtcgagcgggtgaggagatcagaacgggcccctgcaccccctgggcctgagcacccaagccctgcagtgaggtgtcggtgccctgctgctggcggcgggggctcctgtggagccggccctgcttgggggcatagacacgccgatcggcgtttgccccaaggcctaatcctgtatcaccagcatcaacacagctgttgtgagtcacccacaagactggctcaacagtctcacatggatgcctttgagcgctccttttgcatttttcgactgccgcaacctccaggcgctgccgtcggcgggagcactaggccttgtccctcctggaaggccgtgagggtggatctggtcgtggcccccgtgtcccagttcccctttgcgctgctaggttggactggatcaaaactgttccaacgtgagctgcggagattttccaggaaggagaagggcctgtggcttaactcacacggcctgtttgatcccgagcaagggtcatctagtggaaaaacaccacggtccaggaaaagttgtttctgctgcagacgacatttcagtaagcgtctgcaacggaagacatcctctgacacttgggccttgagcacattcctgcagagccgggagacaccagaacccgcctgcgttccacatttccattctggaaactgggcagccccgaatttggctactgaatgtctgcaagccgatatgcttccacccgacccgcacctccacccttcgccacctcgccctgggtcctcaggaggacagctgtgtctccaggaccagctcagtccctgctggtgcgcagccggttgtgacgaagtcggcgccctctccgcctccctgatcaccgtctag

SEQ ID NO: 103763 - DNA, 1527 bp, Artificial Sequence
  derived and/or modified sequence
atgttgcccaagagaagaagagcgagggtggggagcccctcgggggatgcagctagcagcaccccccctagcacgaggttccccggagtggcaatttatttggtcgaacccaggatgggccgatcaagacgggcttttctaacaggtctggcacgttcaaaagggtttcgagtgctggacgcttgctcctcagaggcaacgcatgtggttatggaggaaaccagtgctgaagaggcggtttcctggcaggagcggagaatggctgccgcaccccctggctgcacccctcctgccctcctggacataagctggctgaccgaatcacttggtgcgggtcagcccgtgcctgtcgaatgtcggcatagacttgaggtggctggaccacgaaaagggcctctatcaccagcctggatgccagcatacgcctgtcagagaccaactccactcacgcaccataacacaggactgtctgaggccctggaaatactcgcagaggcagctgggttcgaagggtcggagggtcgcctcctgaccttttgtcgtgccgcaagcgtgctgaaagcactgcctagtcccgtgaccacactgtcccagctacagggcctccctcattttggcgagcattcttcccgcgtggtccaggagctcctagagcacggtgtctgcgaagaggttgaaagggtgcgaagatccgagcgggctccagctccccctggaccagaacacccgagccctgctgtccgatgtagatgtcctgccgcaggaggcggaggaagctgcggagccggacctgcctggggccaccggcacgcggatcggaggcttccccagggattaatcctgtatcatcagcaccagcactcttgctgcgagagtcctacgcgtttggcacagcagtctcatatggatgcctttgaacgctctttttgtatttttcggttgccccagcctcccggagcagcggtcggcggttcaacccggccatgcccgagttggaaagccgttcgcgtggatctggtggtggcccctgtctcacaatttccgtttgcacttctgggctggaccggatctaaactgtttcagagagaactgagacgcttctccagaaaggaaaagggcctctggctcaactctcatggcctttttgaccccgaacaggggagcagttctgggaaaacaccacggagtcgaaaaagctgcttctgttgcagaaggcacttttcaaaacgcttacagcggaagaccagctctgatacatgggcgctgtccacgttcctgcagtccagggagacccccgaacccgcatgtgttccgcactttcactctggaaactgggccgctcccaacctcgcaaccgaatgcctgcaagctgatatgctccctccagatcctcacctgcacccttcacctcctcgccctggtagcagtggaggacagctgtgtctgcaggaccagttgtccccatgctggtgtgctgccggttgcgacgaagtaggagccctttctgcttctctgattacggtgtag

SEQ ID NO: 103764 - DNA, 1527 bp, Artificial Sequence
  derived and/or modified sequence
atgctgcccaagagaagaagagccagagtgggcagccccagcggcgacgccgccagcagcaccccccccagcaccagattccccggcgtggccatctacctggtggagcccagaatgggcagaagcagaagagccttcctgaccggcctggccagaagcaagggcttcagagtgctggacgcctgcagcagcgaggccacccacgtggtgatggaggagaccagcgccgaggaggccgtgagctggcaggagagaagaatggccgccgccccccccggctgcaccccccccgccctgctggacatcagctggctgaccgagagcctgggcgccggccagcccgtgcccgtggagtgcagacacagactggaggtggccggccccagaaagggccccctgagccccgcctggatgcccgcctacgcctgccagagacccacccccctgacccaccacaacaccggcctgagcgaggccctggagatcctggccgaggccgccggcttcgagggcagcgagggcagactgctgaccttctgcagagccgccagcgtgctgaaggccctgcccagccccgtgaccaccctgagccagctgcagggcctgccccacttcggcgagcacagcagcagagtggtgcaggagctgctggagcacggcgtgtgcgaggaggtggagagagtgagaagaagcgagagagcccccgccccccccggccccgagcaccccagccccgccgtgagatgcagatgccccgccgccggcggcggcggcagctgcggcgccggccccgcctggggccacagacacgccgacagaagactgccccagggcctgatcctgtaccaccagcaccagcacagctgctgcgagagccccaccagactggcccagcagagccacatggacgccttcgagagaagcttctgcatcttcagactgccccagccccccggcgccgccgtgggcggcagcaccagaccctgccccagctggaaggccgtgagagtggacctggtggtggcccccgtgagccagttccccttcgccctgctgggctggaccggcagcaagctgttccagagagagctgagaagattcagcagaaaggagaagggcctgtggctgaacagccacggcctgttcgaccccgagcagggcagcagcagcggcaagacccccagaagcagaaagagctgcttctgctgcagaagacacttcagcaagagactgcagagaaagaccagcagcgacacctgggccctgagcaccttcctgcagagcagagagacccccgagcccgcctgcgtgccccacttccacagcggcaactgggccgcccccaacctggccaccgagtgcctgcaggccgacatgctgccccccgacccccacctgcaccccagcccccccagacccggcagcagcggcggccagctgtgcctgcaggaccagctgagcccctgctggtgcgccgccggctgcgacgaggtgggcgccctgagcgccagcctgatcaccgtgtag

SEQ ID NO: 103765 - protein, 457 aa, Artificial Sequence
  derived and/or modified sequence
MLPKRRRARVGSPSGDAASSTPPSTRFPGVAIYLVEPRMGRSRRAFLTGLARSKGFRVLDACSSEATHVVMEETSAEEAVSWQERRMAAAPPGCTPPALLDISWLTESLGAGQPVPVECRHRLEVAGPRKGPLSPAWMPAYACQRPTPLTHHNTGLSEALEILAEAAGFEGSEGRLLTFCRAASVLKALPSPVTTLSQLQGLPHFGEHSSRVVQELLEHGVCEEVERVRRSERYQTMKLFTQIFGVGVKTADRWYREGLRTLDDLREQPQKLTQQQKAAPPGPEHPSPAVRCRCPAAGGGGSCGAGPAWGHRHADRRLPQGLILYHQHQHSCCESPTRLAQQSHMDAFERSFCIFRLPQPPGAAVGGSTRPCPSWKAVRVDLVVAPVSQFPFALLGWTGSKLFQRELRRFSRKEKGLWLNSHGLFDPEQKTFFQAASEEDIFRHLGLEYLPPEQRNA

SEQ ID NO: 103766 - DNA, 1374 bp, Artificial Sequence
  derived and/or modified sequence
atgctgcccaaacgtagacgtgctagagtggggagcccgagcggtgatgcagcgtccagtacgcctccctcaactcgattccctggtgttgctatctatctagttgagccaaggatgggccggtcccgccgagctttcctgaccggactcgcccgctctaagggatttcgtgtcctcgacgcctgtagctcagaggccactcacgtggttatggaagaaacgtctgccgaggaggcagtgtcctggcaggaacgtcggatggctgcagcccctcctggttgcaccccacccgccctgcttgatatctcctggctgacagaaagcctcggtgcgggtcagcccgtccccgtagagtgcaggcacaggctggaagtggcaggcccgcgcaaagggccacttagtccggcctggatgcccgcctatgcttgtcagcgccccactccattgacacaccataacacaggactgtccgaggctctagagatcttagccgaggcagctggcttcgaaggctcagaaggccgtctgctcacgttttgcagggccgcctctgtgttgaaagccctgccttcacccgtgacgaccctttcccagctgcagggcctaccacacttcggggaacactcttctcgagtggtgcaggagctgctggagcatggagtgtgcgaggaggtggagcgcgtaagaaggagtgaaagataccaaaccatgaagttgtttacccagatttttggcgtgggcgtgaagaccgctgatcgctggtatcgggagggactgcggacactcgacgatctgcgcgagcaaccgcaaaagctgactcaacaacagaaggctgccccaccaggaccagagcatccttctcctgcagttagatgccgctgccccgccgccggcggcggagggagctgcggagccggccctgcatggggacaccgacacgccgataggcgccttcctcagggactcattttgtaccatcaacaccagcatagctgctgcgaatcaccgactagactcgcacaacaaagtcacatggacgctttcgagaggagcttctgtatttttcgcttgccacagcccccaggtgctgccgtaggcggctccacccgaccctgcccttcttggaaagctgttcgggtggatctggtcgtcgctcctgtgtcccagttcccttttgccttgctgggctggactggatcaaagctttttcagagagaactcaggaggttttcaagaaaagaaaaggggctttggctgaatagccatggactgttcgaccccgagcagaagacattctttcaagcggcctcagaagaagatattttccggcatctgggactggagtatctcccccccgaacagaggaatgcatag

SEQ ID NO: 103767 - DNA, 1374 bp, Artificial Sequence
  derived and/or modified sequence
atgctgcccaagagaagaagagcccgggtgggcagccccagcggagatgctgccagcagcaccccacccagcacccgcttccctggggtggccatctacctggtggagcccaggatgggccgcagcagaagagccttcctgaccggcctggcccggagcaagggcttccgggtgctggatgcctgcagcagcgaggccacccacgtggtgatggaggagaccagcgctgaggaggccgtgtcctggcaggagaggaggatggctgctgcccctcctggctgcaccccaccagccctgctggacatctcctggctgacagagagcctgggcgccggccagcctgtgcctgtggagtgccgccaccggctggaggtggccggccccaggaagggccccctgagccctgcctggatgcctgcctatgcctgccagaggcccacccccctgacccaccacaacacaggcctgtctgaggccctggagatcctggccgaggccgccggctttgagggcagcgagggccgcctgctgaccttctgccgggccgcctctgtgctgaaggccctgcccagccctgtgaccaccctgagccagctgcagggcctgccccactttggagagcacagcagccgggtggtgcaggagctgctggagcacggcgtgtgtgaggaggtggagcgggtgagaagaagtgagcgctaccagaccatgaagctgttcacccagatcttcggcgtgggcgtgaagacagctgaccgctggtaccgggagggcctgcggaccctggatgacctgcgggagcagccccagaagctgacccagcagcagaaggccgcccctcctggccctgagcaccccagccctgctgtgcgctgccgctgcccagctgctgggggcggcggcagctgtggggccggccctgcctggggccacagacatgctgaccggcggctgccccagggcctcatcctgtaccaccagcaccagcacagctgctgtgagagccccacccggctggcccagcagagccacatggatgcctttgagaggagcttctgcatcttccggctgccccagcccccaggagctgctgtgggcggcagcacccggccctgccccagctggaaggctgtgcgggtggacctggtggtggcccctgtgtcccagttcccctttgccctgctgggctggacaggcagcaagctgttccagcgggagctgcggcgcttcagcaggaaggagaagggcctgtggctgaacagccacggcctgtttgatcctgagcagaagaccttcttccaggccgccagcgaggaggacatcttccgccacctgggcctggagtacctgcccccagagcagagaaatgcctag

SEQ ID NO: 103768 - DNA, 2444 bp, Artificial Sequence
  derived and/or modified sequence
ccgcgctgctggaggctgtcgtcccaatgctccccaaacggcggcgagcgcgggtcgggtcccctagcggcgatgccgcttcctccacgccgccctcgacgcgcttcccgggagtcgccatctacctggtcgagcctcgcatgggtcgcagccgccgggccttcctcacaggcctggcgcgctccaaaggcttccgcgtccttgacgcctgcagctccgaagcgacacatgttgtgatggaagagacctcagcagaggaggccgtcagctggcaggagcgcaggatggcagctgctcccccgggttgcacccccccagctctgctggacataagctggttaacagagagcctgggagctgggcagcctgtacctgtggagtgccggcaccgcctggaggtggctgggccaaggaaggggcctctgagcccagcatggatgcctgcctatgcctgccagcgccctacgcccctcacacaccacaacactggcctctccgaggctctggagatactggccgaggcagcaggctttgaaggcagtgagggccgcctcctcaccttctgcagagcagcctcggtgctcaaggcccttcccagccctgtcacaaccctgagccagctgcaggggcttccccactttggagaacactcctctagggttgtccaggagctgctggagcatggagtgtgtgaggaggtggagagagttcggcgctcagagaggtaccagaccatgaagctcttcacccagatcttcggggtcggtgtgaagactgctgaccggtggtaccgggaaggactgcgaaccttagatgacctccgagagcagccccagaaactaacccaacagcagaaagcggcaccaccaggacctgagcaccccagtcctgcggtccgatgtagatgccctgcagcaggtggtggaggaagctgtggggcaggccctgcctggggccaccgtcacgctgaccggcggcttccgcagggcctcatcctgtaccaccagcaccagcacagctgctgtgagtcccctacccgcctggcccaacagagccacatggacgcttttgagagaagtttctgcattttccgcctaccacaacctccaggggctgctgtggggggatccacgaggccctgcccatcctggaaggccgtgagagtggacttggtagttgcacccgtcagccagttccctttcgccctgctcggttggactggctccaagcttttccagcgggagctgcgccgcttcagccggaaggagaagggcctgtggctgaacagccatgggctgtttgacccggagcagaagacatttttccaagcggcttcagaggaagacatcttcagacacctgggccttgagtaccttcctccagagcagagaaacgcctgagcctgcctgtgtcccccacttccactcaggaaattgggctgcccccaacctggccactgaatgtctccaggcagatatgctgccccctgacccccaccttcacccctccccgccaaggcctggctcttccggaggtcaattgtgcctgcaggatcagttgagcccctgctggtgtgctgcagggtgtgatgaggtgggagccctcagtgccagcctcatcactgtgtgaccctgggtctgctcttagcctccccatggctcacgttcctgccctggatgggatgtgagtggggcccacatcgtggagctgtggtggggcctgcagtcatgaatggcaagtggtccctgatgtgcagtgtctcattagttgcactgcagttaactgtggctcctgcagggcaccctgcccagaatgcccagaagagaaccatgcatacctgcactgcatttgagagccatgagctggaggctgtggttcgtgccagcaaggagcctactgtctggtgtgctgtaggcatctggagagggagagggcctgggtaggagctgggaggaagataattttcaactatggggcttcagtactgcagcgccccgagccaggctctgtgcttctgcctttaaggcctgttctcagcacaatgtctcaaaaataggtcatatcctgccactcccgtcgcagagccctttaatggttccaaaccctaagtccacacatagcccctggctctggcatctctccagccccactggccccgagctgcttgactcaccggcttcctatttgatgcacccaggcccccttgtggccaactccctccccttctcactgaggcagaagcactgaggtgggctggacatgggtgccctccacgtccctcatatccccaggcacactctggcctcaggttttgccctggccatgtcatctacctggagtgggccctccccttcttcaggccttgaatcaaaagccactttgttaggcgaggatttcccagaccactcatcacattaaaaaatattttgaaaacatgcagtaaa

SEQ ID NO: 103769 - DNA, 1374 bp, Artificial Sequence
  derived and/or modified sequence
atgctgcccaagcggcggcgggcccgggtgggcagccccagcggcgacgcggcatctagcaccccaccatctaccagatttccgggggttgccatatatctggtggaacctcgaatgggacggagccgtcgcgcattcctgaccggactggccagaagcaagggctttagggtgcttgatgcatgctcctcagaagctactcatgtcgtcatggaggaaaccagcgctgaggaagcagtctcctggcaggaacgtcggatggctgctgccccgcccggttgcacccctccagctttgcttgacattagttggttgacagagtccctgggagccgggcagcctgtgcccgtggagtgtaggcacagactcgaggttgctggcccccggaagggacctctctcaccagcttggatgccagcctacgcgtgtcagcggcccaccccgctgacgcatcacaataccgggttaagtgaagctctggagattctggcggaagccgcaggtttcgaaggaagtgaaggaagactcctgaccttctgtcgtgccgcaagcgtgctgaaggccttaccctcccctgtgactaccctgtcccaactgcaggggctgccccacttcggcgaacattcctccagggttgtacaagaactgctggagcatggagtgtgcgaggaagtcgagagggtacgccggtccgagaggtatcagaccatgaagctgttcactcaaatctttggcgtgggagtgaaaacagcggaccgctggtatcgagaaggactccgcactctggatgacctcagagagcaaccacaaaaactgacacagcaacagaaagctgcccctcccggccctgaacacccatctcccgctgtgagatgccgctgtcctgcagcgggcgggggtggctcctgcggagcgggccccgcatggggtcatcgacatgctgataggaggttgcctcaaggcctgattctgtaccatcagcaccaacacagttgttgcgagtctcccactcgactggcccagcaatcacatatggatgctttcgagagatcattttgtatttttagactgccacagccacctggcgcagccgtgggtggtagcacacgtccatgtccatcctggaaagccgtaagagtggacttagtggtcgcccccgtttctcagtttccatttgctcttctcggctggaccggatcaaagcttttccaaagggagctgcgccgattcagccgaaaggagaagggcttgtggctgaatagccatggcctgtttgatccagagcagaaaaccttcttccaggctgcgagcgaggaggatatttttcgacatttggggcttgaatacctgcctcccgagcagaggaatgcctag

SEQ ID NO: 103770 - DNA, 1374 bp, Artificial Sequence
  derived and/or modified sequence
atgctccccaagcggaggcgtgccagagtgggctctccttccggagatgccgcatcatctacacctcccagcacacgctttcctggggtcgcaatttatctcgtcgagcctcggatgggcagatccaggagagcatttctcaccgggttagcccgtagtaagggctttcgggtgctggacgcctgcagctccgaggccacccacgtagtcatggaagagacatccgccgaggaggccgtgtcgtggcaggagaggcgcatggcggctgctccaccaggctgtaccccacccgcattattagacatttcttggctcacggagtctctcggcgctggccagcctgtacccgtggaatgtcgacaccggttagaggtggccggtcccagaaaaggcccactcagcccagcctggatgccagcctacgcctgccagcgcccaactcccttgacccatcacaacacgggattgagcgaagccctcgagattttagcggaagcagccggttttgagggctctgagggcaggttgctgacgttttgtcgcgctgcctctgtcctaaaagcccttcctagccctgtgaccaccctgagccaattgcagggtctgccacactttggagagcattcctcaagagtggtccaagagctgcttgaacacggggtgtgcgaggaggtcgagagagtgcggagaagtgagcgctatcagactatgaaattgtttacccaaatcttcggagtgggggtaaagactgctgatcgctggtaccgggagggtctcagaactctggatgacttacgagagcaaccacagaagctgacccagcagcaaaaggctgcaccacccggaccagagcacccctctcccgcagttcggtgtcgctgtcctgccgctggcggagggggatcttgtggagcaggtcctgcatggggacaccgacacgcggataggcgtctaccacaggggctcatcctgtatcaccagcaccagcatagctgctgcgagtcccctacaagactggcccagcagtcacatatggacgcttttgagcgctctttctgtatcttccggctgccacagccacctggcgctgcagtcgggggatcaaccagaccatgtccatcatggaaggccgtcagggtggacctggtcgtggctcctgtgtcccagttcccctttgccttactgggatggaccggcagcaaactcttccaaagggagttgaggaggtttagccgtaaggaaaagggcctctggctgaacagccacggactgtttgacccggagcagaaaaccttctttcaagcagcttccgaggaggacattttcaggcatctcgggctcgagtacctcccacctgagcagcggaatgcctag

SEQ ID NO: 103771 - DNA, 1374 bp, Artificial Sequence
  derived and/or modified sequence
atgctgcccaagagaagaagagccagagtgggcagccccagcggcgacgccgccagcagcaccccccccagcaccagattccccggcgtggccatctacctggtggagcccagaatgggcagaagcagaagagccttcctgaccggcctggccagaagcaagggcttcagagtgctggacgcctgcagcagcgaggccacccacgtggtgatggaggagaccagcgccgaggaggccgtgagctggcaggagagaagaatggccgccgccccccccggctgcaccccccccgccctgctggacatcagctggctgaccgagagcctgggcgccggccagcccgtgcccgtggagtgcagacacagactggaggtggccggccccagaaagggccccctgagccccgcctggatgcccgcctacgcctgccagagacccacccccctgacccaccacaacaccggcctgagcgaggccctggagatcctggccgaggccgccggcttcgagggcagcgagggcagactgctgaccttctgcagagccgccagcgtgctgaaggccctgcccagccccgtgaccaccctgagccagctgcagggcctgccccacttcggcgagcacagcagcagagtggtgcaggagctgctggagcacggcgtgtgcgaggaggtggagagagtgagaagaagcgagagataccagaccatgaagctgttcacccagatcttcggcgtgggcgtgaagaccgccgacagatggtacagagagggcctgagaaccctggacgacctgagagagcagccccagaagctgacccagcagcagaaggccgccccccccggccccgagcaccccagccccgccgtgagatgcagatgccccgccgccggcggcggcggcagctgcggcgccggccccgcctggggccacagacacgccgacagaagactgccccagggcctgatcctgtaccaccagcaccagcacagctgctgcgagagccccaccagactggcccagcagagccacatggacgccttcgagagaagcttctgcatcttcagactgccccagccccccggcgccgccgtgggcggcagcaccagaccctgccccagctggaaggccgtgagagtggacctggtggtggcccccgtgagccagttccccttcgccctgctgggctggaccggcagcaagctgttccagagagagctgagaagattcagcagaaaggagaagggcctgtggctgaacagccacggcctgttcgaccccgagcagaagaccttcttccaggccgccagcgaggaggacatcttcagacacctgggcctggagtacctgccccccgagcagagaaacgcctag

SEQ ID NO: 103772 - protein, 772 aa, Artificial Sequence
  derived and/or modified sequence
MMEELHSLDPRRQELLEARFTGVGVSKGPLNSESSNQSLCSVGSLSDKEVETPEKKQNDQRNRKRKAEPYETSQGKGTPRGHKISDYFEFAGGSAPGTSPGRSVPPVARSSPQHSLSNPLPRRVEQPLYGLDGSAAKEATEEQSALPTLMSVMLAKPRLDTEQLAQRGAGLCFTFVSAQQNSPSSTGSGNTEHSCSSQKQISIQHRQTQSDLTIEKISALENSKNSDLEKKEGRIDDLLRANCDLRRQIDEQQKMLEKYKERLNRCVTMSKKLLIEKSKQEKMACRDKSMQDRLRLGHFTTVRHGASFTEQWTDGYAFQNLIKQQERINSQREEIERQRKMLAKRKPPAMGQAPPATNEQKQRKSKTNGAENETPSSGNTELKDTAPALGAHSLLRLTLAEYHEQEEIFKLRLGHLKKEEAEIQAELERLERVRNLHIRELKRIHNEDNSQFKDHPTLNDRYLLLHLLGRGGFSEVYKAFDLTEQRYVAVKIHQLNKNWRDEKKENYHKHACREYRIHKELDHPRIVKLYDYFSLDTDSFCTVLEYCEGNDLDFYLKQHKLMSEKEARSIIMQIVNALKYLNEIKPPIIHYDLKPGNILLVNGTACGEIKITDFGLSKIMDDDSYNSVDGMELTSQGAGTYWYLPPECFVVGKEPPKISNKVDVWSVGVIFYQCLYGRKPFGHNQSQQDILQENTILKATEVQFPPKPVVTPEAKAFIRRCLAYRKEDRIDVQQLACDPYLLPHIRKSVSTSSPAGAAIASTSGASNNSSSN

SEQ ID NO: 103773 - DNA, 2319 bp, Artificial Sequence
  derived and/or modified sequence
atgatggaagaactacactctctcgatccgagacggcaggaactcttggaggcacgctttactggcgtgggcgtgagtaaaggcccgcttaattctgagagctcaaaccagtcactatgctccgtggggagcctaagcgacaaagaagtggagacccctgagaaaaagcagaatgatcagcggaacaggaaaaggaaagccgaaccttacgagacatcgcagggaaaggggaccccccgtggccacaagatttccgattattttgaattcgccggcggttctgcaccaggtacttcccccggccgttcagtccctcccgtcgcaagatcctccccccaacatagtctcagcaaccccttacccaggcgggtagagcaacccctctacggtctggatggtagcgccgcgaaagaggccaccgaggaacagtccgccttgcctactttaatgtctgtgatgctcgccaagcctcggctggacaccgaacagctggcccagagaggagcaggtctgtgcttcaccttcgtgtcagcccagcagaatagtccttctagcacaggcagcggaaatacggagcattcctgcagcagccagaagcaaatatccatacaacaccgccagacccagagtgacctcacgatcgaaaagatatcagcactggaaaacagcaagaactcagacctagaaaaaaaggaagggcgcatagacgacctactccgcgcaaattgcgatctgcgacgtcagatagatgagcagcagaagatgcttgagaaatacaaagagcgtctgaaccggtgcgtcacaatgtccaaaaagttgctgatcgaaaagtcaaaacaggaaaagatggcgtgtcgcgataaatcaatgcaagacagactaaggcttgggcattttaccacagttcggcatggggcgagtttcaccgaacagtggaccgacggctacgccttccaaaatctgataaagcagcaggagcgcatcaattcccagcgtgaagaaatcgagcgccagaggaaaatgcttgccaaaaggaaacctcctgcgatgggccaggcacctcccgctactaatgaacagaaacaaagaaagtcgaagacaaacggcgccgaaaatgaaactccaagttctggaaacacagagctgaaagacaccgcaccagctttaggggcacattctctgctgcgcctgaccttggccgaatatcacgaacaggaagagatcttcaagttacggcttgggcatctgaaaaaagaggaagcggaaattcaggccgaactggagagactcgagagagtcaggaatttgcacatccgagagctgaaacgcatccataatgaggacaatagccagttcaaagatcatcccacactcaacgataggtatctcctcctgcacttgctaggccgcggcggctttagcgaggtgtataaagcatttgaccttacggaacagcggtacgtcgctgtgaagattcaccaattgaataaaaactggagggacgaaaaaaaggagaattatcacaaacacgcatgtcgcgaataccggattcataaagagctagaccaccctcgtattgtcaaactgtatgattactttagtctggatacagactctttctgtactgtgctcgagtactgtgaagggaatgacctggatttctatcttaagcagcataagttgatgagcgagaaggaggccagatccatcatcatgcagatcgtgaacgctctgaagtatctgaatgagataaaacctcctattatccactacgatctaaagcccggcaatatcctgcttgtgaacggcaccgcgtgtggcgagatcaagattactgactttgggttgagcaaaattatggacgatgacagttataattctgtggacggcatggagctgactagccaaggcgccgggacatactggtacctgccacccgaatgtttcgtggtaggcaaggagcctccaaaaattagtaacaaggtcgacgtgtggtcggtaggcgttatattttaccagtgtctgtatggccggaaacccttcggccacaaccagtcccagcaggacattttacaggagaatacaatacttaaggccactgaggttcagttcccccctaaaccagttgtcacacctgaagctaaggcatttattagaaggtgtttagcctacagaaaggaagaccgtatcgatgtgcagcagctagcatgtgatccctatttgctcccacacattcggaaatccgtgtctactagctctccggcaggtgccgccatcgcctctactagcggggcaagcaacaactctagttcaaattag

SEQ ID NO: 103774 - DNA, 2319 bp, Artificial Sequence
  derived and/or modified sequence
atgatggaggagctgcacagcctggacccccggcggcaggagctgctggaggcccgcttcaccggggtgggcgtgtccaagggccccctgaacagcgagagcagcaaccagagcctgtgcagcgtgggcagcctgagtgacaaggaggtggagaccccagagaagaagcagaatgaccagaggaacaggaagaggaaggccgagccctatgagaccagccagggcaagggcaccccccggggccacaagatcagtgactactttgaatttgctgggggcagcgcccctggcaccagccctggccgctctgtgccccctgtggcccggagcagcccccagcacagcctgagcaaccccctgccccggcgggtggagcagcccctgtatggcctggatggcagcgctgccaaggaggccacagaggagcagagcgccctgcccaccctgatgtctgtgatgctggccaagccccggctggacacagagcagctggcccagagaggagctggcctgtgcttcacctttgtgtctgcccagcagaacagccccagcagcacaggcagcggcaacacagagcacagctgcagcagccagaagcagatcagcatccagcaccggcagacccagagcgacctgaccatcgagaagatcagcgccctggagaacagcaagaacagcgacctggagaagaaggagggcagaattgatgacctgctgcgggccaactgtgacctgcggcggcagattgatgagcagcagaagatgctggagaagtacaaggagcggctgaacagatgtgtgaccatgagcaagaagctgctgattgagaagagcaagcaggagaagatggcctgccgggacaagtccatgcaggaccggctgcggctgggccacttcaccaccgtgcgccacggggccagcttcacagagcagtggacagatggctacgccttccagaacctgatcaagcagcaggagcgcatcaacagccagcgggaggagattgagcggcagaggaagatgctggccaagaggaagcccccagccatgggccaggcccccccagccaccaatgagcagaagcagaggaagagcaagaccaacggggctgaaaatgagacccccagcagcggcaacacagagctgaaggacacagccccagccctgggcgcccacagcctgctgcggctgaccctggccgagtaccacgagcaggaggagatcttcaagctgcggctgggccacctgaagaaggaggaggccgagatccaggccgagctggagcggctggagcgggtgaggaacctgcacatccgggagctgaagaggatccacaatgaagacaacagccagttcaaggaccaccccaccctgaatgaccgctacctgctgctgcacctgctgggccggggcggcttcagcgaggtgtacaaggcctttgacctgacagagcagagatatgtggccgtgaagatccaccagctgaacaagaactggagagatgagaagaaggagaactaccacaagcacgcctgccgggagtaccgcatccacaaggagctggaccacccccgcatcgtgaagctgtatgactacttcagcctggacacagacagcttctgcaccgtgctggagtactgtgagggcaatgacctggacttctacctgaagcagcacaagctgatgtctgagaaggaggcccggagcatcatcatgcagatcgtgaatgccctgaagtacctgaatgagatcaagccacccatcatccactatgacctgaagccaggcaacatcctgctggtgaatggaacagcctgtggggagatcaagatcacagactttggcctgagcaagatcatggatgatgacagctacaacagcgtggatggcatggagctgaccagccagggcgccggcacctactggtacctgcccccagaatgttttgtggtgggcaaggagccccccaagatcagcaacaaggtggatgtgtggagcgtgggcgtcatcttctaccagtgcctgtatggcaggaagcccttcggccacaaccagagccagcaggacatcctgcaggagaacaccatcctgaaggccacagaggtgcagtttcctcccaagcctgtggtgaccccagaggccaaggccttcatccgccgctgcctggcctacagaaaagaagatagaattgatgtgcagcagctggcctgtgacccctacctgctgccccacatcaggaagtctgtgtccaccagcagccctgctggagctgccatcgccagcaccagcggggccagcaacaacagcagcagcaactag

SEQ ID NO: 103775 - DNA, 2319 bp, Artificial Sequence
  derived and/or modified sequence
atgatggaggagctgcacagcctggacccccggcggcaggagctgcttgaggcacgcttcacaggcgttggcgtttccaaaggccctctcaattcagagtctagtaaccaatccttgtgtagtgtgggatccctgtctgacaaagaggtggaaacacccgagaagaagcaaaacgaccagaggaatcgaaagaggaaggccgagccttacgaaacaagccaggggaaaggcaccccacgggggcacaaaatttcagattactttgagttcgcaggaggctcagctccgggaactagccccggtcgtagcgtgccacctgttgctcgaagctctccacagcattctctgtccaatcctttgccaaggagagttgagcagcctctctacggcctggacggcagtgcggctaaggaggcaaccgaggagcagtcagctctgcctacactcatgagtgtgatgctagcaaaaccacggctggacaccgagcagctcgcacagcgcggcgcaggcctatgctttactttcgtctctgctcagcagaactcgccgtcctctactggatctggtaacactgaacactcctgcagcagccaaaagcagatcagtatacagcaccgccaaacccagtcagatttgacgatcgagaagatatctgctcttgagaatagcaaaaactctgacctcgaaaagaaggagggaaggatcgatgatttgttacgtgctaattgcgacctgaggagacagatagatgagcagcagaaaatgttggagaaatacaaggagaggcttaatcgatgcgtgaccatgagcaagaaactcttaattgaaaagagtaagcaggagaagatggcctgcagagataagagcatgcaggacaggttacgcctgggacactttaccactgtgcggcacggcgcttcattcactgagcagtggactgacgggtacgcctttcagaacctcattaagcagcaggaacgcatcaattcccaaagggaggagattgagcgccaacggaaaatgttggctaaaagaaagcctcctgctatgggacaagcaccacctgctaccaacgaacaaaaacagcgaaagagcaagactaacggggctgagaatgagacaccgtccagtggtaatacggagttaaaggacaccgcgcctgccctcggcgcacacagtctcctccggctcacactagcagaataccatgaacaggaggagatctttaaactgcgtctgggacacctgaaaaaggaagaggctgagattcaggccgagctggagagacttgagcgcgtacgtaacttacatatcagagagctgaaacgtattcacaacgaagataactctcagtttaaggatcacccaacactgaacgatcgatatcttcttcttcacttactgggaaggggagggttttccgaggtctataaagcctttgatcttactgaacagaggtacgtagctgtgaagattcaccagctaaacaaaaattggcgggacgagaagaaggaaaactaccacaaacatgcatgtagggagtacaggattcacaaggaactcgaccatccaaggatcgtcaaactgtatgattatttctcactggatacggacagcttttgcaccgtgctggaatattgcgagggcaatgacctcgatttctacctgaagcagcacaagctcatgtcagaaaaggaggcacggtctattatcatgcaaatcgtcaatgcattaaagtatctgaatgaaatcaaacccccaataatccactatgacctaaaaccggggaacattttgctcgtgaacgggacagcgtgcggggagatcaaaattacagactttggactttccaaaattatggacgatgatagttataactcagtggatgggatggagttaacctcgcagggagctggtacttattggtacctgcccccagagtgtttcgtggtgggcaaggagccacctaagatcagcaataaggtggacgtctggtccgtgggtgtgatcttttatcagtgtctctatggccgcaagccttttggacataaccaatcccaacaagacatacttcaagagaacacaattttgaaggctaccgaggttcaatttccgccgaagcctgtagtgacccccgaggctaaggcctttattaggcggtgcctggcttaccggaaagaggacagaatcgatgtgcagcaattagcttgtgacccatacctgctgccgcacattaggaagagcgtgagcacatcatccccagccggagcggctatcgcctcaacatcaggcgcgtccaacaattcaagttctaattag

SEQ ID NO: 103776 - DNA, 3413 bp, Artificial Sequence
  derived and/or modified sequence
gtggagcccggcgccggcggcggctgcccgggcggggggttgcggcgctcaggagaggccccggctccgccccgggcctgcccagggggagagcggagcggtccgcagccgggtcgggtcggggcccctcccgggaggagcgtggagcggcggcggcggcggcggcagaaatgatggaagaattgcatagcctggacccacgacggcaggaattattggaggccaggtttactggagtaggtgttagtaagggaccacttaatagtgagtcttccaaccagagcttgtgcagcgtcggatccttgagtgataaagaagtagagactcccgagaaaaagcagaatgaccagcgaaatcggaaaagaaaagctgaaccatatgaaactagccaagggaaaggcactcctaggggacataaaattagtgattactttgagtttgctgggggaagcgcgccaggaaccagccctggcagaagtgttccaccagttgcacgatcctcaccgcaacattccttatccaatcccttaccgcgacgagtagaacagcccctctatggtttagatggcagtgctgcaaaggaggcaacggaggagcagtctgctctgccaaccctcatgtcagtgatgctagcaaaacctcggcttgacacagagcagctggcgcaaaggggagctggcctctgcttcacttttgtttcagctcagcaaaacagtccctcatctacgggatctggcaacacagagcattcctgcagctcccaaaaacagatctccatccagcacagacagacccagtccgacctcacaatagaaaaaatatctgcactagaaaacagtaagaattctgacttagagaagaaggagggaagaatagatgatttattaagagccaactgtgatttgagacggcagattgatgaacagcaaaagatgctagagaaatacaaggaacgattaaatagatgtgtgacaatgagcaagaaactccttatagaaaagtcaaaacaagagaagatggcgtgtagagataagagcatgcaagaccgcttgagactgggccactttactactgtccgacacggagcctcatttactgaacagtggacagatggttatgcttttcagaatcttatcaagcaacaggaaaggataaattcacagagggaagagatagaaagacaacggaaaatgttagcaaagcggaaacctcctgccatgggtcaggcccctcctgcaaccaatgagcagaaacagcggaaaagcaagaccaatggagctgaaaatgaaacgccctcttctgggaatacagagctaaaggatacagccccagccttaggagcccacagtttacttaggttaacgttagcagaataccatgaacaagaagaaatcttcaaactcagattaggtcatcttaaaaaggaggaagcagagatccaggcagagctggagagactagaaagggttagaaatctacatatcagggaactaaaaaggatacataatgaagataattcacaatttaaagatcatccaacgctaaatgacagatatttgttgttacatcttttgggtagaggaggtttcagtgaagtttacaaggcatttgatctaacagagcaaagatacgtagctgtgaaaattcaccagttaaataaaaactggagagatgagaaaaaggagaattaccacaagcatgcatgtagggaataccggattcataaagagctggatcatcccagaatagttaagctgtatgattacttttcactggatactgactcgttttgtacagtattagaatactgtgagggaaatgatctggacttctacctgaaacagcacaaattaatgtcggagaaagaggcccggtccattatcatgcagattgtgaatgctttaaagtacttaaatgaaataaaacctcccatcatacactatgacctcaaaccaggtaatattcttttagtaaatggtacagcgtgtggagagataaaaattacagattttggtctttcgaagatcatggatgatgatagctacaattcagtggatggcatggagctaacatcacaaggtgctggtacttattggtatttaccaccagagtgttttgtggttgggaaagaaccaccaaagatctcaaataaagttgatgtgtggtcggtgggtgtgatcttctatcagtgtctttatggaaggaagccttttggccataaccagtctcagcaagacatcctacaagagaatacgattcttaaagctactgaagtgcagttcccgccaaagccagtagtaacacctgaagcaaaggcgtttattcgacgatgcttggcctaccgaaaggaggaccgcattgatgtccagcagctggcctgtgatccctacttgttgcctcacatccgaaagtcagtctctacaagtagccctgctggagctgctattgcatcaacctctggggcgtccaataacagttcttctaattgagactgactccaaggccacaaactgttcaacacacacaaagtggacaaatggcgttcagcagcgggtttggaacatagcgaatccgaatggatctgatgaaacctgtaccaggtgcttttattttcttgcttttttcccatccatagagcatgacagcatcgattctcattgaggagaaaccttgggcagctccggccaggccttgtaggaaaaggccccgcccgaggttccagcgtcaacggccactgtgtgtggctgctctgagtgaggaaaaaattaaaaagaaaaactggttccatgtactgtgaacttgaaaacttgcagactcaggggggtccctgatgcagtgcttcagatgaagaatgtggacttgaaaatacagactgggctagtccagtgtctatatttaaacttgttcttttcttttaataaagtttaggtaacatctcctgaaaagcttgtagcacaaaggctcagctggggatggtgtttgacttcggaggaaaaaagttgctattgcccgttaaaggcactagagttagtgttttatccctaaataatttcaatttttaaaaacatgcagcttccctctccccttttttatttttgaaagaatacatttggtcataaagtgaaacccgtattagcaagtacgtggcaatgttcattccaatcagatgcagctttctcctccgtctggtctcctgtttgcaattgcttccctcatctcagtagggaaaaaattgagtgggagtactgagatgtgtgggtttttgccattggacaaagaatgaggttagaagactgcagcttggagtctctctaggttttcaactatttcttcacaatttgaacacttgacggttgtcccttttaatttatttgaagtgctatttttttaaataaaggttcatctgtccatgc

SEQ ID NO: 103777 - DNA, 2319 bp, Artificial Sequence
  derived and/or modified sequence
atgatggaagaactgcactccctggacccccgacggcaggagttgctggaggccaggttcacgggcgtcggggtctcaaaggggcctttaaactccgaatcctctaatcagtccctgtgttccgtagggtcactgagcgacaaagaagtggaaactcctgagaagaagcagaacgaccagagaaacagaaaacggaaggccgagccatatgagacgagccaggggaagggcaccccgagagggcacaagatttccgactattttgaatttgcgggaggaagcgcccctggaacgtctcccggaaggtccgtgccgcctgtggcgagatccagtccccagcattctctgagcaatccattaccaagacgcgtcgaacagccgctgtatggtctagatggtagcgctgccaaagaggctaccgaagaacaaagtgctctcccaactctgatgagtgtcatgctggcaaaacctcgcctggatactgagcagctggcccagaggggagccggtctatgtttcacattcgtaagcgctcagcaaaacagccccagcagtaccggatctggtaatacagagcatagctgttcgtcgcagaagcaaatttcgattcagcacaggcagacacagagcgatctgaccatagagaagattagtgcgctggagaattccaagaattcggacctcgagaaaaaagaggggagaatcgacgatctccttcgagcaaactgtgatctacgtaggcagatcgacgagcaacaaaaaatgctcgaaaagtataaggaaagactgaatagatgtgttacgatgtcaaagaagctgctgatcgagaaatctaagcaggagaagatggcctgtagagataaatctatgcaggacaggctgagattgggacacttcacaactgtccggcacggtgccagtttcacagagcagtggactgacggctacgcctttcagaacctgataaagcaacaggagaggatcaatagccagagggaggagattgaacggcagcgcaagatgttggctaaaagaaaaccccctgcaatgggtcaagctccccctgccacaaatgagcagaagcaaaggaagagtaagactaatggcgctgagaatgagactccaagctcaggtaacacggaactgaaggacaccgcccctgccctaggggctcactctcttctgaggcttaccctcgcagaatatcacgagcaggaagagatttttaaactgagactggggcatctgaagaaggaagaagccgagattcaggctgagttggaacgacttgagagggttagaaatttacatatccgggagctgaaacggatacacaatgaagacaatagtcagttcaaagaccaccccaccctgaatgataggtatctcctcctacatttgctggggagaggcggattctctgaggtgtacaaggcattcgatctcacagagcagaggtatgtcgctgtgaaaattcatcagctcaacaaaaactggcgcgacgagaagaaggaaaactaccacaagcatgcctgcagggagtataggatacacaaggaacttgatcatccgcgaattgtcaaactttacgactacttctctctggatactgactcgttttgcacggttctggagtactgcgagggaaacgatctcgacttttacctgaagcagcataagctaatgtcagaaaaagaagctcgctctatcattatgcagatcgtgaatgcgctaaagtatctgaatgagattaagcctcccatcatccactatgatctgaagccaggcaacattctgctggtgaatgggactgcttgcggagaaattaagattactgacttcggcctttcaaagataatggatgacgattcctataatagtgtggacggcatggaactcacttcccagggcgctggaacatattggtatctgcccccagagtgctttgttgtggggaaggagcctcccaagatttccaataaagttgacgtctggagcgtcggagtgatcttttaccaatgtctgtacggccgtaaaccttttggccacaaccaaagtcagcaggatatcttgcaggagaatactatcctgaaagccacagaagtgcagttcccccctaagccagttgtcacccctgaggccaaggcatttatcaggcgctgcctggcctataggaaggaggatcgcatagacgtgcagcagttggcctgcgacccctatttgctgccccacatccggaagagtgtttccactagctcccccgcaggggcagccatcgcctccacctccggggcatcaaacaatagctccagcaactag

SEQ ID NO: 103778 - DNA, 2319 bp, Artificial Sequence
  derived and/or modified sequence
atgatggaggagctgcacagcctggaccccagaagacaggagctgctggaggccagattcaccggcgtgggcgtgagcaagggccccctgaacagcgagagcagcaaccagagcctgtgcagcgtgggcagcctgagcgacaaggaggtggagacccccgagaagaagcagaacgaccagagaaacagaaagagaaaggccgagccctacgagaccagccagggcaagggcacccccagaggccacaagatcagcgactacttcgagttcgccggcggcagcgcccccggcaccagccccggcagaagcgtgccccccgtggccagaagcagcccccagcacagcctgagcaaccccctgcccagaagagtggagcagcccctgtacggcctggacggcagcgccgccaaggaggccaccgaggagcagagcgccctgcccaccctgatgagcgtgatgctggccaagcccagactggacaccgagcagctggcccagagaggcgccggcctgtgcttcaccttcgtgagcgcccagcagaacagccccagcagcaccggcagcggcaacaccgagcacagctgcagcagccagaagcagatcagcatccagcacagacagacccagagcgacctgaccatcgagaagatcagcgccctggagaacagcaagaacagcgacctggagaagaaggagggcagaatcgacgacctgctgagagccaactgcgacctgagaagacagatcgacgagcagcagaagatgctggagaagtacaaggagagactgaacagatgcgtgaccatgagcaagaagctgctgatcgagaagagcaagcaggagaagatggcctgcagagacaagagcatgcaggacagactgagactgggccacttcaccaccgtgagacacggcgccagcttcaccgagcagtggaccgacggctacgccttccagaacctgatcaagcagcaggagagaatcaacagccagagagaggagatcgagagacagagaaagatgctggccaagagaaagccccccgccatgggccaggccccccccgccaccaacgagcagaagcagagaaagagcaagaccaacggcgccgagaacgagacccccagcagcggcaacaccgagctgaaggacaccgcccccgccctgggcgcccacagcctgctgagactgaccctggccgagtaccacgagcaggaggagatcttcaagctgagactgggccacctgaagaaggaggaggccgagatccaggccgagctggagagactggagagagtgagaaacctgcacatcagagagctgaagagaatccacaacgaggacaacagccagttcaaggaccaccccaccctgaacgacagatacctgctgctgcacctgctgggcagaggcggcttcagcgaggtgtacaaggccttcgacctgaccgagcagagatacgtggccgtgaagatccaccagctgaacaagaactggagagacgagaagaaggagaactaccacaagcacgcctgcagagagtacagaatccacaaggagctggaccaccccagaatcgtgaagctgtacgactacttcagcctggacaccgacagcttctgcaccgtgctggagtactgcgagggcaacgacctggacttctacctgaagcagcacaagctgatgagcgagaaggaggccagaagcatcatcatgcagatcgtgaacgccctgaagtacctgaacgagatcaagccccccatcatccactacgacctgaagcccggcaacatcctgctggtgaacggcaccgcctgcggcgagatcaagatcaccgacttcggcctgagcaagatcatggacgacgacagctacaacagcgtggacggcatggagctgaccagccagggcgccggcacctactggtacctgccccccgagtgcttcgtggtgggcaaggagccccccaagatcagcaacaaggtggacgtgtggagcgtgggcgtgatcttctaccagtgcctgtacggcagaaagcccttcggccacaaccagagccagcaggacatcctgcaggagaacaccatcctgaaggccaccgaggtgcagttcccccccaagcccgtggtgacccccgaggccaaggccttcatcagaagatgcctggcctacagaaaggaggacagaatcgacgtgcagcagctggcctgcgacccctacctgctgccccacatcagaaagagcgtgagcaccagcagccccgccggcgccgccatcgccagcaccagcggcgccagcaacaacagcagcagcaactag

SEQ ID NO: 103779 - DNA, 2569 bp, Artificial Sequence
  derived and/or modified sequence
ggcctcggctcggcgcacagtcagccacggtcccatcctgctccgcgccggtcaacgagagcaaacccagtgactcacctccgccgtgctaactcctcgctagctctccctctcacacacgctcacacccggctcgagatggcggcggcggcggcggcggcgggggactcggactcctgggacgccgacgctttctccgtggaagacccagtgcggaaggtggggggcggcggcactgccggcggggaccgctgggaaggcgaggacgaggacgaggacgtcaaggataactgggatgacgatgatgatgaaaaaaaagaggaagcagaagtaaaaccagaggtaaaaatttcagaaaagaaaaaaatagcagagaagataaaagagaaagaacggcaacagaagaaaaggcaagaagaaattaaaaagaggttagaagaacccgaagaacctaaagtgctaacaccagaagaacaattagcagataaactgcggctaaagaaattacaggaagagtcagacctcgaattagcaaaggaaacttttggtgttaataatgcagtttatggaatagatgctatgaacccatcttcaagagatgactttacagagtttggaaagttactaaaagataaaattacacaatatgaaaagtcactatattatgccagttttttggaagtcttagttcgagatgtgtgtatttcattggaaattgatgacttgaaaaaaattaccaattcactgactgtgctttgcagtgaaaaacagaagcaagaaaagcaaagcaaagccaaaaagaagaagaaaggtgtggttcctggagggggattaaaagccaccatgaaagatgatctggcagattatggtggttatgatggaggatatgtacaagactatgaagacttcatgtgacattttatcttttcttggtgtcatctttatgttgcccacaatcccttgaacatgtagcacaacttcctttcctttcagttctgccaaatgctacaatcagaagtgcagtatcttttgtgctggttatttaaccccttgacacttaggtgctaatgtgcaaatgagggaacttggatcttgctgccaaggggttaaaattgggaacctaagttgctactaaatcatagttcaaaacctaataatgttgtcgttgttgctatctgatttcatagcagcagtcactaaattggaaacaaaaggttgcaacgtgacaaaaaaaattgtgtagtatttaccagcaccattcagtaatacagccttaaccatacctccttgaactacttcataacttgtcaagaaaagcagtttgcagcaagggcatgtggtgtgcacctagtattaaaattgctttgtcttaaaattgaacatgaggatattaaaaatacattgtgaagaagactgcttatctcagagtgaagatactgcggctgaaaagcactagtttgatataaaattaaaatgaccaaaaccctccaactttgaagctaaagaaggtaaacctttccattattgcattacatgttgtggaatctctcgagtgcaaagactgtctagttatttatcaggctatttctactgatgaactgcttcaggtgggggagggaaacttatttttatttgcctgatttaagtgtctgagaaacaaatctttgttctcttaggctgcaatggaacaactttaccagggttttggcatttcctttcctttcctttataaaacatgctcagcaaactgcaccagttaactacagtttggtaaattgttatgttaacaattatgacatctgcaatgttttataaagcaactaatttaataaaatcactgttgtgaggacttaaattttgtgttacctcccaagagatactttttgagagtatagaacacagctcttgggagtacagttctctacgttctctactaaatcttaataaatgcttgacatagttacagctttaaaacatgagtgatttgccaggtccttatgttgtcaccatagagcaacaaaggtatagggctgccttcctcttatttatttggggacattattttgttatttagataccaaggcctaattaattaagtacctataagaactatttatttggagtaactgagcctgtaactcaggtttatggctgttaagtatagattggggaatctttattatgtcttctcctaagcagtttaaccaaatgtgtggttagtgtttttttattcccctaagacagaaagaacaaaaaatgttttaaatttctcttatataggaaataataggaacgtcaaagctctgtatacctactaagtggaaaacaagaccatcatctaagtgatttgagaaattaacaaaagtagtgactacacagcaataattacagtaaattaaataaagattcctttaaggcagacaagggctaagatttccttagcagtaataatgacatacactgaattgaaaatctattttattacagaaagatcagtttctaacaaatgaaaatgtatcacctgttccttaactgtgtaaataataattaaatttctttgaaactggaa

SEQ ID NO: 103780 - DNA, 777 bp, Artificial Sequence
  derived and/or modified sequence
atggccgctgcagccgcagccgccggcgacagtgacagctgggatgccgacgctttttccgtggaggaccccgtccgaaaggtaggaggtggaggtaccgcagggggagatagatgggaaggtgaggacgaagacgaagacgtgaaggataattgggatgatgacgacgatgagaagaaagaggaggccgaggttaagcccgaagtaaagatatccgaaaagaagaagatagccgaaaagattaaggagaaggagcgtcagcaaaagaaacgtcaagaggagattaagaagcggttagaggagcctgaagagcccaaggtcctgacgccagaggaacagctagccgacaagttaaggctgaaaaagttgcaggaggaaagcgatcttgagttggccaaagagacttttggggtgaacaatgccgtgtatggcatagacgctatgaaccctagctcacgagatgatttcacagagttcgggaagttgcttaaggacaaaataacccagtacgagaaaagcttatactatgctagctttttggaggtcttagtgcgtgacgtatgcatctccttggagattgatgatctcaaaaagatcaccaacagtctgacggtcctgtgctccgaaaaacagaagcaggaaaaacagtcaaaggccaaaaaaaagaaaaaaggcgtggtgcccggtggtgggcttaaggctacaatgaaagatgatttggccgattatggcggctatgatggcggttacgtgcaggactatgaagatttcatgtag

SEQ ID NO: 103781 - DNA, 777 bp, Artificial Sequence
  derived and/or modified sequence
atggctgctgctgctgctgctgctggggacagcgacagctgggatgctgatgccttctctgtggaggaccctgtgaggaaggtgggcggcggcggcacagctggaggagaccgctgggagggggaggatgaagatgaagatgtgaaggacaactgggatgatgatgatgatgagaagaaggaggaggccgaggtgaagccagaggtgaagatcagcgagaagaagaagattgctgagaagatcaaggagaaggagcggcagcagaagaagaggcaggaggagatcaagaagaggctggaggagcctgaggagcccaaggtgctgaccccagaggagcagctggccgacaagctgcggctgaagaagctgcaggaggagagtgacctggagctggccaaggagaccttcggcgtgaacaatgctgtgtatggaattgatgccatgaaccccagcagcagagatgacttcacagaatttgggaagctgctgaaggacaagatcacccagtatgagaagagcctgtactatgccagcttcctggaggtgctggtgagagatgtgtgcatcagcctggagattgatgacctgaagaagatcaccaacagcctgactgtgctgtgcagcgagaagcagaagcaggagaagcagagcaaggccaagaagaagaagaagggcgtggtgcctgggggcggcctgaaggccaccatgaaggatgacctggccgactatggaggctatgatggcggctacgtgcaggactatgaggacttcatgtag

SEQ ID NO: 103782 - DNA, 777 bp, Artificial Sequence
  derived and/or modified sequence
atggccgccgccgccgccgccgccggcgacagcgacagctgggacgcggatgctttcagtgtagaagacccagtacgtaaagtcggcggtggtggtaccgcagggggagacaggtgggagggagaggatgaagacgaagacgttaaggacaactgggatgatgatgacgacgagaaaaaggaggaggccgaggtcaaacctgaagtgaagattagcgaaaaaaagaagatcgcagaaaagatcaaggaaaaagagcgacaacagaagaagcggcaggaagaaattaaaaaacggctggaggaaccagaagaaccgaaggttcttacacctgaggaacagctcgcagataaactgaggctcaaaaaacttcaagaggaatccgatctggagctggctaaggaaacctttggagtgaacaacgccgtttacgggattgatgcgatgaacccatcctcacgggacgactttaccgagttcgggaagctactgaaggataagataactcaatacgagaaatcgctctactatgcatccttcctggaggtgctggtgcgtgatgtgtgcatctctctggagattgacgacctcaagaagatcacaaattcattgactgtcttatgcagcgaaaagcaaaaacaggaaaagcagtccaaggctaagaagaagaagaagggagtagtccccggcggcggcttgaaagccacgatgaaggacgacctcgccgattatggcggatatgacggcggttatgtgcaggattacgaagatttcatgtag

SEQ ID NO: 103783 - DNA, 777 bp, Artificial Sequence
  derived and/or modified sequence
atggcagctgcagccgctgccgctggcgattcggatagctgggacgcagacgccttcagtgtggaggatccagtgaggaaggtgggcggaggtgggactgcgggaggggaccggtgggaaggagaagacgaggatgaagacgtaaaagataactgggacgacgatgacgatgagaaaaaagaggaagccgaagtaaaacccgaggtgaagatcagtgagaaaaagaaaatcgctgaaaagatcaaggaaaaagagcgccagcaaaaaaagcggcaagaagaaatcaagaaaaggctggaggaacctgaggaacctaaagttctcacacccgaagagcagctcgccgacaaactgaggttaaagaaactccaggaagaatccgatttggaactagctaaggagacatttggagtgaacaacgccgtgtacggcattgatgcaatgaatccgagcagcagagatgattttaccgagttcggaaagttgctgaaagacaaaattacccagtacgagaagtccctctattatgcctcatttctggaagtgttggtcagagatgtatgtattagtctggaaatagatgacttgaagaagattacaaactctctgacagttctgtgtagcgagaaacagaaacaggagaagcagtcaaaggccaagaagaagaagaaaggagttgttcctggaggaggacttaaagccactatgaaggacgacctggctgactacggagggtatgacggaggatatgtgcaagactatgaagatttcatgtag

SEQ ID NO: 103784 - DNA, 777 bp, Artificial Sequence
  derived and/or modified sequence
atggccgccgccgccgccgccgccggcgacagcgacagctgggacgccgacgccttcagcgtggaggaccccgtgagaaaggtgggcggcggcggcaccgccggcggcgacagatgggagggcgaggacgaggacgaggacgtgaaggacaactgggacgacgacgacgacgagaagaaggaggaggccgaggtgaagcccgaggtgaagatcagcgagaagaagaagatcgccgagaagatcaaggagaaggagagacagcagaagaagagacaggaggagatcaagaagagactggaggagcccgaggagcccaaggtgctgacccccgaggagcagctggccgacaagctgagactgaagaagctgcaggaggagagcgacctggagctggccaaggagaccttcggcgtgaacaacgccgtgtacggcatcgacgccatgaaccccagcagcagagacgacttcaccgagttcggcaagctgctgaaggacaagatcacccagtacgagaagagcctgtactacgccagcttcctggaggtgctggtgagagacgtgtgcatcagcctggagatcgacgacctgaagaagatcaccaacagcctgaccgtgctgtgcagcgagaagcagaagcaggagaagcagagcaaggccaagaagaagaagaagggcgtggtgcccggcggcggcctgaaggccaccatgaaggacgacctggccgactacggcggctacgacggcggctacgtgcaggactacgaggacttcatgtag

SEQ ID NO: 103785 - protein, 1319 aa, Artificial Sequence
  derived and/or modified sequence
MAQSLRLHFAARRSNTYPLSETSGDDLDSHVHMCFKRPTRISTSNVVQMKLTPRQTALAPLIKENVQSQERSSVPSSENVNKKSSCLQISLQPTRYSGYLQSSNVLADSDDASFTCILKDGIYSSAVVDNELNAVNDGHLVSSPAICSGSLSNFSTSDNGSYSSNGSDFGSCASITSGGSYTNSVISDSSSYTFPPSDDTFLGGNLPSDSTSNRSVPNRNTTPCEIFSRSTSTDPFVQDDLEHGLEIMKLPVSRNTKIPLKRYSSLVIFPRSPSTTRPTSPTSLCTLLSKGSYQTSHQFIISPSEIAHNEDGTSAKGFLSTAVNGLRLSKTICTPGEVRDIRPLHRKGSLQKKIVLSNNTPRQTVCEKSSEGYSCVSVHFTQRKAATLDCETTNGDCKPEMSEIKLNSDSEYIKLMHRTSACLPSSQNVDCQININGELERPHSQMNKNHGILRRSISLGGAYPNISCLSSLKHNCSKGGPSQLLIKFASGNEGKVDNLSRDSNRDCTNELSNSCKTRDDFLGQVDVPLYPLPTENPRLERPYTFKDFVLHPRSHKSRVKGYLRLKMTYLPKTSGSEDDNAEQAEELEPGWVVLDQPDAACHLQQQQEPSPLPPGWEERQDILGRTYYVNHESRRTQWKRPTPQDNLTDAENGNIQLQAQRAFTTRRQISEETESVDNRESSENWEIIREDEATMYSNQAFPSPPPSSNLDVPTHLAEELNARLTIFGNSAVSQPASSSNHSSRRGSLQAYTFEEQPTLPVLLPTSSGLPPGWEEKQDERGRSYYVDHNSRTTTWTKPTVQATVETSQLTSSQSSAGPQSQASTSDSGQQVTQPSEIEQGFLPKGWEVRHAPNGRPFFIDHNTKTTTWEDPRLKIPAHLRGKTSLDTSNDLGPLPPGWEERTHTDGRIFYINHNIKRTQWEDPRLENVAITGPAVPYSRDYKRKYEFFRRKLKKQNDIPNKFEMKLRRATVLEDSYRRIMGVKRADFLKARLWIEFDGEKGLDYGGVAREWFFLISKEMFNPYYGLFEYSATDNYTLQINPNSGLCNEDHLSYFKFIGRVAGMAVYHGKLLDGFFIRPFYKMMLHKPITLHDMESVDSEYYNSLRWILENDPTELDLRFIIDEELFGQTHQHELKNGGSEIVVTNKNKKEYIYLVIQWRFVNRIQKQMAAFKEGFFELIPQDLIKIFDENELELLMCGLGDVDVNDWREHTKYKNGYSANHQVIQWFWKAVLMMDSEKRIRLLQFVTGTSRVPMNGFAELYGSNGPQSFTVEQWGTPEKLPRAHTCFNRLDLPPYESFEELWDKLQMAIENTQGFDGVD

SEQ ID NO: 103786 - DNA, 3960 bp, Artificial Sequence
  derived and/or modified sequence
atggctcagtctctccggttgcatttcgcggcccgcaggtcaaacacctaccctttatctgaaacaagcggcgacgatttagatagccacgttcacatgtgcttcaaacgcccaacccgcatctccacctccaacgtcgtgcaaatgaagctcactccaaggcagactgcgctggcccctctcatcaaggagaatgtgcaatctcaagaacgttcgtctgtgcccagcagcgaaaacgtgaacaagaagtcgtcctgcctccagattagcctgcagccaacacgatattctggctatctccagtctagtaacgtgctcgcggacagcgacgacgcttccttcacttgcatcttaaaagacgggatttactcctcagccgttgttgataatgaactgaacgccgtcaatgacgggcacctggtatctagccctgccatatgcagtggatctttgagcaacttcagcacttctgacaacgggagttactctagcaacggctccgatttcggctcctgcgctagcattacgagtggcggaagctatacgaattcagtcatcagcgattcctccagctacacgttccctcctagtgacgacacattccttggaggaaaccttccctctgattccacgagtaacaggtcagttccaaacaggaatacgaccccgtgtgagatctttagccgctctacttcaaccgaccccttcgtgcaagatgacttggagcacgggttggagatcatgaaactgccggtctcaagaaacacaaagattcctctgaagcgttactcaagcttagtgatctttcccagatcaccttccacgactcggcctacatcaccaactagcctttgcacgctgctcagcaagggaagctaccagacatctcaccagttcattatttctccttccgaaattgctcacaacgaggatgggacatccgctaaggggtttctaagcacagcggtaaatggcctgaggctttccaaaacgatctgcacccctggggaggtgcgggacattcgtccgctgcacagaaagggatctctccagaaaaagattgttcttagtaacaatactcctcgccagacagtgtgcgaaaagagttcagagggctacagttgtgttagcgtgcacttcacccagcgcaaggcagctaccttggactgcgaaactaccaacggggactgtaagcctgaaatgagcgaaataaaactaaatagcgatagcgagtatattaagcttatgcatcgaactagtgcctgtctacccagtagccagaatgtcgattgtcaaattaacatcaacggggaactcgaaagacctcactcacaaatgaacaaaaaccacggcatattgcgccggagcattagcttggggggggcctaccccaatatatcttgtctgtcctctcttaaacacaattgttctaagggcgggccatcccagctgttgattaaatttgctagtggcaacgagggaaaagttgataacctatccagggatagcaacagggattgtaccaatgaacttagcaattcttgcaagacgagagacgatttcctcgggcaggttgacgtgccgctgtaccctctccccacagagaatccccggctcgagcgtccttatacattcaaggactttgtgcttcatcctagatctcacaaaagccgcgtgaagggttacctgcgcttgaaaatgacctatctgcccaaaacgagcgggagtgaggacgataacgcagagcaggcagaggaactcgaaccaggttgggtggtcctcgaccagcctgatgcggcctgccacctacaacagcaacaagagccctcacccttgcctcccggatgggaggagcggcaggatatcctcgggaggacttactacgtgaatcatgaatcaagaaggacccagtggaaacgacccactcctcaggataatctcactgacgcagaaaatggaaatatacaattacaggcacagcgggccttcaccacccgtcggcagattagcgaagaaaccgaatccgttgacaaccgcgaatctagtgaaaactgggaaataatcagggaagacgaggccacaatgtattccaatcaggcctttccatcacctcctcccagttcaaacctggacgtccctacccaccttgccgaggaactgaacgccagactcaccatatttggtaactcagccgtaagtcagcctgcgagttcttctaatcacagctccagaaggggtagcttgcaggcatataccttcgaagagcagcctactttacccgtgctccttcccacttcttcaggcttaccaccaggctgggaagaaaaacaggacgaaaggggtcgctcttattacgtggaccacaattctcggacaactacatggaccaagccaacagttcaagccaccgttgagacttcccagctcactagtagccagagttctgccggccctcagtcccaggcttccaccagtgattccggacagcaggttactcagccaagcgaaattgagcaggggttcttgcccaagggctgggaagtgaggcacgctcccaacgggcgccccttttttatcgaccacaatacaaagaccacaacctgggaagaccctcgtttaaaaattcccgcccacctgcgcggcaaaacttcattagacacctctaacgacctgggtccactgccaccaggatgggaggaaagaacacatacagacgggaggatcttctatattaaccacaatatcaaacgaactcagtgggaagaccctaggttggaaaatgttgcaatcacaggcccagccgttccctattcgcgagattacaaacgcaagtacgagttcttcagacggaagctcaaaaaacagaacgatattcctaacaaattcgagatgaagctgaggcgggctacagtgcttgaagactcctatcggaggatcatgggggtgaaaagagcagactttctcaaggcccgattgtggattgagttcgacggggagaaaggcctggattacggcggcgtcgcacgggaatggttctttctcatctctaaggagatgtttaacccgtattacggcctttttgagtactctgcgactgataattatacacttcagatcaatccaaatagcggcctctgcaacgaagatcacctttcttacttcaagtttataggaagggtggcgggaatggccgtgtaccacggcaaactgctagacggctttttcataagacccttctacaaaatgatgctccacaagcccattactcttcatgacatggaatcagtcgatagtgaatactataacagtctgcgttggatcctcgagaacgaccctactgaacttgacttacgctttatcattgatgaggagctatttggccagactcatcagcatgagctcaagaacggaggttccgagatcgtggtcactaacaaaaacaaaaaggaatatatttacctcgtgatccagtggcgctttgtgaataggatccaaaaacagatggccgcatttaaggaaggcttttttgagttaatcccccaggacctcattaagatcttcgacgagaacgaactggagttgctcatgtgtggtctgggtgatgtggacgtgaatgactggagggaacacacaaagtacaaaaacggatacagtgcaaaccaccaagtaattcagtggttttggaaggccgtcctcatgatggactctgaaaagagaatcaggctattgcaatttgtgacagggacgtcgcgggtgcctatgaacggtttcgccgagctgtatggaagtaacggaccccaatcattcactgttgagcaatgggggactccagaaaagttgcctagggctcacacatgcttcaacaggctcgatctcccgccttatgagtcctttgaagagctttgggacaagctgcagatggcaattgagaatactcaggggttcgatggagtggattag

SEQ ID NO: 103787 - DNA, 3960 bp, Artificial Sequence
  derived and/or modified sequence
atggcccagagcctgcggctgcactttgctgcccggcgcagcaacacctaccccctgtctgagaccagcggagatgacctggacagccacgtgcacatgtgcttcaagaggcccacccgcatcagcaccagcaatgtggtgcagatgaagctgaccccccggcagacagccctggcccccctcatcaaggaaaatgtgcagagccaggagaggagctctgtgcccagcagtgaaaatgtgaacaagaagagcagctgcctgcagatcagcctgcagcccacccgctacagcggctacctgcagagcagcaatgtgctggccgacagtgatgatgccagcttcacctgcatcctgaaggatggcatctacagcagcgctgtggtggacaatgagctgaatgctgtgaatgatggccacctggtgagcagccctgccatctgcagcggcagcctgagcaacttcagcaccagtgacaatggcagctacagcagcaatggaagtgactttggcagctgtgccagcatcaccagcggcggcagctacaccaacagcgtcatcagtgacagcagcagctacaccttccccccatctgatgacaccttcctgggcggcaacctgcccagcgacagcaccagcaacagatctgtgcccaacagaaacaccaccccctgtgagatcttcagccgcagcaccagcacagacccctttgtgcaggatgacctggagcacggcctggagatcatgaagctgcctgtgtccaggaacaccaagatccccctgaagcgctacagcagcctggtgatcttccccaggagccccagcaccacccggcccaccagccccaccagcctgtgcaccctgctgagcaagggcagctaccagaccagccaccagttcatcatcagccccagcgagatcgcccacaatgaagatggcaccagcgccaagggcttcctgagcacagctgtgaatggcctgcggctgagcaagaccatctgcaccccaggagaggtgcgggacatccggcccctgcacaggaagggcagcctgcagaagaagatcgtgctgagcaacaacaccccccggcagacagtgtgtgagaagagcagcgagggctacagctgtgtgtctgtgcacttcacccagaggaaggccgccaccctggactgtgagaccaccaacggggactgcaagccagagatgtctgagatcaagctgaacagcgacagcgagtacatcaagctgatgcacaggaccagcgcctgcctgcccagcagccagaatgtggactgccagatcaacatcaacggggagctggagcggccccacagccagatgaacaagaaccacggcatcctgcggcgcagcatcagcctgggcggggcctaccccaacatcagctgcctgagcagcctgaagcacaactgcagcaagggcggccccagccagctgctgatcaagtttgccagcggaaatgaaggcaaggtggacaacctgagccgggacagcaacagagactgcaccaatgagctgagcaacagctgcaagaccagagatgacttcctgggccaggtggatgtgcccctgtaccccctgcccacagagaacccccggctggagcggccctacaccttcaaggactttgtgctgcaccccaggagccacaagagccgggtgaagggctacctgcggctgaagatgacctacctgcccaagaccagcggctctgaagatgacaatgctgagcaggccgaggagctggagcccggctgggtggtgctggaccagccagatgctgcctgccacctgcagcagcagcaggagcccagccccctgcccccaggctgggaggagcggcaggacatcctgggccgcacctactacgtgaaccacgagagcaggaggacccagtggaagaggcccaccccccaggacaacctgacagatgctgaaaatggaaacatccagctgcaggcccagagggccttcaccacccggcggcagatcagcgaggagacagaatctgtggacaaccgggagagcagcgagaactgggagatcatccgggaggatgaggccaccatgtacagcaaccaggccttccccagccccccacccagcagcaacctggatgtgcccacccacctggccgaggagctgaatgcccggctgaccatctttggaaacagcgctgtgtcccagcctgccagcagcagcaaccacagcagccggcggggcagcctgcaggcctacacctttgaggagcagcccaccctgcctgtgctgctgcccaccagcagcggcctgcccccaggctgggaggagaagcaggatgagcggggccgcagctactacgtggaccacaacagcaggaccaccacctggaccaagcccaccgtgcaggccaccgtggagaccagccagctgaccagcagccagagcagcgctggcccccagagccaggccagcaccagtgacagcggccagcaggtgacccagcccagcgagattgagcagggcttcctgcccaagggctgggaggtgagacatgccccaaatggccggcccttcttcatcgaccacaacaccaagaccaccacctgggaggacccccggctgaagatcccagcccacctgcggggcaagaccagcctggacaccagcaatgacctgggccccctgcccccaggctgggaggagaggacccacacagatggccgcatcttctacatcaaccacaacatcaagaggacccagtgggaggacccccggctggagaatgtggccatcactggacctgctgtgccctacagccgggactacaagaggaaatatgagttcttccggaggaagctgaagaagcagaatgacatccccaacaagtttgagatgaagctgcggcgggccaccgtgctggaggacagctaccgccgcatcatgggcgtgaagagagctgacttcctgaaggcccggctgtggattgaatttgatggagagaagggcctggactatggaggagtggcccgggagtggttcttcctgatcagcaaggagatgttcaacccctactacggcctgtttgagtacagcgccacagacaactacaccctgcagatcaaccccaacagcggcctgtgcaatgaagaccacctgagctacttcaagttcatcggccgggtggccggcatggctgtgtaccacggcaagctgctggatggcttcttcatccggcccttctacaagatgatgctgcacaagcccatcaccctgcatgacatggagagcgtggacagcgagtactacaacagcctgcgctggatcctggagaatgaccccacagagctggacctgcgcttcatcattgatgaggagctgtttggccagacccaccagcacgagctgaagaatggaggcagcgagatcgtggtgaccaacaagaacaagaaggagtacatctacctggtgatccagtggaggtttgtgaaccgcatccagaagcagatggccgccttcaaggagggcttctttgagctgatcccccaggacctgatcaagatctttgatgaaaatgagctggagctgctgatgtgtggcctgggagatgtggatgtgaatgactggagggagcacaccaagtacaagaatggctacagcgccaaccaccaggtgatccagtggttctggaaggctgtgctgatgatggacagcgagaagaggatccggctgctgcagtttgtgacaggcaccagccgggtgcccatgaatggatttgctgagctgtatggcagcaatggcccccagagcttcaccgtggagcagtggggcaccccagagaagctgccccgggcccacacctgcttcaaccggctggacctgcccccctatgagagctttgaggagctgtgggacaagctgcagatggccatcgagaacacccagggctttgatggagtggactag

SEQ ID NO: 103788 - DNA, 3960 bp, Artificial Sequence
  derived and/or modified sequence
atggcccagagcctgcggctgcacttcgccgcccggcggagcaacacctaccccctctccgagacttctggggacgaccttgatagtcatgtgcacatgtgttttaagcgccccactcgcattagcactagcaatgtggtgcagatgaaactcaccccaaggcaaaccgccctcgcccccctcatcaaagagaatgtgcagagtcaagagagaagctcagtcccttcctctgaaaatgtgaataaaaagtcttcttgccttcagatatccctgcagcctacacgctactctggatacctccaatcttccaatgtccttgctgacagcgacgatgcttcttttacctgtatcttgaaggacggcatttactcttcagccgttgttgataacgaactgaacgcggttaacgatggtcacctcgtctctagcccagctatctgctccgggagcctcagtaattttagcacatctgataatggtagctactccagcaacgggtctgactttggctcctgcgctagtatcaccagtggagggtcctatactaacagcgtgatctcggatagcagtagttacacattcccgcccagcgatgatacatttttagggggaaacctccccagcgactcaacctcaaaccgaagtgtacctaaccggaacaccaccccttgcgagatattctctcggtctacctccactgatcctttcgtgcaggatgatctggagcacggcctggaaattatgaaactaccagtctctaggaacacaaagattccgttaaagagatacagcagtctcgttatatttccgcgatctccctcgacaactcggccgacttctccaacatcattgtgtaccctgttaagtaagggctcatatcaaacatcacaccagtttatcatcagcccaagtgaaatcgctcataatgaggatggcacttccgcaaaggggttcttaagtacagccgtgaatggcctgcggcttagcaagacgatatgcacacctggcgaagtcagagacatccgccctctgcatcgcaagggatccctacagaagaagatcgtgctgtcaaataatacccccagacagaccgtgtgtgagaagtcctctgaaggctatagctgcgtgagcgtgcattttactcagcggaaggccgctactctcgactgtgaaactacaaacggcgactgtaaacctgagatgtccgagattaagttgaattccgattctgaatacatcaagcttatgcaccgcactagcgcttgtttgcccagcagccagaacgtggattgccagatcaacatcaacggcgagttagagaggccgcattcacaaatgaacaagaaccacggcatactgaggcgctcaatctctcttggaggcgcctatccaaatataagttgtctcagctccctgaagcacaactgctcaaaaggtggcccctcccagcttttaatcaaatttgccagtgggaatgagggtaaggtggataacctcagtagagattcgaatcgcgactgcaccaatgagctgtcgaacagttgcaagacaagggacgacttccttggacaggtagacgtccccctttacccgctccccaccgaaaatccccgcctggagcgtccttataccttcaaggacttcgtgctgcaccctaggtcccacaagtcgcgcgtcaagggctatcttcgcttgaaaatgacttatctgccgaagacaagtggaagtgaagatgacaacgccgaacaagccgaggagcttgagcccggctgggtggttctcgatcaaccggatgcggcatgtcacttacagcagcaacaagagccttccccactcccacctggatgggaagaacgccaggatattttagggaggacttactatgttaatcatgaatcacggcgcacacagtggaagcgacctaccccacaggacaatctgacagacgccgagaacggtaatatacagttgcaggcccaacgcgctttcaccacacgtaggcagatttcggaggagaccgagagcgtggataatcgggagagtagtgagaattgggagatcatacgcgaggatgaagcaactatgtattcaaaccaggcctttcccagccccccaccttcatctaacctcgatgtcccaacacatctcgccgaggaactcaacgcccgacttaccatttttggcaacagtgctgtgagccagcccgcatcatcaagcaatcacagctcacggagaggtagtttgcaagcatatactttcgaagaacagcctactcttcccgtgctgttacctacaagttccggactgccacccggatgggaggaaaagcaggacgagagggggcgctcatattacgtggatcacaactcacgtaccacgacatggaccaaaccaacagtgcaggccactgtagagacctctcagctgacgagcagccagagtagtgccggaccccagtcccaggcctcaacttctgatagtggccagcaggtaacccagcccagtgaaatcgaacaaggattcttgcctaagggctgggaagtccgccacgcaccaaacggccggccattctttattgatcacaatactaagaccactacttgggaggacccacggcttaaaattcctgcacatttgagaggtaagacgtccctagacacaagcaacgacctgggcccacttccgcctggatgggaggagagaactcacacagacggcagaattttttatattaatcataacatcaagcgcactcagtgggaggatccaaggcttgagaatgtggcaatcacaggtccggctgtgccctattctcgggattacaaaagaaagtatgagtttttcagaaggaaacttaaaaagcaaaacgatatcccaaataaattcgagatgaagctgaggcgcgcaacagtgctcgaggattcttaccgccggattatgggcgtgaagcgggccgactttcttaaggcccgtttgtggattgaatttgatggtgagaagggattggactatggcggagtggcgcgcgagtggttcttcctgatatccaaagagatgtttaatccgtattatgggctctttgaatactcagccacagacaactatactttgcagattaaccctaacagtggcctttgcaatgaagatcacctctcttactttaaatttattgggcgtgtcgccggaatggccgtgtatcatgggaagctgctggacggtttcttcatcaggccattttacaagatgatgctccacaagcctatcacactccatgatatggagtccgtggatagtgagtactataattcactccggtggatcttggaaaatgatccgacggagttggacctccgctttatcatcgatgaagaattatttggccaaacccaccagcacgaactcaagaatggcggctccgaaatcgttgtcaccaataaaaacaagaaggagtacatttacctagtaatacagtggagatttgtcaaccgaatccagaagcagatggcagccttcaaggagggcttcttcgaattgattcctcaggatttgattaagatattcgatgaaaatgagttagaacttctcatgtgcgggctaggcgatgtggacgttaacgactggcgggagcataccaaatacaaaaatggatactctgctaaccaccaggtaattcagtggttttggaaggctgtgctaatgatggactctgagaagaggatcaggttgctgcaattcgtcacaggaactagcagggtgcccatgaatggatttgcagaactgtacggctccaatggtcctcagtcatttaccgttgaacaatgggggactcctgaaaagttgcctcgcgctcacacgtgctttaatagactggatctgcccccctacgagtcattcgaggaactctgggacaagctgcagatggctattgagaacacccaaggcttcgatggagtcgattag

SEQ ID NO: 103789 - DNA, 7235 bp, Artificial Sequence
  derived and/or modified sequence
gctgcagctgagctcagcttaaaggtcgctggaaatcaagtgctttgtaagtgaaggcattttgactacaagcgattcaagacattttggaaacgtcagtctctggaatgggtcgtctttttctttctatgatatctggtatctaatgttttacttaggataaagactactacttaatagctcttttaggcaccacaaatgattttttcttttgatgcagtgcagctgcttctagcctgtctacggacagagatctttgttatgactttcagcccttaacatgtttggaaatgagaacaaatggcacaaagcttacgattgcactttgcagccagaagaagcaatacttaccctttgtcagaaacctccggagatgacttggatagccatgttcacatgtgcttcaaaagaccaacacggatttcaacgtctaacgttgttcaaatgaagctgactcccagacagactgcactagctccgttaataaaggaaaacgttcagtctcaagaaagatcatctgttccctcatctgaaaatgttaataaaaagagcagctgtctacagatttcactacagccaacaaggtacagtggatatcttcagtctagcaatgtcttagctgatagtgatgatgcttcgtttacttgtatcttgaaggatggtatttacagtagtgctgtggtcgataatgaattgaatgctgtgaatgatggtcaccttgtaagcagtccagccatttgtagtggtagccttagtaacttttcaaccagtgataatgggtcttacagcagcaacggtagtgattttgggtcatgtgcaagtatcacaagtggaggttcatatactaacagtgtcatcagtgacagtagtagttatacttttccaccaagtgatgatacttttttgggtggaaacttaccttctgacagcacctccaatagaagtgtgccaaacaggaatactactccttgtgaaattttttcaagaagtacaagtacagatccttttgtccaggatgacttggaacatggattagagattatgaaattgccagtgagcaggaacacaaaaattccactaaaacgttactcctccttagtcatttttcctaggagtccttcaactacccgaccgacttctccaacaagtctgtgtactcttctgagcaaaggatcctatcaaacttcacaccagtttattatttctcctagtgaaattgcacataatgaggatggcactagtgctaaaggatttctttcaacagctgtcaatggacttcggttatctaaaacaatttgtacccccggagaagtaagagacatacggccgcttcacaggaagggctcgttacagaagaaaattgttctttcgaataatactcccagacagactgtctgtgaaaagtcatctgaaggatattcttgtgtttcagtgcatttcacccaacgaaaagcagctacattagactgtgaaacaacaaatggtgattgtaaaccagaaatgtcagaaattaagcttaattctgattcagagtatattaagctcatgcataggacatctgcatgtttgccatcctcccaaaatgtagattgtcaaataaatatcaatggagaattggaaagaccacattcacagatgaacaaaaaccatggtattttacgaagaagtatttcattgggaggagcttatccaaatatttcctgtctatccagccttaagcacaattgttctaaagggggaccatctcagttactcataaagtttgcatctggaaatgaaggtaaagtggataatttatcaagagacagcaacagagattgcacaaatgaactgtctaattcttgcaagacaagagatgatttcctaggtcaagtggatgttccactttatccattaccgacagaaaatccaagattggagagaccatatacatttaaggattttgttcttcatccaagaagtcacaaatcaagagttaaaggttatctgagactaaaaatgacttatttacctaaaaccagtggctcagaagatgataatgcagaacaggctgaggaattagagcctggctgggttgttttggaccaaccagatgctgcttgccatttgcagcaacaacaagaaccttctcctctacctccagggtgggaagagaggcaggatatccttggaaggacctattatgtaaaccatgaatctagaagaacacagtggaaaagaccaacccctcaggacaacctaacagatgctgagaatggcaacattcaactgcaagcacaacgtgcatttaccaccaggcggcagatatccgaggaaacagaaagtgttgacaaccgagagtcttccgagaactgggaaattataagagaagatgaagccaccatgtatagcaaccaggccttcccatcacctccaccgtcaagtaacttggatgttccaactcatcttgcagaagaattgaatgccagactcaccatttttggaaattcagccgtgagccagccagcatcgagctcaaatcattccagcagaagaggcagcttacaagcctatacttttgaggaacaacctacacttcctgtgcttttgcctacttcatctggattaccaccaggttgggaagaaaaacaagatgaaagaggaagatcatattatgtagatcacaattccagaacgactacttggacaaagcccactgtacaggccacagtggagaccagtcagctgacctcaagccagagttctgcaggccctcaatcacaagcctccaccagtgattcaggccagcaggtgacccagccatctgaaattgagcaaggattccttcctaaaggctgggaagtccggcatgcaccaaatgggaggcctttctttattgaccacaacactaaaaccaccacctgggaagatccaagattgaaaattccagcccatctgagaggaaagacatcacttgatacttccaatgatctagggcctttacctccaggatgggaagagagaactcacacagatggaagaatcttctacataaatcacaatataaaaagaacacaatgggaagatcctcggttggagaatgtagcaataactggaccagcagtgccctactccagggattacaaaagaaagtatgagttcttccgaagaaagttgaagaagcagaatgacattccaaacaaatttgaaatgaaacttcgccgagcaactgttcttgaagactcttaccggagaattatgggtgtcaagagagcagacttcctgaaggctcgactgtggattgagtttgatggtgaaaagggattggattatggaggagttgccagagaatggttcttcctgatctcaaaggaaatgtttaacccttattatgggttgtttgaatattctgctacggacaattataccctacagataaatccaaactctggattgtgtaacgaagatcacctctcttacttcaagtttattggtcgggtagctggaatggcagtttatcatggcaaactgttggatggttttttcatccgcccattttacaagatgatgcttcacaaaccaataacccttcatgatatggaatctgtggatagtgaatattacaattccctaagatggattcttgaaaatgacccaacagaattggacctcaggtttatcatagatgaagaactttttggacagacacatcaacatgagctgaaaaatggtggatcagaaatagttgtcaccaataagaacaaaaaggaatatatttatcttgtaatacaatggcgatttgtaaaccgaatccagaagcaaatggctgcttttaaagagggattctttgaactaataccacaggatctcatcaaaatttttgatgaaaatgaactagagcttcttatgtgtggactgggagatgttgatgtgaatgactggagggaacatacaaagtataaaaatggctacagtgcaaatcatcaggttatacagtggttttggaaggctgttttaatgatggattcagaaaaaagaataagattacttcagtttgtcactggcacatctcgggtgcctatgaatggatttgctgaactatacggttcaaatggaccacagtcatttacagttgaacagtggggtactcctgaaaagctgccaagagctcatacctgttttaatcgcctggacttgccaccttatgaatcatttgaagaattatgggataaacttcagatggcaattgaaaacacccagggctttgatggagttgattagattacaaataacaatctgtagtgtttttactgccatagttttataaccaaaatcttgacttaaaattttccggggaactactaaaatgtggccactgagtcttcccagatcttgaagaaaatcatataaaaagcatttgaagaaatagtacgacaacttatttttaatcacttttaaataatgtgttgcatttacacagttgtttcatgctgtctttagagttaggtgcctgcctaaagccaggcaccaccacacctggctttagagttcacacaataggatataagtcctgtatgacttaaatagtgaattttgtccttaacatttacctcttgtatagtatctgccaggcagttttttcttaaactactgagatgataactgtgaaatatttgtgatacgtgtcatgtgtgaaaagtttgatgcattttgagatggaaaactgaaatttggaaaaagaaatactttactattgagtaaactacaatatatttagtgctactcgcagctatttattattttgtagacctgccttatgcaccttactgcctagatttttgggaaaaaactttggaaagtgtgttacctatatttctagccaactaactcacagaaaaactgtttacttcttcactttcgaagtatttggcttttgttaatatgcagttttactaaacagatggttcataagacatgtgaagcaaattcatatttgcaatgggtaaaaagtattaaagcctttctcttgcctgcatatcctattgaccattggtatagtcatcactttttcatattttagtgtagttagaagaattccttcttcaaacattaaagatccacaaagcagtatttctaaatatgccttgaagaactaaatgaagtgtatagcacttgcctttactagatattctttacacttgtacaattatgtagtaaatgtatgtttacagggtttatcatgtttacagattaagctaatttctgtagtcgcatttttatatttttagtatcactctagtaaaaaaaccaaataatttgtttaaaataaccaaagagttgttataatgcataatttgtattaaatttattactatttcttatgccttttaaaatactgtttactatgaagacaatgtttttaattacaaatccagaattctgtaggcaaaatgctacagttcatatcttcctttaaccaaactgaagtacataaagaccatgtacatgtattcatcaaacgtttattgaatgctgcgtgcctagcgctgtgctatgctctggggtaagagttgtcagcttcagagaagctgagtcctgatcctcaaggaacttgcaaatgtgtctatgaatttgtaaaacaatcaaaagtaggcgtaagcagaataaggcaaaagggaaagtgttctaggttccagcacacctgcaaagataaagtgtgccaagactgtatttatatttcatacttatattgtttcatccttatattggaatgattatatagaaaatgctcttaaaaagattaaacctatttctcagtatggtatcttggtgatttaggaataattgtaaatatatgttacgaatcttcttaaatatatatatatacacaccctgtgagaactgtaaaaagtacctctggttcttggtttaagtttgttggggtataacatgatgagtactcattagcacctgatagaaatctgaaatgtgacagtagcaaaaccactttctactttccaaacaccacagcatcagcatggtttaggggaagcaattcacagattaatgtaccctgcgttttgtcttcaccattgtcaaccagcagtcaaggatgagcaccaggtatagtcctggtttgatatctcaccagccatgtgaactgaagcagcttacttaacctctctggattcatatttcttcatctgtcaaatgagagtaatcatgcccaccctcattgtcatgccagattgtcagaagttccagacagatgagaaagcaaaaagtactttgtaaagtgttatacaatcagaaggtgctttgtgctgaccgtcagattgtgtcaagtcaggtgtgcaaattgaccacactcccaaagaatcatttaaaagtaaagtgacttctaagagacaaggaagtaggaacatttctgatattaaatatataaataatatggatacacatgtgtatatctgtatatggatcttaccatcataattcattttcttcatatcagcaaagtaatagtaatgtgggccaatgcattttggaaatgtcctcattatgtagaatggaatgtgaaaattatttttgttaaaacaggattttgccacaattatttaaatattatgtttgtgaactatctaagcatgagaaaatacaaagctttctttgtatctggctgatactcatttggatgattctgtgactcatagaacatgatgttaaatgagaccagactcaactgccaccagtccccagctgcagaccttcatccccttcatctcccactaggggctcgtggtctggaagaaacatctatcaagcaacacagccccttatcccagatagaaaagtgtctcaaatgcattctactgcgggacagtcagtaggatcattttcataaagcaaggacatcatatgtttctagaaattacaagcatataactttagcctacaatctcttattaaaaatttttaacaaaattgtattacaaatgcatttcatcagaactcaaatttaaatggtgtttgttttgggtttttatttataatgctgaagttattccatataagtatcaagttaaacacaattcattttgattataaactatttgactttttaaaatcttctgacacagtaaatatatatatcaagattgatgtatcaaaatttattgcacactttaaagtgtaaaatcattttttaaaatcttgaatccacaaataaagttctattctgattttaaaaaacaaaa

SEQ ID NO: 103790 - DNA, 3960 bp, Artificial Sequence
  derived and/or modified sequence
atggctcagagcctgaggttacattttgccgctcgtcgctcaaatacgtaccctctgagtgaaacctcaggtgatgacctcgacagtcacgtgcacatgtgtttcaagcggcctaccaggattagtacatcaaacgtggtgcagatgaaactcacacccagacagacggcactagcacctttgatcaaggagaacgtgcaatctcaggagcggtcaagcgtcccatccagtgagaacgtcaacaagaagtcctcatgtctccagataagcctccaacctacaaggtatagcggctacctgcagtccagcaacgtgctggcagacagtgacgacgcatcttttacttgtatactgaaggacggcatctactcgtctgcggtggtggacaacgaactgaacgctgtgaatgacggccacctcgtgtctagccccgctatctgtagcggatcactgagcaacttcagtacttcagacaacggatcctattcttcaaacgggtcagacttcggaagctgcgcaagcatcacatctgggggatcctacactaactccgtgatatccgattcatctagttatacatttccaccaagtgacgacacatttctcgggggtaatcttccaagcgactcaacctctaacaggagcgtgccaaataggaacacaaccccctgcgaaatcttctccaggagtacgagcaccgatcccttcgtacaggacgatctcgagcatgggctcgagatcatgaaactgccggtctctaggaacactaaaatccccctgaagagatacagctctctggtcattttccctcgctcccctagtacgacaaggccaaccagccctacttctctgtgcacccttctgtcaaagggatcctaccagacctcgcatcaattcataatatccccttccgagatcgcccacaatgaagacgggacatccgctaaggggttcctgagcaccgccgtcaacggattgcggctctctaagaccatctgcacccccggtgaggtccgggacatccgccctctgcatcgcaaagggtctttgcagaagaagatcgtgctgtctaacaatactccccgtcagactgtgtgcgagaagagtagcgagggatactcatgcgtttctgtccattttactcaaagaaaagctgcaacacttgactgcgaaaccaccaacggtgattgcaaaccagagatgtctgagataaaacttaactcagacagcgagtatatcaaactgatgcaccggactagcgcctgtctgccatcctcccagaatgtcgactgtcagattaacatcaatggcgaactggaacggcctcacagtcaaatgaataagaatcacggcatccttcgacgaagtattagcttgggtggtgcttatccaaatatttcctgcctgagctccttaaaacataactgtagtaaggggggacctagtcagttgttgatcaaattcgccagcgggaacgaggggaaggtggacaacctaagccgcgactcaaatagggactgcaccaatgagctgtctaatagctgcaagacccgggacgattttttggggcaggtcgacgtacccttataccccttacctactgagaatcccagactcgagcgcccatatacattcaaggacttcgtgctccatccacggagtcataagtcccgggtgaaaggctatctgcgactcaaaatgacttacttgcctaaaacttccggaagtgaggacgataacgccgaacaggcagaggagctggagcctgggtgggtcgtgctggatcagcctgacgccgcatgccacctccagcagcagcaggaaccatctccactgccacccggttgggaggagcgacaggacatcctcggccgtacctattatgtgaaccacgaaagtcgacggacacaatggaaaaggcctacccctcaggataatctcactgatgcagaaaacggcaacatccagttgcaggcgcagcgagcgtttactactcgcaggcaaataagtgaagagacggaatccgtcgacaaccgggagagttccgagaattgggaaattataagagaggatgaggccaccatgtatagcaatcaggccttcccctcgccccctccatcctccaatctagatgtgcccacccacctagctgaggaactcaacgccaggcttaccatatttggaaacagcgctgttagtcagccagcctcctctagcaatcattcatctcgtcgaggatcgctgcaggcttacacattcgaagaacagcccacgttgcccgtacttctgcctacttcttcgggcctcccgcctgggtgggaagagaaacaggacgaaagaggtagatcatattatgtggatcacaatagccgtacgactacatggaccaaaccaacagtccaagccaccgttgagacgagccaactgaccagcagccagtcttctgctggaccgcagagtcaagctagcacttccgacagtggccagcaggtaacacagccgtccgaaatcgagcagggcttcctgcccaagggatgggaggtgcggcatgctcctaacggaagacctttctttatcgaccataataccaagaccaccacctgggaggatcctcggctgaagattccagcacaccttcgaggaaagacttccttggacacttctaacgacttgggccctctgccgcctggctgggaggagaggacgcacaccgatggtaggatcttctacattaaccacaacattaagcggacacagtgggaagacccgagattggaaaatgttgctatcaccggcccagctgttccctactctagagattacaagcgcaagtatgaattcttccgtcgaaaactgaagaagcaaaatgatattcccaacaagtttgaaatgaagctgagaagagctactgtactagaagactcctaccgccgaatcatgggcgtaaagagggccgattttctgaaggctaggctgtggatagaatttgacggcgaaaaaggcctggactatggtggcgtagctagggaatggtttttcctgatttccaaggaaatgtttaacccttattacggtctatttgaatatagcgccacggataactatacgctgcagatcaaccctaactccggactttgcaacgaggatcatctgagctacttcaaattcattggcagagtcgccggaatggccgtttaccatgggaaactgctggatggctttttcatcagacccttttacaagatgatgctccataagcccataacattgcacgacatggagtcagtggattccgaatactataatagcctccgctggattctagagaatgatcctactgagctggacctgcgattcataatcgatgaggagttattcggacagacccaccaacacgagctaaagaacggcggttcggagattgttgtgaccaataagaataaaaaggaatacatctatcttgtcattcaatggagattcgtaaatagaattcagaagcagatggcagcatttaaggaagggttcttcgagctgataccccaggacctgatcaaaatctttgatgagaacgaattggaattgctaatgtgcggcctgggcgacgttgatgtgaatgactggagggagcataccaaatacaaaaacggatattcagcaaaccaccaggttatccagtggttctggaaggcggtgctcatgatggacagtgaaaagagaatccgtctgctccagtttgtgacgggaacttctcgggttcccatgaatggctttgccgagctgtatggttccaatgggccacagtcttttacggtcgaacagtggggcacacccgaaaaactgcccagggcccacacctgctttaaccggctcgacctgcctccttacgagagcttcgaggaactgtgggacaaactgcagatggccattgagaacactcagggattcgacggcgtcgactag

SEQ ID NO: 103791 - DNA, 3960 bp, Artificial Sequence
  derived and/or modified sequence
atggcccagagcctgagactgcacttcgccgccagaagaagcaacacctaccccctgagcgagaccagcggcgacgacctggacagccacgtgcacatgtgcttcaagagacccaccagaatcagcaccagcaacgtggtgcagatgaagctgacccccagacagaccgccctggcccccctgatcaaggagaacgtgcagagccaggagagaagcagcgtgcccagcagcgagaacgtgaacaagaagagcagctgcctgcagatcagcctgcagcccaccagatacagcggctacctgcagagcagcaacgtgctggccgacagcgacgacgccagcttcacctgcatcctgaaggacggcatctacagcagcgccgtggtggacaacgagctgaacgccgtgaacgacggccacctggtgagcagccccgccatctgcagcggcagcctgagcaacttcagcaccagcgacaacggcagctacagcagcaacggcagcgacttcggcagctgcgccagcatcaccagcggcggcagctacaccaacagcgtgatcagcgacagcagcagctacaccttcccccccagcgacgacaccttcctgggcggcaacctgcccagcgacagcaccagcaacagaagcgtgcccaacagaaacaccaccccctgcgagatcttcagcagaagcaccagcaccgaccccttcgtgcaggacgacctggagcacggcctggagatcatgaagctgcccgtgagcagaaacaccaagatccccctgaagagatacagcagcctggtgatcttccccagaagccccagcaccaccagacccaccagccccaccagcctgtgcaccctgctgagcaagggcagctaccagaccagccaccagttcatcatcagccccagcgagatcgcccacaacgaggacggcaccagcgccaagggcttcctgagcaccgccgtgaacggcctgagactgagcaagaccatctgcacccccggcgaggtgagagacatcagacccctgcacagaaagggcagcctgcagaagaagatcgtgctgagcaacaacacccccagacagaccgtgtgcgagaagagcagcgagggctacagctgcgtgagcgtgcacttcacccagagaaaggccgccaccctggactgcgagaccaccaacggcgactgcaagcccgagatgagcgagatcaagctgaacagcgacagcgagtacatcaagctgatgcacagaaccagcgcctgcctgcccagcagccagaacgtggactgccagatcaacatcaacggcgagctggagagaccccacagccagatgaacaagaaccacggcatcctgagaagaagcatcagcctgggcggcgcctaccccaacatcagctgcctgagcagcctgaagcacaactgcagcaagggcggccccagccagctgctgatcaagttcgccagcggcaacgagggcaaggtggacaacctgagcagagacagcaacagagactgcaccaacgagctgagcaacagctgcaagaccagagacgacttcctgggccaggtggacgtgcccctgtaccccctgcccaccgagaaccccagactggagagaccctacaccttcaaggacttcgtgctgcaccccagaagccacaagagcagagtgaagggctacctgagactgaagatgacctacctgcccaagaccagcggcagcgaggacgacaacgccgagcaggccgaggagctggagcccggctgggtggtgctggaccagcccgacgccgcctgccacctgcagcagcagcaggagcccagccccctgccccccggctgggaggagagacaggacatcctgggcagaacctactacgtgaaccacgagagcagaagaacccagtggaagagacccaccccccaggacaacctgaccgacgccgagaacggcaacatccagctgcaggcccagagagccttcaccaccagaagacagatcagcgaggagaccgagagcgtggacaacagagagagcagcgagaactgggagatcatcagagaggacgaggccaccatgtacagcaaccaggccttccccagccccccccccagcagcaacctggacgtgcccacccacctggccgaggagctgaacgccagactgaccatcttcggcaacagcgccgtgagccagcccgccagcagcagcaaccacagcagcagaagaggcagcctgcaggcctacaccttcgaggagcagcccaccctgcccgtgctgctgcccaccagcagcggcctgccccccggctgggaggagaagcaggacgagagaggcagaagctactacgtggaccacaacagcagaaccaccacctggaccaagcccaccgtgcaggccaccgtggagaccagccagctgaccagcagccagagcagcgccggcccccagagccaggccagcaccagcgacagcggccagcaggtgacccagcccagcgagatcgagcagggcttcctgcccaagggctgggaggtgagacacgcccccaacggcagacccttcttcatcgaccacaacaccaagaccaccacctgggaggaccccagactgaagatccccgcccacctgagaggcaagaccagcctggacaccagcaacgacctgggccccctgccccccggctgggaggagagaacccacaccgacggcagaatcttctacatcaaccacaacatcaagagaacccagtgggaggaccccagactggagaacgtggccatcaccggccccgccgtgccctacagcagagactacaagagaaagtacgagttcttcagaagaaagctgaagaagcagaacgacatccccaacaagttcgagatgaagctgagaagagccaccgtgctggaggacagctacagaagaatcatgggcgtgaagagagccgacttcctgaaggccagactgtggatcgagttcgacggcgagaagggcctggactacggcggcgtggccagagagtggttcttcctgatcagcaaggagatgttcaacccctactacggcctgttcgagtacagcgccaccgacaactacaccctgcagatcaaccccaacagcggcctgtgcaacgaggaccacctgagctacttcaagttcatcggcagagtggccggcatggccgtgtaccacggcaagctgctggacggcttcttcatcagacccttctacaagatgatgctgcacaagcccatcaccctgcacgacatggagagcgtggacagcgagtactacaacagcctgagatggatcctggagaacgaccccaccgagctggacctgagattcatcatcgacgaggagctgttcggccagacccaccagcacgagctgaagaacggcggcagcgagatcgtggtgaccaacaagaacaagaaggagtacatctacctggtgatccagtggagattcgtgaacagaatccagaagcagatggccgccttcaaggagggcttcttcgagctgatcccccaggacctgatcaagatcttcgacgagaacgagctggagctgctgatgtgcggcctgggcgacgtggacgtgaacgactggagagagcacaccaagtacaagaacggctacagcgccaaccaccaggtgatccagtggttctggaaggccgtgctgatgatggacagcgagaagagaatcagactgctgcagttcgtgaccggcaccagcagagtgcccatgaacggcttcgccgagctgtacggcagcaacggcccccagagcttcaccgtggagcagtggggcacccccgagaagctgcccagagcccacacctgcttcaacagactggacctgcccccctacgagagcttcgaggagctgtgggacaagctgcagatggccatcgagaacacccagggcttcgacggcgtggactag

SEQ ID NO: 103792 - protein, 1303 aa, Artificial Sequence
  derived and/or modified sequence
MAQSLRLHFAARRSNTYPLSETSGDDLDSHVHMCFKRPTRISTSNVVQMKLTPRQTALAPLIKENVQSQERSSVPSSENVNKKSSCLQISLQPTRYSGYLQSSNVLADSDDASFTCILKDGIYSSAVVDNELNAVNDGHLVSSPAICSGSLSNFSTSDNGSYSSNGSDFGSCASITSGGSYTNSVISDSSSYTFPPSDDTFLGGNLPSDSTSNRSVPNRNTTPCEIFSRSTSTDPFVQDDLEHGLEIMKLPVSRNTKIPLKRYSSLVIFPRSPSTTRPTSPTSLCTLLSKGSYQTSHQFIISPSEIAHNEDGTSAKGFLSTAVNGLRLSKTICTPGEVRDIRPLHRKGSLQKKIVLSNNTPRQTVCEKSSEGYSCVSVHFTQRKAATLDCETTNGDCKPEMSEIKLNSDSEYIKLMHRTSACLPSSQNVDCQININGELERPHSQMNKNHGILRRSISLGGAYPNISCLSSLKHNCSKGGPSQLLIKFASGNEGKVDNLSRDSNRDCTNELSNSCKTRDDFLGQVDVPLYPLPTENPRLERPYTFKDFVLHPRSHKSRVKGYLRLKMTYLPKTSGSEDDNAEQAEELEQQQEPSPLPPGWEERQDILGRTYYVNHESRRTQWKRPTPQDNLTDAENGNIQLQAQRAFTTRRQISEETESVDNRESSENWEIIREDEATMYSNQAFPSPPPSSNLDVPTHLAEELNARLTIFGNSAVSQPASSSNHSSRRGSLQAYTFEEQPTLPVLLPTSSGLPPGWEEKQDERGRSYYVDHNSRTTTWTKPTVQATVETSQLTSSQSSAGPQSQASTSDSGQQVTQPSEIEQGFLPKGWEVRHAPNGRPFFIDHNTKTTTWEDPRLKIPAHLRGKTSLDTSNDLGPLPPGWEERTHTDGRIFYINHNIKRTQWEDPRLENVAITGPAVPYSRDYKRKYEFFRRKLKKQNDIPNKFEMKLRRATVLEDSYRRIMGVKRADFLKARLWIEFDGEKGLDYGGVAREWFFLISKEMFNPYYGLFEYSATDNYTLQINPNSGLCNEDHLSYFKFIGRVAGMAVYHGKLLDGFFIRPFYKMMLHKPITLHDMESVDSEYYNSLRWILENDPTELDLRFIIDEELFGQTHQHELKNGGSEIVVTNKNKKEYIYLVIQWRFVNRIQKQMAAFKEGFFELIPQDLIKIFDENELELLMCGLGDVDVNDWREHTKYKNGYSANHQVIQWFWKAVLMMDSEKRIRLLQFVTGTSRVPMNGFAELYGSNGPQSFTVEQWGTPEKLPRAHTCFNRLDLPPYESFEELWDKLQMAIENTQGFDGVD

SEQ ID NO: 103793 - DNA, 3912 bp, Artificial Sequence
  derived and/or modified sequence
atggcccaatctctccgactgcatttcgctgcaaggaggtctaatacctatcccctttccgagacatctggtgatgacttggatagtcatgtgcacatgtgcttcaaacggccaacacggatatcgacatcaaatgtggtgcagatgaaactgacgcctagacaaactgccctggctcctctgattaaggagaacgttcaatcacaggaaagatcgtcggtgcctagctccgagaatgtaaataaaaaatcttcgtgtctgcagattagcctccaaccaactcgctacagcgggtacttgcaaagctcaaatgttctcgccgacagcgacgacgcttctttcacctgcatcctgaaggatggcatttacagctctgctgtcgtggacaacgaactcaatgccgtaaacgacgggcacttagtaagctctcccgccatatgcagcggcagcctgtctaactttagcacaagcgataatgggtcctatagcagtaatggaagtgacttcggctcttgtgcctcgatcacatccggtggctcctacacgaacagtgtgatatcggattcctcatcctacacttttccaccttccgatgacacctttttaggggggaatctccccagtgacagcacgtccaatagatcggtgcctaatcgtaatactaccccttgtgagatcttctccaggtccacctcaaccgatccgtttgtccaggatgatttggagcatggcttagagatcatgaagctgccggtgtctaggaacaccaagatcccactgaagcgatacagctcactcgtgatttttccaaggtccccctctaccactaggcccacctctccaactagcttgtgtacactactatctaaggggtcatatcagacaagtcatcaatttataattagtccttctgaaatcgcacacaacgaagatggcactagcgccaaaggttttctatccaccgcagtaaatggtctgcgcctgtcaaaaacaatctgcacgcccggtgaagtgagagacattcgcccgttacaccggaaggggtcactgcagaagaagatcgtgctctccaataatacgccacggcagactgtgtgtgagaaaagctctgagggttactcatgtgttagtgtccattttactcagagaaaggccgcgactctggattgtgaaaccacaaatggggactgtaagcccgaaatgagcgaaattaaactcaattcggattctgagtatatcaagctaatgcaccgcacatccgcatgtctaccatcgtctcagaacgtggattgtcagattaatattaacggcgagttagagcggccacactcgcagatgaataaaaaccatggaatactgagaaggagcatcagtcttggaggggcatatccaaatatctcctgtctctccagtttgaaacacaactgttctaagggcggtcccagccagctgctcataaaatttgccagtggaaacgagggcaaggttgacaaccttagtcgggactctaacagagactgcaccaatgagttgtctaactcatgcaagacacgagatgattttctggggcaagtggacgttcccctgtatcctctccctacagaaaaccctcggttagaacgcccatatacatttaaggactttgtcctccacccacggtcgcataaaagccgcgttaaaggttatcttcgactaaaaatgacttatttgcccaagacctccggttctgaagacgacaatgccgagcaggcagaggagctggaacagcaacaggagccatctccactcccacccgggtgggaagagcgccaggatatcctgggaaggacatactacgtgaatcacgaaagtcgcagaacacagtggaagcgacccacccctcaggacaatctgaccgatgcagaaaacgggaatattcagcttcaggctcagcgtgcctttaccacaagacgacagatctccgaagagactgaatcggtggacaatagagaatcctctgaaaattgggagatcatccgagaggatgaggccaccatgtattcaaatcaagcctttccaagtcctcccccttccagtaatttggacgtgccaacacatctggcagaggagttaaacgctcgacttaccattttcggcaactcagcagtgagtcagccagcatcttcttctaaccactcctctaggcggggcagtctgcaggcgtacacatttgaagagcagccaactctgcccgttctgctcccaaccagtagcggcctccccccaggctgggaggagaagcaggacgagcggggcagatcctactatgtggaccataactcccgcacaaccacttggaccaaaccaaccgtgcaggccactgttgagacctctcaattgaccagctcgcagtcctcggccggccctcagtcccaggcatcgacctctgatagtggccaacaggtgacacaacccagtgagatcgagcaggggttcctaccaaagggctgggaggtaagacatgcacccaacggacggcccttctttatagaccacaacaccaaaacgacaacgtgggaagatccgcgattgaaaatacccgcgcatctgagaggcaaaacctctttagatacttccaacgatctagggccactcccacctgggtgggaggagcgtacacacacagacggacgtattttttacattaatcacaacattaagcgaacccagtgggaggatcccagactcgaaaacgtggctatcaccggccccgcggtaccctacagcagagactacaagagaaagtacgaatttttccgacgcaagctcaaaaagcagaacgatattcccaacaaattcgaaatgaagcttcggcgggcaaccgtcctcgaagacagttacaggcgaatcatgggagttaagcgcgctgatttcttgaaggctaggctgtggatcgaatttgacggcgaaaagggtttggactacgggggagtggctagagagtggtttttcctgatatctaaagagatgttcaatccctattacgggctcttcgaatattcagctacagacaattatactctgcagatcaaccctaactcaggcctgtgcaacgaggaccacttatcttacttcaagtttatcggacgggtcgcagggatggctgtatatcacggtaagttgttagacgggtttttcatcaggccattttataagatgatgctgcacaagcccatcacactgcacgacatggaatctgttgattcagaatactataactcactccgctggatactggagaacgaccctactgaattagacttacggttcatcatcgatgaagaactcttcggccagacccatcagcatgagctgaaaaacgggggctccgagatagtagttactaataagaacaaaaaggagtacatctatttggttattcagtggaggttcgttaacagaatccaaaaacagatggccgctttcaaagagggttttttcgagttaattcctcaggaccttatcaagatcttcgatgagaatgagctggaactgctaatgtgtggcctgggcgacgtggacgtgaacgattggcgggaacacactaaatacaagaacggatacagtgctaatcatcaggtaatccagtggttctggaaggccgtcctgatgatggactctgagaagaggatcagactcttgcagtttgtgactggaacctctcgcgtccctatgaatggatttgctgagctgtatggatccaacggtccacagagcttcactgttgaacaatggggcacacccgaaaaactccctcgggcccatacttgtttcaatagactggatctaccaccttatgagagctttgaagaattgtgggacaaactacagatggcaattgaaaacactcagggtttcgacggggtagattag

SEQ ID NO: 103794 - DNA, 3912 bp, Artificial Sequence
  derived and/or modified sequence
atggcccagagcctgcggctgcactttgctgcccggcgcagcaacacctaccccctgtctgagaccagcggagatgacctggacagccacgtgcacatgtgcttcaagaggcccacccgcatcagcaccagcaatgtggtgcagatgaagctgaccccccggcagacagccctggcccccctcatcaaggaaaatgtgcagagccaggagaggagctctgtgcccagcagtgaaaatgtgaacaagaagagcagctgcctgcagatcagcctgcagcccacccgctacagcggctacctgcagagcagcaatgtgctggccgacagtgatgatgccagcttcacctgcatcctgaaggatggcatctacagcagcgctgtggtggacaatgagctgaatgctgtgaatgatggccacctggtgagcagccctgccatctgcagcggcagcctgagcaacttcagcaccagtgacaatggcagctacagcagcaatggaagtgactttggcagctgtgccagcatcaccagcggcggcagctacaccaacagcgtcatcagtgacagcagcagctacaccttccccccatctgatgacaccttcctgggcggcaacctgcccagcgacagcaccagcaacagatctgtgcccaacagaaacaccaccccctgtgagatcttcagccgcagcaccagcacagacccctttgtgcaggatgacctggagcacggcctggagatcatgaagctgcctgtgtccaggaacaccaagatccccctgaagcgctacagcagcctggtgatcttccccaggagccccagcaccacccggcccaccagccccaccagcctgtgcaccctgctgagcaagggcagctaccagaccagccaccagttcatcatcagccccagcgagatcgcccacaatgaagatggcaccagcgccaagggcttcctgagcacagctgtgaatggcctgcggctgagcaagaccatctgcaccccaggagaggtgcgggacatccggcccctgcacaggaagggcagcctgcagaagaagatcgtgctgagcaacaacaccccccggcagacagtgtgtgagaagagcagcgagggctacagctgtgtgtctgtgcacttcacccagaggaaggccgccaccctggactgtgagaccaccaacggggactgcaagccagagatgtctgagatcaagctgaacagcgacagcgagtacatcaagctgatgcacaggaccagcgcctgcctgcccagcagccagaatgtggactgccagatcaacatcaacggggagctggagcggccccacagccagatgaacaagaaccacggcatcctgcggcgcagcatcagcctgggcggggcctaccccaacatcagctgcctgagcagcctgaagcacaactgcagcaagggcggccccagccagctgctgatcaagtttgccagcggaaatgaaggcaaggtggacaacctgagccgggacagcaacagagactgcaccaatgagctgagcaacagctgcaagaccagagatgacttcctgggccaggtggatgtgcccctgtaccccctgcccacagagaacccccggctggagcggccctacaccttcaaggactttgtgctgcaccccaggagccacaagagccgggtgaagggctacctgcggctgaagatgacctacctgcccaagaccagcggctctgaagatgacaatgctgagcaggccgaggagctggagcagcagcaggagcccagccccctgcccccaggctgggaggagcggcaggacatcctgggccgcacctactacgtgaaccacgagagcaggaggacccagtggaagaggcccaccccccaggacaacctgacagatgctgaaaatggaaacatccagctgcaggcccagagggccttcaccacccggcggcagatcagcgaggagacagaatctgtggacaaccgggagagcagcgagaactgggagatcatccgggaggatgaggccaccatgtacagcaaccaggccttccccagccccccacccagcagcaacctggatgtgcccacccacctggccgaggagctgaatgcccggctgaccatctttggaaacagcgctgtgtcccagcctgccagcagcagcaaccacagcagccggcggggcagcctgcaggcctacacctttgaggagcagcccaccctgcctgtgctgctgcccaccagcagcggcctgcccccaggctgggaggagaagcaggatgagcggggccgcagctactacgtggaccacaacagcaggaccaccacctggaccaagcccaccgtgcaggccaccgtggagaccagccagctgaccagcagccagagcagcgctggcccccagagccaggccagcaccagtgacagcggccagcaggtgacccagcccagcgagattgagcagggcttcctgcccaagggctgggaggtgagacatgccccaaatggccggcccttcttcatcgaccacaacaccaagaccaccacctgggaggacccccggctgaagatcccagcccacctgcggggcaagaccagcctggacaccagcaatgacctgggccccctgcccccaggctgggaggagaggacccacacagatggccgcatcttctacatcaaccacaacatcaagaggacccagtgggaggacccccggctggagaatgtggccatcactggacctgctgtgccctacagccgggactacaagaggaaatatgagttcttccggaggaagctgaagaagcagaatgacatccccaacaagtttgagatgaagctgcggcgggccaccgtgctggaggacagctaccgccgcatcatgggcgtgaagagagctgacttcctgaaggcccggctgtggattgaatttgatggagagaagggcctggactatggaggagtggcccgggagtggttcttcctgatcagcaaggagatgttcaacccctactacggcctgtttgagtacagcgccacagacaactacaccctgcagatcaaccccaacagcggcctgtgcaatgaagaccacctgagctacttcaagttcatcggccgggtggccggcatggctgtgtaccacggcaagctgctggatggcttcttcatccggcccttctacaagatgatgctgcacaagcccatcaccctgcatgacatggagagcgtggacagcgagtactacaacagcctgcgctggatcctggagaatgaccccacagagctggacctgcgcttcatcattgatgaggagctgtttggccagacccaccagcacgagctgaagaatggaggcagcgagatcgtggtgaccaacaagaacaagaaggagtacatctacctggtgatccagtggaggtttgtgaaccgcatccagaagcagatggccgccttcaaggagggcttctttgagctgatcccccaggacctgatcaagatctttgatgaaaatgagctggagctgctgatgtgtggcctgggagatgtggatgtgaatgactggagggagcacaccaagtacaagaatggctacagcgccaaccaccaggtgatccagtggttctggaaggctgtgctgatgatggacagcgagaagaggatccggctgctgcagtttgtgacaggcaccagccgggtgcccatgaatggatttgctgagctgtatggcagcaatggcccccagagcttcaccgtggagcagtggggcaccccagagaagctgccccgggcccacacctgcttcaaccggctggacctgcccccctatgagagctttgaggagctgtgggacaagctgcagatggccatcgagaacacccagggctttgatggagtggactag

SEQ ID NO: 103795 - DNA, 3912 bp, Artificial Sequence
  derived and/or modified sequence
atggcccagagcctgcggctgcacttcgccgcccggcggagcaacacctaccccctgtccgaaacgtcgggggatgatctggacagtcatgtgcacatgtgtttcaaacggcctacgcggatctctaccagcaatgtcgtccaaatgaaactgacaccaaggcaaactgctcttgccccccttataaaggagaacgtccaatcacaggaacggtcatctgttccaagctctgagaacgtcaacaaaaagtcttcttgcctgcaaatcagcctgcagcccacccgatatagtggttaccttcagtccagcaatgtcctggctgattccgacgatgctagcttcacctgtatcttgaaggacggaatttatagcagtgccgtggtcgataatgagcttaacgctgtgaacgatggccatctggtgtcttccccggccatctgttctggatccttatccaatttcagtacttctgataatggctcatattcaagcaatggatctgacttcggctcttgtgctagcattacatccggaggcagctatacaaattctgtaatttcagacagctcatcatacacctttcctccctcagacgatacatttctcggcggaaacctgccctcagacagcacttccaacagaagcgttcctaataggaataccaccccttgcgagatcttttcccgttccacaagtacagacccgttcgtccaggacgatctagagcatggcctggaaataatgaagctgcccgtgtctcgcaataccaagatccccctcaaacggtattcttccctcgtaattttcccgcgaagcccctctacaactcgacctacctcgcctacctcactgtgtacgttactgtccaagggctcttatcagacatctcaccagttcatcatcagcccttccgaaattgcgcacaacgaggatggaacttctgcaaaaggatttctctccacagccgtgaacggcttacgcctctctaagactatctgcacccccggggaggtacgggacatcagacccctccaccgtaagggctccctccagaagaagatagtgcttagcaataatacccctagacagacagtctgcgaaaaaagtagtgaggggtacagttgcgtatcagtgcacttcacccagagaaaggcagctaccctggactgtgagacaacaaatggtgactgcaaaccggaaatgtccgaaatcaaactgaattcggatagcgaatacataaaacttatgcacagaaccagtgcctgcctcccttcgagccagaatgtggactgtcagatcaacatcaacggtgagttagaacgcccccactctcaaatgaataagaaccacggcattttgagacgaagcatttccctggggggagcataccccaatatatcctgcctgtcctctctcaaacacaattgctctaagggagggccatcacagctgctgattaagttcgcctcagggaatgaaggtaaggtggacaacctgtcacgggacagcaacagggactgtacgaacgagctctctaacagttgcaagacccgggatgacttcctgggacaggttgacgtgccattgtacccactgcctaccgaaaatcctaggttagagcgaccatacacttttaaggacttcgtactccatccccgatcccacaagtcaagggtcaagggatacctgcgtctcaagatgacttaccttcctaagacgagcgggagcgaagatgacaacgctgaacaggccgaggaactggaacagcagcaggaaccttcccccctgcctcctggatgggaggagcgtcaggacatcttagggagaacctactatgtaaaccacgagtctcgtcggacacagtggaaaaggccgaccccccaagataacctcactgacgccgaaaatggtaatatacagctgcaggctcaaagggcattcacaaccagaagacagatctcagaagagactgagtccgtggacaaccgcgagtcaagcgagaactgggaaattatccgcgaggatgaggccacgatgtatagcaaccaagcattcccctccccaccaccttcctccaacttggatgtccccacacacctggcagaagagttaaatgcaagacttactatttttggaaactcagctgtctcccagcccgcctcaagttccaaccactcctcccgccgtgggagcctgcaggcgtacacctttgaggagcagcccaccttgcccgtgctcttaccgactagctccggcctccctccagggtgggaagagaagcaagatgaacgaggaaggtcttattacgtcgaccataactcccgcaccacaacctggacaaagcctacagtgcaggccacagtggaaaccagccaactgacgagttcccagtcttcagccggaccacagtctcaggcctctacttctgattccggtcagcaagttacacaacccagtgagatcgagcaggggtttttgccgaaaggttgggaagtccggcacgcccccaatgggaggcctttttttattgaccataatacaaagacaactacctgggaggatccccggctcaagatcccggctcacctacgggggaaaactagcctggatacatctaacgatctcgggccgctaccacctgggtgggaagaaaggactcacactgacggtcggatattttacatcaaccataacattaagaggacccagtgggaggatccaaggcttgagaatgtggctataactggccctgctgtgccgtactccagggactacaaacgcaagtacgaatttttcaggaggaagcttaaaaaacagaatgacatcccaaataagtttgaaatgaaactgcgccgagccactgtacttgaggatagctatcgccgcataatgggagtgaaaagggccgacttcctgaaagcccgcttgtggattgagttcgatggggagaaagggttggactatggaggcgttgccagggaatggttcttccttatttcgaaggaaatgtttaacccctactatggcctgtttgagtattcagcgactgacaattacacactccaaatcaatccaaatagcggtctgtgcaacgaagaccatctgagctatttcaagtttattggcagggtagccgggatggcagtttatcacggcaaactcttagatggtttctttatcagacccttctacaaaatgatgcttcacaaacccattaccctgcacgatatggaatctgtcgactcagagtactataacagtctgcgctggatcctggaaaacgatcccaccgagctcgatctgagatttatcatcgacgaggagctctttggtcagacacaccagcatgagttgaagaatgggggctcagaaatcgtggtcacaaacaagaacaaaaaagaatatatctacctagtcatacagtggcggtttgtgaaccgtattcagaagcaaatggctgcttttaaggagggattctttgagctgatcccccaggaccttatcaagattttcgatgaaaacgagctggagcttctgatgtgtggcctgggtgacgtagacgttaatgactggagggaacatacaaagtataagaatgggtacagtgcaaaccatcaggtgatccagtggttctggaaggctgtcctcatgatggactcagaaaaaaggatacggctgttacaatttgtgaccggaacctcaagagttccaatgaacgggttcgccgagctctacggatcaaacgggccccagtcattcacggtggaacaatggggtacacctgagaaactacccagagcccacacttgttttaacaggctggatctgcctccctacgagtctttcgaggaactgtgggataagctccagatggctatagagaatacccaggggtttgatggggtggactag

SEQ ID NO: 103796 - DNA, 6751 bp, Artificial Sequence
  derived and/or modified sequence
ggtcgctggaaatcaagtgctttgtaagtgaaggcattttgactacaagcgattcaagacattttggaaacgtcagtctctggaatgggtcgtctttttctttctatgatatctggtatctaatgttttacttaggataaagactactacttaatagctcttttaggcaccacaaatgattttttcttttgatgcagtgcagctgcttctagcctgtctacggacagagatctttgttatgactttcagcccttaacatgtttggaaatgagaacaaatggcacaaagcttacgattgcactttgcagccagaagaagcaatacttaccctttgtcagaaacctccggagatgacttggatagccatgttcacatgtgcttcaaaagaccaacacggatttcaacgtctaacgttgttcaaatgaagctgactcccagacagactgcactagctccgttaataaaggaaaacgttcagtctcaagaaagatcatctgttccctcatctgaaaatgttaataaaaagagcagctgtctacagatttcactacagccaacaaggtacagtggatatcttcagtctagcaatgtcttagctgatagtgatgatgcttcgtttacttgtatcttgaaggatggtatttacagtagtgctgtggtcgataatgaattgaatgctgtgaatgatggtcaccttgtaagcagtccagccatttgtagtggtagccttagtaacttttcaaccagtgataatgggtcttacagcagcaacggtagtgattttgggtcatgtgcaagtatcacaagtggaggttcatatactaacagtgtcatcagtgacagtagtagttatacttttccaccaagtgatgatacttttttgggtggaaacttaccttctgacagcacctccaatagaagtgtgccaaacaggaatactactccttgtgaaattttttcaagaagtacaagtacagatccttttgtccaggatgacttggaacatggattagagattatgaaattgccagtgagcaggaacacaaaaattccactaaaacgttactcctccttagtcatttttcctaggagtccttcaactacccgaccgacttctccaacaagtctgtgtactcttctgagcaaaggatcctatcaaacttcacaccagtttattatttctcctagtgaaattgcacataatgaggatggcactagtgctaaaggatttctttcaacagctgtcaatggacttcggttatctaaaacaatttgtacccccggagaagtaagagacatacggccgcttcacaggaagggctcgttacagaagaaaattgttctttcgaataatactcccagacagactgtctgtgaaaagtcatctgaaggatattcttgtgtttcagtgcatttcacccaacgaaaagcagctacattagactgtgaaacaacaaatggtgattgtaaaccagaaatgtcagaaattaagcttaattctgattcagagtatattaagctcatgcataggacatctgcatgtttgccatcctcccaaaatgtagattgtcaaataaatatcaatggagaattggaaagaccacattcacagatgaacaaaaaccatggtattttacgaagaagtatttcattgggaggagcttatccaaatatttcctgtctatccagccttaagcacaattgttctaaagggggaccatctcagttactcataaagtttgcatctggaaatgaaggtaaagtggataatttatcaagagacagcaacagagattgcacaaatgaactgtctaattcttgcaagacaagagatgatttcctaggtcaagtggatgttccactttatccattaccgacagaaaatccaagattggagagaccatatacatttaaggattttgttcttcatccaagaagtcacaaatcaagagttaaaggttatctgagactaaaaatgacttatttacctaaaaccagtggctcagaagatgataatgcagaacaggctgaggaattagagcaacaacaagaaccttctcctctacctccagggtgggaagagaggcaggatatccttggaaggacctattatgtaaaccatgaatctagaagaacacagtggaaaagaccaacccctcaggacaacctaacagatgctgagaatggcaacattcaactgcaagcacaacgtgcatttaccaccaggcggcagatatccgaggaaacagaaagtgttgacaaccgagagtcttccgagaactgggaaattataagagaagatgaagccaccatgtatagcaaccaggccttcccatcacctccaccgtcaagtaacttggatgttccaactcatcttgcagaagaattgaatgccagactcaccatttttggaaattcagccgtgagccagccagcatcgagctcaaatcattccagcagaagaggcagcttacaagcctatacttttgaggaacaacctacacttcctgtgcttttgcctacttcatctggattaccaccaggttgggaagaaaaacaagatgaaagaggaagatcatattatgtagatcacaattccagaacgactacttggacaaagcccactgtacaggccacagtggagaccagtcagctgacctcaagccagagttctgcaggccctcaatcacaagcctccaccagtgattcaggccagcaggtgacccagccatctgaaattgagcaaggattccttcctaaaggctgggaagtccggcatgcaccaaatgggaggcctttctttattgaccacaacactaaaaccaccacctgggaagatccaagattgaaaattccagcccatctgagaggaaagacatcacttgatacttccaatgatctagggcctttacctccaggatgggaagagagaactcacacagatggaagaatcttctacataaatcacaatataaaaagaacacaatgggaagatcctcggttggagaatgtagcaataactggaccagcagtgccctactccagggattacaaaagaaagtatgagttcttccgaagaaagttgaagaagcagaatgacattccaaacaaatttgaaatgaaacttcgccgagcaactgttcttgaagactcttaccggagaattatgggtgtcaagagagcagacttcctgaaggctcgactgtggattgagtttgatggtgaaaagggattggattatggaggagttgccagagaatggttcttcctgatctcaaaggaaatgtttaacccttattatgggttgtttgaatattctgctacggacaattataccctacagataaatccaaactctggattgtgtaacgaagatcacctctcttacttcaagtttattggtcgggtagctggaatggcagtttatcatggcaaactgttggatggttttttcatccgcccattttacaagatgatgcttcacaaaccaataacccttcatgatatggaatctgtggatagtgaatattacaattccctaagatggattcttgaaaatgacccaacagaattggacctcaggtttatcatagatgaagaactttttggacagacacatcaacatgagctgaaaaatggtggatcagaaatagttgtcaccaataagaacaaaaaggaatatatttatcttgtaatacaatggcgatttgtaaaccgaatccagaagcaaatggctgcttttaaagagggattctttgaactaataccacaggatctcatcaaaatttttgatgaaaatgaactagagcttcttatgtgtggactgggagatgttgatgtgaatgactggagggaacatacaaagtataaaaatggctacagtgcaaatcatcaggttatacagtggttttggaaggctgttttaatgatggattcagaaaaaagaataagattacttcagtttgtcactggcacatctcgggtgcctatgaatggatttgctgaactatacggttcaaatggaccacagtcatttacagttgaacagtggggtactcctgaaaagctgccaagagctcatacctgttttaatcgcctggacttgccaccttatgaatcatttgaagaattatgggataaacttcagatggcaattgaaaacacccagggctttgatggagttgattagattacaaataacaatctgtagtgtttttactgccatagttttataaccaaaatcttgacttaaaattttccggggaactactaaaatgtggccactgagtcttcccagatcttgaagaaaatcatataaaaagcatttgaagaaatagtacgacaacttatttttaatcacttttaaataatgtgttgcatttacacagttgtttcatgctgtctttagagttaggtgcctgcctaaagccaggcaccaccacacctggctttagagttcacacaataggatataagtcctgtatgacttaaatagtgaattttgtccttaacatttacctcttgtatagtatctgccaggcagttttttcttaaactactgagatgataactgtgaaatatttgtgatacgtgtcatgtgtgaaaagtttgatgcattttgagatggaaaactgaaatttggaaaaagaaatactttactattgagtaaactacaatatatttagtgctactcgcagctatttattattttgtagacctgccttatgcaccttactgcctagatttttgggaaaaaactttggaaagtgtgttacctatatttctagccaactaactcacagaaaaactgtttacttcttcactttcgaagtatttggcttttgttaatatgcagttttactaaacagatggttcataagacatgtgaagcaaattcatatttgcaatgggtaaaaagtattaaagcctttctcttgcctgcatatcctattgaccattggtatagtcatcactttttcatattttagtgtagttagaagaattccttcttcaaacattaaagatccacaaagcagtatttctaaatatgccttgaagaactaaatgaagtgtatagcacttgcctttactagatattctttacacttgtacaattatgtagtaaatgtatgtttacagggtttatcatgtttacagattaagctaatttctgtagtcgcatttttatatttttagtatcactctagtaaaaaaaccaaataatttgtttaaaataaccaaagagttgttataatgcataatttgtattaaatttattactatttcttatgccttttaaaatactgtttactatgaagacaatgtttttaattacaaatccagaattctgtaggcaaaatgctacagttcatatcttcctttaaccaaactgaagtacataaagaccatgtacatgtattcatcaaacgtttattgaatgctgcgtgcctagcgctgtgctatgctctggggtaagagttgtcagcttcagagaagctgagtcctgatcctcaaggaacttgcaaatgtgtctatgaatttgtaaaacaatcaaaagtaggcgtaagcagaataaggcaaaagggaaagtgttctaggttccagcacacctgcaaagataaagtgtgccaagactgtatttatatttcatacttatattgtttcatccttatattggaatgattatatagaaaatgctcttaaaaagattaaacctatttctcagtatggtatcttggtgatttaggaataattgtaaatatatgttacgaatcttcttaaatatatatatatacacaccctgtgagaactgtaaaaagtacctctggttcttggtttaagtttgttggggtataacatgatgagtactcattagcacctgatagaaatctgaaatgtgacagtagcaaaaccactttctactttccaaacaccacagcatcagcatggtttaggggaagcaattcacagattaatgtaccctgcgttttgtcttcaccattgtcaaccagcagtcaaggatgagcaccaggtatagtcctggtttgatatctcaccagccatgtgaactgaagcagcttacttaacctctctggattcatatttcttcatctgtcaaatgagagtaatcatgcccaccctcattgtcatgccagattgtcagaagttccagacagatgagaaagcaaaaagtactttgtaaagtgttatacaatcagaaggtgctttgtgctgaccgtcagattgtgtcaagtcaggtgtgcaaattgaccacactcccaaagaatcatttaaaagtaaagtgacttctaagagacaaggaagtaggaacatttctgatattaaatatataaataatatggatacacatgtgtatatctgtatatggatcttaccatcataattcattttcttcatatcagcaaagtaatagtaatgtgggccaatgcattttggaaatgtcctcattatgtagaatggaatgtgaaaattatttttgttaaaacaggattttgccacaattatttaaatattatgtttgtgaactatctaagcatgagaaaatacaaagctttctttgtatctggctgatactcatttggatgattctgtgactcatagaacatgatgttaaatgagaccagactcaactgccaccagtccccagctgcagaccttcatccccttcatctcccactaggggctcgtggtctggaagaaacatctatcaagcaacacagccccttatccc

SEQ ID NO: 103797 - DNA, 3912 bp, Artificial Sequence
  derived and/or modified sequence
atggcccaaagcctccgcctgcacttcgcggctcgtcgtagcaacacataccccctgagcgaaacaagcggtgatgatcttgactcacatgtgcacatgtgtttcaagcgtcctacaagaatctcaaccagtaacgtggtgcaaatgaaactgacccctcgccagacagccctcgcccctctcatcaaggagaatgtccaatcccaggagcgaagctcagtgccttcttccgaaaacgtgaataaaaagtcctcatgcctacagatctctctgcaaccaacccgctacagtgggtatcttcagtcgagtaatgtgctcgctgattccgacgatgcgtctttcacttgcattctaaaggatgggatatactcctcggccgtggtcgataatgagttgaacgcagtgaacgacggacacctagtctcatcccctgccatttgcagcggcagcctgagtaacttctcgacctccgacaatgggagctattcaagtaatgggtccgacttcgggagttgtgccagtatcacttcgggtgggtcatatacaaattccgtgatcagcgacagttcatcttatacttttcccccttccgatgatacgtttctagggggaaatctgccttccgactctacatcgaaccgcagcgtacccaatcgtaatacaactccatgcgaaattttttcacgtagcaccagcacagatccatttgtccaagatgatctggaacacggcctcgagattatgaagctccccgtcagtcggaacaccaaaatccctctcaaacggtactcatccctggtgatctttcccagaagtccctccacgacacgcccaacatctcccacaagcctgtgtaccctgctctccaaaggttcttatcaaacatcacatcaattcatcatttcgccctctgaaatcgcccataatgaagacggcacctctgccaaggggttcctgagtaccgcagtgaacggccttagactgtctaagactatttgcacaccgggtgaagtgcgagatattcggccattgcatcggaagggctcactccagaaaaagattgtgctatcaaacaacacaccacgccagacagtgtgcgagaaatcctccgagggttattcttgcgtatccgtccacttcacccagaggaaagccgcaacactcgattgtgagactacaaatggcgactgtaagcccgaaatgtcggaaatcaagttgaatagcgactcggagtatattaaactgatgcaccggacttccgcttgcctgccttcaagccagaacgtcgactgccaaatcaacatcaatggggaacttgagagaccccattcccagatgaataaaaatcacggcatactccgcaggtctatatctctgggcggtgcgtaccccaacatctcttgccttagctccttgaaacacaattgtagcaaggggggtccttctcaactcctgattaagtttgctagcgggaacgaggggaaggttgataacctcagtagggactccaatcgcgattgtaccaacgagctaagtaactcctgcaaaactcgcgatgattttcttggccaggtggacgttccactctaccccctgccaacagaaaatcccagactcgagcgcccatacacttttaaagacttcgtgttacaccccagaagccataaaagcagggttaaaggatacctgcgcctgaagatgacatacctccctaagacgtctgggtcggaggatgacaatgctgagcaggccgaggagctcgagcagcaacaggagccttcacccctgcctcccggttgggaggagcgccaggacattttaggcaggacatattatgtgaatcatgaatcccggaggacgcagtggaaacgcccaactccacaggacaacctaactgacgcagagaacgggaatatacagttgcaggcgcagcgtgccttcaccactcgccgtcagatctcagaggaaactgagtccgttgacaaccgcgagagctcagagaattgggagatcatccgagaggatgaggcaactatgtactctaatcaggcattcccttcccccccaccatcctctaatctggacgtccctacgcacctggccgaggagctgaacgcacgccttacaatcttcggcaacagtgccgtctcccaacccgcttcatcatcgaatcacagtagtagaagaggctcactacaggcatatacattcgaggagcagccgacgctgccagtgctgcttcccacaagctctggcttgccaccaggatgggaggagaagcaggacgaacggggaagatcatattacgtggatcataactcccgtacaaccacttggacgaagcccacggtgcaggctactgtggagacaagccagttgacctcctctcagtcctcagcagggccacagagtcaggcaagcacctctgactctggacagcaggtgacgcaaccgtccgaaattgagcaggggttcttgcctaaaggttgggaggtaagacacgcaccgaacggccgtcctttctttattgatcacaacacgaaaaccactacctgggaggaccccaggcttaaaattccagctcaccttcgtgggaagacttccttggacacttcaaacgacctcggcccacttcctcctggctgggaggaaaggacacacaccgacggccgtattttttatataaaccataatatcaaaaggacacaatgggaggacccaagactggagaacgtcgccattacagggcctgcagtcccatactccagggattacaagagaaaatacgaatttttccggagaaagctgaaaaagcagaatgatatccctaataagtttgagatgaagctccggagggctactgtgttagaagattcatacaggcgtataatgggggtgaagcgcgcagacttcctgaaagccaggctgtggatagagtttgacggagaaaagggactggactatggcggagtcgctcgcgagtggttcttcctgatctccaaagaaatgttcaatccatactacggactgttcgagtactcagctactgataactacacattacaaattaaccccaattccggcctttgtaatgaagaccatctttcgtactttaagtttatcggccgtgttgcaggcatggccgtctaccacgggaagctactggacggattctttattcgcccattctataaaatgatgctccacaaacccatcactctacacgacatggaaagtgtggacagcgaatactataattcacttaggtggatattagagaatgacccaacggagctggatctcaggttcatcatcgatgaggaactttttggacagacgcatcagcacgagttaaagaatggagggtcagaaatagtggtgactaacaagaacaagaaggaatatatttatcttgtgatccagtggcgattcgtcaaccgtatccagaagcagatggccgcttttaaagagggcttctttgagctgatccctcaggacctgatcaagatttttgacgagaacgaactcgagttgctcatgtgcggattgggagatgtagatgtgaacgattggagggaacatacaaagtacaaaaacggctactctgccaaccaccaggtcatccagtggttttggaaggctgtgctcatgatggatagcgaaaagaggatcagactacttcaattcgttacaggtacttcacgcgttcccatgaacggatttgcagaactctacggctccaacggacctcagtcatttaccgtggagcagtggggtaccccagaaaagctcccgagagctcatacttgctttaacaggctagacttgccaccctacgaatcctttgaggagctatgggacaagctgcagatggccatagaaaatactcagggcttcgacggagtggattag

SEQ ID NO: 103798 - DNA, 3912 bp, Artificial Sequence
  derived and/or modified sequence
atggcccagagcctgagactgcacttcgccgccagaagaagcaacacctaccccctgagcgagaccagcggcgacgacctggacagccacgtgcacatgtgcttcaagagacccaccagaatcagcaccagcaacgtggtgcagatgaagctgacccccagacagaccgccctggcccccctgatcaaggagaacgtgcagagccaggagagaagcagcgtgcccagcagcgagaacgtgaacaagaagagcagctgcctgcagatcagcctgcagcccaccagatacagcggctacctgcagagcagcaacgtgctggccgacagcgacgacgccagcttcacctgcatcctgaaggacggcatctacagcagcgccgtggtggacaacgagctgaacgccgtgaacgacggccacctggtgagcagccccgccatctgcagcggcagcctgagcaacttcagcaccagcgacaacggcagctacagcagcaacggcagcgacttcggcagctgcgccagcatcaccagcggcggcagctacaccaacagcgtgatcagcgacagcagcagctacaccttcccccccagcgacgacaccttcctgggcggcaacctgcccagcgacagcaccagcaacagaagcgtgcccaacagaaacaccaccccctgcgagatcttcagcagaagcaccagcaccgaccccttcgtgcaggacgacctggagcacggcctggagatcatgaagctgcccgtgagcagaaacaccaagatccccctgaagagatacagcagcctggtgatcttccccagaagccccagcaccaccagacccaccagccccaccagcctgtgcaccctgctgagcaagggcagctaccagaccagccaccagttcatcatcagccccagcgagatcgcccacaacgaggacggcaccagcgccaagggcttcctgagcaccgccgtgaacggcctgagactgagcaagaccatctgcacccccggcgaggtgagagacatcagacccctgcacagaaagggcagcctgcagaagaagatcgtgctgagcaacaacacccccagacagaccgtgtgcgagaagagcagcgagggctacagctgcgtgagcgtgcacttcacccagagaaaggccgccaccctggactgcgagaccaccaacggcgactgcaagcccgagatgagcgagatcaagctgaacagcgacagcgagtacatcaagctgatgcacagaaccagcgcctgcctgcccagcagccagaacgtggactgccagatcaacatcaacggcgagctggagagaccccacagccagatgaacaagaaccacggcatcctgagaagaagcatcagcctgggcggcgcctaccccaacatcagctgcctgagcagcctgaagcacaactgcagcaagggcggccccagccagctgctgatcaagttcgccagcggcaacgagggcaaggtggacaacctgagcagagacagcaacagagactgcaccaacgagctgagcaacagctgcaagaccagagacgacttcctgggccaggtggacgtgcccctgtaccccctgcccaccgagaaccccagactggagagaccctacaccttcaaggacttcgtgctgcaccccagaagccacaagagcagagtgaagggctacctgagactgaagatgacctacctgcccaagaccagcggcagcgaggacgacaacgccgagcaggccgaggagctggagcagcagcaggagcccagccccctgccccccggctgggaggagagacaggacatcctgggcagaacctactacgtgaaccacgagagcagaagaacccagtggaagagacccaccccccaggacaacctgaccgacgccgagaacggcaacatccagctgcaggcccagagagccttcaccaccagaagacagatcagcgaggagaccgagagcgtggacaacagagagagcagcgagaactgggagatcatcagagaggacgaggccaccatgtacagcaaccaggccttccccagccccccccccagcagcaacctggacgtgcccacccacctggccgaggagctgaacgccagactgaccatcttcggcaacagcgccgtgagccagcccgccagcagcagcaaccacagcagcagaagaggcagcctgcaggcctacaccttcgaggagcagcccaccctgcccgtgctgctgcccaccagcagcggcctgccccccggctgggaggagaagcaggacgagagaggcagaagctactacgtggaccacaacagcagaaccaccacctggaccaagcccaccgtgcaggccaccgtggagaccagccagctgaccagcagccagagcagcgccggcccccagagccaggccagcaccagcgacagcggccagcaggtgacccagcccagcgagatcgagcagggcttcctgcccaagggctgggaggtgagacacgcccccaacggcagacccttcttcatcgaccacaacaccaagaccaccacctgggaggaccccagactgaagatccccgcccacctgagaggcaagaccagcctggacaccagcaacgacctgggccccctgccccccggctgggaggagagaacccacaccgacggcagaatcttctacatcaaccacaacatcaagagaacccagtgggaggaccccagactggagaacgtggccatcaccggccccgccgtgccctacagcagagactacaagagaaagtacgagttcttcagaagaaagctgaagaagcagaacgacatccccaacaagttcgagatgaagctgagaagagccaccgtgctggaggacagctacagaagaatcatgggcgtgaagagagccgacttcctgaaggccagactgtggatcgagttcgacggcgagaagggcctggactacggcggcgtggccagagagtggttcttcctgatcagcaaggagatgttcaacccctactacggcctgttcgagtacagcgccaccgacaactacaccctgcagatcaaccccaacagcggcctgtgcaacgaggaccacctgagctacttcaagttcatcggcagagtggccggcatggccgtgtaccacggcaagctgctggacggcttcttcatcagacccttctacaagatgatgctgcacaagcccatcaccctgcacgacatggagagcgtggacagcgagtactacaacagcctgagatggatcctggagaacgaccccaccgagctggacctgagattcatcatcgacgaggagctgttcggccagacccaccagcacgagctgaagaacggcggcagcgagatcgtggtgaccaacaagaacaagaaggagtacatctacctggtgatccagtggagattcgtgaacagaatccagaagcagatggccgccttcaaggagggcttcttcgagctgatcccccaggacctgatcaagatcttcgacgagaacgagctggagctgctgatgtgcggcctgggcgacgtggacgtgaacgactggagagagcacaccaagtacaagaacggctacagcgccaaccaccaggtgatccagtggttctggaaggccgtgctgatgatggacagcgagaagagaatcagactgctgcagttcgtgaccggcaccagcagagtgcccatgaacggcttcgccgagctgtacggcagcaacggcccccagagcttcaccgtggagcagtggggcacccccgagaagctgcccagagcccacacctgcttcaacagactggacctgcccccctacgagagcttcgaggagctgtgggacaagctgcagatggccatcgagaacacccagggcttcgacggcgtggactag

SEQ ID NO: 103799 - protein, 623 aa, Artificial Sequence
  derived and/or modified sequence
MAFRGWRPPPPPLLLLLLWVTGQAAPVAGLGSDAELQIERRFVPDECPRTVRSGDFVRYHYVGTFPDGQKFDSRYWDTAEDKADKSPCPQVRVGVNTSPSCRLKQKGVGIYWKDLQFLVRVQNHGLSYDRDSTFNVFVGKGQLITGMDQALVGMCVNERRFVKIPPKLAYGNEGVSGVIPPNSVLHFDVLLMDIWNSEDQVQIHTYFKPPSCPRTIQVSDFVRYHYNGTFLDGTLFDSSHNRMKTYDTYVGIGWLIPGMDKGLLGMCVGEKRIITIPPFLAYGEDGDGKDIPGQASLVFDVALLDLHNPKDSISIENKVVPENCERISQSGDFLRYHYNGTLLDGTLFDSSYSRNRTFDTYIGQGYVIPGMDEGLLGVCIGEKRRIVVPPHLGYGEEGRGNIPGSAVLVFDIHVIDFHNPSDSISITSHYKPPDCSVLSKKGDYLKYHYNASLLDGTLLDSTWNLGKTYNIVLGSGQVVLGMDMGLREMCVGEKRTVIIPPHLGYGEAGVDGEVPGSAVLVFDIELLELVAGLPEGYMFIWNGEVSPNLFEEIDKDGNGEVLLEEFSEYIHAQVASGKGKLAPGFDAELIVKNMFTNQDRNGDGKVTAEEFKLKDQEAKHDEL

SEQ ID NO: 103800 - DNA, 1872 bp, Artificial Sequence
  derived and/or modified sequence
atggccttcagaggctggagacccccccccccccccctgctgctgctgctgctgtgggtgaccggccaggccgcccccgtggccggcctgggcagcgacgccgagctgcagatcgagagaagattcgtgcccgacgagtgccccagaaccgtgagaagcggcgacttcgtgagataccactacgtgggcaccttccccgacggccagaagttcgacagcagatactgggacaccgccgaggacaaggccgacaagagcccctgcccccaggtgagagtgggcgtgaacaccagccccagctgcagactgaagcagaagggcgtgggcatctactggaaggacctgcagttcctggtgagagtgcagaaccacggcctgagctacgacagagacagcaccttcaacgtgttcgtgggcaagggccagctgatcaccggcatggaccaggccctggtgggcatgtgcgtgaacgagagaagattcgtgaagatcccccccaagctggcctacggcaacgagggcgtgagcggcgtgatcccccccaacagcgtgctgcacttcgacgtgctgctgatggacatctggaacagcgaggaccaggtgcagatccacacctacttcaagccccccagctgccccagaaccatccaggtgagcgacttcgtgagataccactacaacggcaccttcctggacggcaccctgttcgacagcagccacaacagaatgaagacctacgacacctacgtgggcatcggctggctgatccccggcatggacaagggcctgctgggcatgtgcgtgggcgagaagagaatcatcaccatcccccccttcctggcctacggcgaggacggcgacggcaaggacatccccggccaggccagcctggtgttcgacgtggccctgctggacctgcacaaccccaaggacagcatcagcatcgagaacaaggtggtgcccgagaactgcgagagaatcagccagagcggcgacttcctgagataccactacaacggcaccctgctggacggcaccctgttcgacagcagctacagcagaaacagaaccttcgacacctacatcggccagggctacgtgatccccggcatggacgagggcctgctgggcgtgtgcatcggcgagaagagaagaatcgtggtgcccccccacctgggctacggcgaggagggcagaggcaacatccccggcagcgccgtgctggtgttcgacatccacgtgatcgacttccacaaccccagcgacagcatcagcatcaccagccactacaagccccccgactgcagcgtgctgagcaagaagggcgactacctgaagtaccactacaacgccagcctgctggacggcaccctgctggacagcacctggaacctgggcaagacctacaacatcgtgctgggcagcggccaggtggtgctgggcatggacatgggcctgagagagatgtgcgtgggcgagaagagaaccgtgatcatccccccccacctgggctacggcgaggccggcgtggacggcgaggtgcccggcagcgccgtgctggtgttcgacatcgagctgctggagctggtggccggcctgcccgagggctacatgttcatctggaacggcgaggtgagccccaacctgttcgaggagatcgacaaggacggcaacggcgaggtgctgctggaggagttcagcgagtacatccacgcccaggtggccagcggcaagggcaagctggcccccggcttcgacgccgagctgatcgtgaagaacatgttcaccaaccaggacagaaacggcgacggcaaggtgaccgccgaggagttcaagctgaaggaccaggaggccaagcacgacgagctgtag

SEQ ID NO: 103801 - DNA, 2253 bp, Artificial Sequence
  derived and/or modified sequence
agacggggtggcggctgcagcccgggtagggccaggagacccggtccacgtttgcaaacgcagccgaacgcccaggccgacccgtgccgcccgagcgccgcgctgcgtccgcgccactcttctcgccgccccgatggcgttccggggctggaggcccccgccgccaccgctgctcctgctgctgctctgggtgaccgggcaggcagcgcccgtggcgggcctgggctccgacgcggagctgcagatcgagcggcgcttcgtgcccgacgagtgcccgcgcaccgtgcgcagcggcgacttcgtgcgctaccactacgtggggacgttccccgacggccagaagttcgactccaggtactgggatacagcggaggataaagctgacaaaagtccctgccctcaagtcagggttggggtgaacacaagcccgtcctgcagacttaagcagaaaggagtgggaatttattggaaggatctccaattccttgtgagggtccagaatcatggactgagctatgacagagactccactttcaatgtgtttgtgggaaaaggacagctgatcacagggatggaccaggctcttgttgggatgtgcgtaaacgagagacgtttcgtgaagattcccccaaagcttgcctacggaaatgaaggagtttctggtgtgatcccccccaattcagtgcttcattttgatgtacttctgatggatatttggaattctgaagaccaggttcagattcacacctatttcaagcccccgagttgccctcggaccatccaggtgtctgattttgtgaggtaccactacaacgggacgttcctggacggaactctgtttgattcgagtcacaatcgcatgaaaacatatgacacgtatgtgggaattggctggctgattcctggaatggataaagggctgctggggatgtgtgtgggtgagaagcgcatcatcaccattcctccttttctggcctatggagaggatggagatgggaaagacattcccggtcaggcatctctggtgtttgatgttgcattattggacctccataaccccaaggacagcatttccattgagaacaaggtagtacctgaaaactgtgagcggataagtcaaagtggggactttctcaggtatcattacaatggcacgcttctggatggcaccctctttgattccagctactctcggaaccgcacgtttgacacgtacattgggcagggctacgtgattcctgggatggatgaaggtctacttggtgtttgcattggagaaaagcgaaggattgtggtcccgcctcacctggggtatggagaggaaggaagagggaatatccccggctcggctgtgctggtgtttgacatccatgtgatcgacttccacaacccttcggactccatcagcatcacctcccactacaaaccccctgactgctcagtgctgagtaagaagggagattacctcaaatatcactacaatgcctcacttctggatgggaccctgctggactccacgtggaatttaggcaaaacttacaatattgttctgggatctgggcaagttgtgttggggatggacatgggtctcagagagatgtgcgttggcgagaaacggacagtgatcattccgcctcacctgggctatggggaagctggcgtggatggagaagtgcccggcagtgccgtattagtgtttgacattgagctgctggagctggtggctggccttcctgaggggtacatgttcatatggaatggtgaggtgtcacccaacctctttgaagaaattgacaaggatggcaacggagaagtcctcctggaagagttctcagagtacattcacgcccaggtggcatctggcaaagggaaactcgctcctggctttgatgctgagctgattgtgaagaatatgttcaccaaccaggaccggaatggagatgggaaggtcacagccgaggaatttaaactcaaagaccaggaagccaaacacgatgaactctaaacctggcatgaaccagatggtgccagggagtacgtgacaccaagccacctgtgtggcaagacgtgcagtgagggtgcaagggtctctcagaagttgcatcattagccagtagtaggtgggtcacatagtacctggtgtacacatcggggtgggttgatatatggggtgagaagtttgggctgatcgccagtgatagtaaacaaaatctgtgcagagggccttagcatgggatgtgtccagtattgaaa

SEQ ID NO: 103802 - DNA, 1872 bp, Artificial Sequence
  derived and/or modified sequence
atggccttccgtggttggcggccccctcctcctcccctacttctcctccttctctgggttacgggccaggccgcgcctgttgccgggctgggctctgacgctgagcttcagatagaacggagattcgttccggatgagtgcccccgaactgtgagaagcggcgattttgtccgatatcactacgtcggcacctttcctgacgggcagaaattcgattctaggtattgggatacagctgaggacaaagccgacaagagtccatgcccccaggtacgcgttggggtcaatacaagtccttcatgtcgcctgaaacagaaaggcgttgggatatattggaaggacctacagtttttggtgagagtgcagaatcacgggttgtcttacgatagagatagcacattcaacgtgttcgtgggaaaaggtcaactaattacaggcatggatcaagcgcttgtgggaatgtgtgtgaatgaacgccgcttcgtcaaaattccgcccaagctcgcgtatggaaacgaaggggttagcggggttataccccccaatagtgtgctccatttcgatgtgctcctgatggatatatggaatagcgaagatcaggtgcaaatccacacttatttcaaaccccctagctgcccacggactatccaagtctccgacttcgtcaggtatcattataatggcacttttctagacgggaccttattcgatagttcacacaatcggatgaagacatacgatacatatgtcgggatcggttggttaattcccgggatggataaaggattgctgggaatgtgcgtgggcgaaaaacgcattattacgattccgcctttcctcgcctatggtgaagatggcgacggcaaggacattcctggacaggcttctctcgtttttgatgtagcactgctcgacctgcacaatcctaaggactctataagcatagaaaataaggtggttccagagaactgcgagagaatttctcaatctggtgactttctccggtaccactataatggcacgctgctcgacgggactcttttcgattcatcgtattcacgaaaccgcacctttgacacctacatcggccagggctatgtgatcccaggtatggatgagggattgctgggcgtttgtattggagagaagcgccggatcgtagtgccacctcacctcggatacggagaagaaggacgcggaaacatccccggatccgccgtcctagtgttcgacattcatgttatagatttccacaaccccagtgactctatctctattacgagccattataagccgccagactgtagcgtcttgtccaagaagggagactatcttaaataccactacaacgcctctctgcttgacggcactctgcttgacagcacctggaacctggggaaaacatataacatcgtcttggggtcagggcaggtagttctggggatggacatggggctcagagagatgtgcgtgggggagaaaaggactgttatcattcccccacacctgggttatggagaggccggtgtcgacggggaggtaccaggaagcgctgtgctggtcttcgatatagagctcctggaactggtcgcagggctgcctgaaggatatatgtttatctggaatggagaagtctccccaaacctttttgaggagatcgacaaagacggcaatggcgaggtgttgctcgaagaattctctgaatatatccacgcccaggtggcctcagggaaaggaaagctggcacctggcttcgacgccgagcttatcgtgaagaacatgttcaccaaccaggacaggaatggcgacggcaaggtgaccgccgaggaatttaagctgaaggaccaagaggctaagcacgacgagctatag

SEQ ID NO: 103803 - DNA, 1872 bp, Artificial Sequence
  derived and/or modified sequence
atggccttccggggctggaggcctcctcctccacccctgctgctgctgctgctgtgggtgacaggccaggccgcccctgtggccggcctgggcagtgatgctgagctgcagatcgagaggagatttgtgcctgatgagtgccccaggacagtgcgcagcggggactttgtgcgctaccactacgtgggcaccttcccagatggccagaagtttgacagccgctactgggacacagctgaggacaaggctgacaagagcccctgcccccaggtgcgggtgggcgtgaacaccagccccagctgccgcctgaagcagaagggcgtgggcatctactggaaggacctgcagttcctggtgcgggtgcagaaccacggcctgtcctatgaccgggacagcaccttcaacgtgtttgtgggcaagggccagctgatcaccggcatggaccaggccctggtgggcatgtgtgtgaatgaaagaagatttgtgaagatcccccccaagctggcctatggaaatgaaggagtgtctggagtcatcccccccaacagcgtgctgcactttgatgtgctgctgatggacatctggaacagcgaggaccaggtgcagatccacacctacttcaagccacccagctgccccaggaccatccaggtgtctgactttgtgcgctaccactacaacggcaccttcctggatggcaccctgtttgacagcagccacaacaggatgaagacctatgacacctacgtgggcatcggctggctgatccctggcatggacaagggcctgctgggcatgtgtgtgggggagaagaggatcatcaccatcccccccttcctggcctacggggaggatggagatggcaaggacatccctggccaggccagcctggtgtttgatgtggccctgctggacctgcacaaccccaaggacagcatcagcattgagaacaaggtggtgcctgagaactgtgagcgcatcagccagagcggggacttcctgcgctaccactacaacggcaccctgctggatggcaccctgtttgacagcagctacagcaggaacagaacatttgacacctacatcggccagggctacgtgattcctggcatggatgagggcctgctgggcgtgtgcatcggggagaagaggcgcatcgtggtgcccccccacctgggctacggggaggagggccggggcaacatccctggcagcgctgtgctggtgtttgacatccacgtgattgacttccacaaccccagcgacagcatcagcatcaccagccactacaagcccccagactgcagcgtgctgagcaagaagggggactacctgaagtaccactacaatgccagcctgctggatggcaccctgctggacagcacctggaacctgggcaagacctacaacatcgtgctgggcagcggccaggtggtgctgggcatggacatgggcctgcgggagatgtgtgtgggggagaagaggacagtcatcatccccccccacctgggctatggagaggccggcgtggatggagaggtgcccggcagcgctgtgctggtgtttgacatcgagctgctggagctggtggccggcctgcctgagggctacatgttcatctggaatggagaggtgagccccaacctgtttgaggagattgacaaggatggaaatggagaggtgctgctggaggagttcagcgagtacatccacgcccaggtggccagcggcaagggcaagctggcccctggctttgatgctgagctgattgtgaagaacatgttcaccaaccaggacagaaatggagatggcaaggtgacagctgaggagttcaagctgaaggaccaggaggccaagcatgatgagctgtag

SEQ ID NO: 103804 - DNA, 1872 bp, Artificial Sequence
  derived and/or modified sequence
atggccttccggggctggcggcccccccccccccccctgctgctgctcctcctgtgggtgacaggccaagctgcccccgtagcagggctaggttcagatgcggagctccagatagaacgtagatttgtgcctgatgaatgtcctagaactgtccgttcaggcgacttcgttcgttatcactacgtgggtacattcccagacggacagaaattcgacagtaggtattgggatacagccgaggataaggccgacaagtcaccttgtcctcaagtgagggtaggggtgaacacctcccctagctgccgcctcaaacagaagggggtgggaatttattggaaggacctacagtttctggtccgcgttcaaaatcatggcctgagctacgatagggattccacttttaacgtgtttgtgggaaaggggcaacttattaccggcatggaccaagcactagtcggtatgtgcgtgaatgagagacgattcgtgaagatcccccctaagttggcatacggaaacgaaggcgtgagtggtgtaattcctcccaactcagtgctgcatttcgacgtgttgctgatggatatctggaatagcgaggaccaggtgcagatacacacatactttaagcccccatcttgtcctagaaccatccaggtgagtgatttcgtgcgttatcactataatgggacattcctggatggtacgctcttcgactcttcccataatcgtatgaaaacctacgacacctatgtgggtatcggctggctgatccctggtatggacaagggactactgggcatgtgtgtaggtgagaagaggataattacaattccgccctttttagcatacggagaagatggcgacggcaaagacatccccggacaagcctcccttgtttttgacgtggcattgctggacctgcacaatcccaaggattcaatttctatcgagaacaaggtagtgccagaaaactgtgagagaatttcacaaagcggagactttctgcgctatcattataatgggacactgttggatggcacactgtttgattcttcctatagtagaaatagaactttcgacacctacatagggcagggctatgtcattccaggaatggatgagggactacttggtgtgtgcattggcgagaagcgacgcatcgtggtacccccccatttgggctacggcgaggagggaagaggcaatatccccggatctgcagtgctggtctttgatatacatgttatagactttcataaccccagcgactcaatctctattacctcacattataaacccccagactgtagtgtcctcagtaaaaagggtgattacttgaagtaccactataatgcctccctattggacggaactttgctggattccacgtggaacttagggaagacctacaacatcgtgctgggatctggccaggtagtgctgggcatggatatgggcttacgcgagatgtgcgtgggcgagaagagaactgttattattccaccacacttaggatatggcgaggcgggggtagacggagaagtgccgggcagcgccgtactcgtctttgatatcgagctcctggagctcgttgctggattacccgaggggtatatgttcatttggaacggcgaagttagcccgaatctcttcgaagagatcgacaaggacggcaatggagaggtgctactcgaagagttcagtgagtatatccacgcccaggtggcctccggcaaaggaaagctcgcgccagggtttgacgcagagctcatcgtcaagaacatgtttacaaatcaggaccgcaatggggacggtaaagtgacggctgaagagttcaaactgaaggatcaagaggccaagcatgatgagttgtag

SEQ ID NO: 103805 - DNA, 1872 bp, Artificial Sequence
  derived and/or modified sequence
atggctttccgcggatggaggccaccaccaccgcctctacttctgcttctcctctgggtgaccggccaggccgctccggtggccggactggggagtgatgccgaactccaaatcgaaagacggtttgtccccgacgaatgtcctcggacagtgcggtctggagacttcgtgaggtatcactacgttggaacctttcccgatggccagaagttcgattccagatactgggacacggccgaagataaagccgataagagcccgtgtccccaagtaagggttggcgtgaacacatccccctcctgtagactgaagcaaaaaggggtcggcatctattggaaagatctgcagtttctcgttcgggtacaaaatcacggtctgagttatgatcgtgatagcacattcaatgtatttgtcggcaaaggtcaactgattacaggaatggaccaggccctcgtcgggatgtgcgtgaacgagaggcgctttgtcaagattccccctaaactggcttacggaaatgaaggcgtcagcggggtcatccctcctaactccgtcctgcacttcgatgtgctgttgatggacatttggaacagtgaggatcaggttcagatacacacatactttaaaccaccttcctgcccaaggaccattcaagtgagcgacttcgtgagatatcattataatgggactttcctggacggcaccctttttgactcgagccataacagaatgaaaacctatgatacatatgtcggaatcggctggctgattccaggcatggacaaggggttgctcggaatgtgcgtgggagagaaacggatcattacaatccctcccttcttagcttatggtgaggatggcgatgggaaagatatcccaggacaagctagtcttgttttcgacgtggcactcctggaccttcataatccaaaggactcaatcagtatcgaaaataaggtggtgcctgagaactgtgagcggatctcccaatccggggactttctgcggtaccactataacgggaccctgttagacggtactctgttcgacagtagctattcccggaatagaacgttcgacacgtacatcggtcaagggtacgtgatacccggtatggatgagggtctgctgggggtgtgcattggcgaaaagaggcggatcgtggtcccccctcatcttgggtatggcgaggagggcagaggaaacattcccggatccgctgtcttggtgtttgatatccatgtgatcgacttccacaacccttctgattctatctctatcacaagccactataaaccgcctgattgttccgtattgtcgaaaaagggagattatctcaagtaccactataacgcgagtctgctggacggcaccctcttggactctacctggaacctggggaaaacatacaacatcgttctgggttccggtcaagtggtgttaggaatggatatgggtctgcgtgagatgtgtgtgggggagaaaagaacagttatcatacctccgcatctgggctacggggaagctggagttgatggagaagttccaggaagcgccgtgctggtctttgatatcgagctgctagagttagttgcgggattacccgaagggtatatgttcatttggaatggggaagttagccctaatctctttgaagaaatcgacaaggatggtaacggggaagtgctattagaggagttttccgagtacatacatgcacaggtggcttccgggaaagggaagctcgcgcctggcttcgatgccgagctcatagtgaagaacatgtttaccaaccaagaccgcaatggagatggaaaagtgaccgcagaggagttcaaacttaaagatcaggaggccaagcacgacgaactctag

SEQ ID NO: 103806 - protein, 338 aa, Artificial Sequence
  derived and/or modified sequence
MAGKDIPGQASLVFDVALLDLHNPKDSISIENKVVPENCERISQSGDFLRYHYNGTLLDGTLFDSSYSRNRTFDTYIGQGYVIPGMDEGLLGVCIGEKRRIVVPPHLGYGEEGRGNIPGSAVLVFDIHVIDFHNPSDSISITSHYKPPDCSVLSKKGDYLKYHYNASLLDGTLLDSTWNLGKTYNIVLGSGQVVLGMDMGLREMCVGEKRTVIIPPHLGYGEAGVDGEVPGSAVLVFDIELLELVAGLPEGYMFIWNGEVSPNLFEEIDKDGNGEVLLEEFSEYIHAQVASGKGKLAPGFDAELIVKNMFTNQDRNGDGKVTAEEFKLKDQEAKHDEL

SEQ ID NO: 103807 - DNA, 1017 bp, Artificial Sequence
  derived and/or modified sequence
atggccggcaaggacatccccggccaggccagcctggtgttcgacgtggccctgctggacctgcacaaccccaaggacagcatcagcatcgagaacaaggtggtgcccgagaactgcgagagaatcagccagagcggcgacttcctgagataccactacaacggcaccctgctggacggcaccctgttcgacagcagctacagcagaaacagaaccttcgacacctacatcggccagggctacgtgatccccggcatggacgagggcctgctgggcgtgtgcatcggcgagaagagaagaatcgtggtgcccccccacctgggctacggcgaggagggcagaggcaacatccccggcagcgccgtgctggtgttcgacatccacgtgatcgacttccacaaccccagcgacagcatcagcatcaccagccactacaagccccccgactgcagcgtgctgagcaagaagggcgactacctgaagtaccactacaacgccagcctgctggacggcaccctgctggacagcacctggaacctgggcaagacctacaacatcgtgctgggcagcggccaggtggtgctgggcatggacatgggcctgagagagatgtgcgtgggcgagaagagaaccgtgatcatccccccccacctgggctacggcgaggccggcgtggacggcgaggtgcccggcagcgccgtgctggtgttcgacatcgagctgctggagctggtggccggcctgcccgagggctacatgttcatctggaacggcgaggtgagccccaacctgttcgaggagatcgacaaggacggcaacggcgaggtgctgctggaggagttcagcgagtacatccacgcccaggtggccagcggcaagggcaagctggcccccggcttcgacgccgagctgatcgtgaagaacatgttcaccaaccaggacagaaacggcgacggcaaggtgaccgccgaggagttcaagctgaaggaccaggaggccaagcacgacgagctgtag

SEQ ID NO: 103808 - DNA, 1494 bp, Artificial Sequence
  derived and/or modified sequence
aaaggccagtggaaggagctcaggcttggcggcatctggtttgcttgtctgggcctactcctttgcatgatataacaaatggcagggaaagacattcccggtcaggcatctctggtgtttgatgttgcattattggacctccataaccccaaggacagcatttccattgagaacaaggtagtacctgaaaactgtgagcggataagtcaaagtggggactttctcaggtatcattacaatggcacgcttctggatggcaccctctttgattccagctactctcggaaccgcacgtttgacacgtacattgggcagggctacgtgattcctgggatggatgaaggtctacttggtgtttgcattggagaaaagcgaaggattgtggtcccgcctcacctggggtatggagaggaaggaagagggaatatccccggctcggctgtgctggtgtttgacatccatgtgatcgacttccacaacccttcggactccatcagcatcacctcccactacaaaccccctgactgctcagtgctgagtaagaagggagattacctcaaatatcactacaatgcctcacttctggatgggaccctgctggactccacgtggaatttaggcaaaacttacaatattgttctgggatctgggcaagttgtgttggggatggacatgggtctcagagagatgtgcgttggcgagaaacggacagtgatcattccgcctcacctgggctatggggaagctggcgtggatggagaagtgcccggcagtgccgtattagtgtttgacattgagctgctggagctggtggctggccttcctgaggggtacatgttcatatggaatggtgaggtgtcacccaacctctttgaagaaattgacaaggatggcaacggagaagtcctcctggaagagttctcagagtacattcacgcccaggtggcatctggcaaagggaaactcgctcctggctttgatgctgagctgattgtgaagaatatgttcaccaaccaggaccggaatggagatgggaaggtcacagccgaggaatttaaactcaaagaccaggaagccaaacacgatgaactctaaacctggcatgaaccagatggtgccagggagtacgtgacaccaagccacctgtgtggcaagacgtgcagtgagggtgcaagggtctctcagaagttgcatcattagccagtagtaggtgggtcacatagtacctggtgtacacatcggggtgggttgatatatggggtgagaagtttgggctgatcgccagtgatagtaaacaaaatctgtgcagagggccttagcatgggatgtgtccagtattgaaaaggctgcactgccaaccatgatttgtgagccttctgggaaattttgttattaaaggaatatatagtgtcagacggaagttataatcatcttggaggaaccataagaaaaggtgtccagggtatctatataaagagggttaaattttttttt

SEQ ID NO: 103809 - DNA, 1017 bp, Artificial Sequence
  derived and/or modified sequence
atggccggaaaagatattcctgggcaggcttcactagtatttgatgtggccctcttagatctgcataatcctaaagattctatttcgatcgagaacaaagttgtccctgagaattgtgagagaatttcacagagtggcgacttcctgcggtaccattacaatgggacgctgttggacggtactctgttcgatagctcctactctagaaaccgaacattcgatacctatataggtcagggatatgtcattccagggatggacgaaggcctgctgggcgtttgcattggggaaaagcgacgcattgttgttcccccgcatctgggctacggggaagagggacgggggaatatccctggttcagcagtcttagtgtttgatatccatgtcatagacttccataatccaagtgattcaatatctatcacctctcactataaaccgcccgactgttccgttctgagcaagaagggtgattaccttaaataccattataacgcgtctctcctggacggaacactactcgacagtacttggaatctgggcaaaacttataatatcgttctagggtctggccaagttgtcctagggatggacatgggtttgcgggaaatgtgtgttggcgagaagagaacagtgatcatcccgcctcatctggggtacggtgaggcaggagtcgacggggaggttccaggatctgctgtgctggtgttcgacattgagctgctggagcttgtggctggcctgcctgaaggttatatgttcatatggaatggagaggtgtcaccaaacctgtttgaggagattgacaaggacggcaatggggaagtgctgctcgaggaattttcggagtacatccatgcccaggtggcttccggcaagggcaagctcgcacccgggttcgacgcagaactgatcgtgaagaatatgttcactaatcaggaccgaaatggtgatggcaaggtgaccgccgaggagttcaagctgaaagaccaggaggctaaacacgacgaactttag

SEQ ID NO: 103810 - DNA, 1017 bp, Artificial Sequence
  derived and/or modified sequence
atggccggcaaggacatccctggccaggccagcctggtgtttgatgtggccctgctggacctgcacaaccccaaggacagcatcagcattgagaacaaggtggtgcctgagaactgtgagcgcatcagccagagcggggacttcctgcgctaccactacaacggcaccctgctggatggcaccctgtttgacagcagctacagcaggaacagaacatttgacacctacatcggccagggctacgtgattcctggcatggatgagggcctgctgggcgtgtgcattggagagaagagaagaattgtggtgcccccccacctgggctatggagaggagggccggggcaacatccctggcagcgctgtgctggtgtttgacatccacgtgattgacttccacaaccccagcgacagcatcagcatcaccagccactacaagcccccagactgcagcgtgctgagcaagaagggggactacctgaagtaccactacaatgccagcctgctggatggcaccctgctggacagcacctggaacctgggcaagacctacaacatcgtgctgggcagcggccaggtggtgctgggcatggacatgggcctgcgggagatgtgtgtgggggagaagaggacagtcatcatccccccccacctgggctacggggaggccggcgtggatggagaggtgcccggcagcgctgtgctggtgtttgatattgagctgctggagctggtggccggcctgcctgagggctacatgttcatctggaatggagaggtgagccccaacctgtttgaggagattgacaaggatggaaatggagaggtgctgctggaggagttcagcgagtacatccacgcccaggtggccagcggcaagggcaagctggcccctggctttgatgctgagctgattgtgaagaacatgttcaccaaccaggacagaaatggagatggcaaggtgacagctgaggagttcaagctgaaggaccaggaggccaagcatgatgagctgtag

SEQ ID NO: 103811 - DNA, 1017 bp, Artificial Sequence
  derived and/or modified sequence
atggccggcaaggacatccccggccaggccagcctggtgttcgacgtcgcgctgctcgacctgcataatccaaaagattcgatctctattgaaaacaaggtcgtgccagagaactgtgaaaggatttcacagtccggtgatttcctaagataccactataacgggaccttactcgacggcaccttgtttgactcctcttattcacgcaacagaaccttcgacacatacataggtcaaggatatgtgatcccaggcatggatgaaggcttgctgggtgtgtgtataggcgaaaaacgcaggatcgtggtgcccccccacttaggatacggtgaggagggacgcggcaacattcctgggagcgcggttctggtatttgacatccatgtgattgacttccataaccctagcgacagcatctccatcacgagccactataagcccccagactgctcagtactatctaagaagggagattatctcaagtaccattataacgcttctctattggatggaacactgctggatagtacatggaacctgggaaaaacttacaatatcgtactgggctccggacaagtcgtgctcggcatggacatgggtctgcgagagatgtgcgtgggcgagaagaggaccgtgatcattcccccccacctgggttacggcgaggcaggggtagacggtgaggtgccgggatccgccgtgcttgtgtttgacattgagctcctcgagttggtcgctggcctacccgaaggatatatgtttatctggaacggcgaggtttcccccaacctgttcgaggagatagacaaggatggcaacggggaagtcctgctggaggagttcagcgaatacattcatgctcaggtcgcgagcggaaaggggaaactggcgcccggattcgacgccgaactgatcgtgaaaaatatgttcactaaccaggaccgaaacggggatggaaaagttacagccgaagagttcaaactgaaagatcaagaggccaaacacgatgagttatag

SEQ ID NO: 103812 - DNA, 1017 bp, Artificial Sequence
  derived and/or modified sequence
atggcaggcaaggacattccaggccaagcctctctcgtatttgacgtggccctcctggacctgcacaacccaaaagattccatctccattgagaataaggtcgtgccagaaaactgcgagcgaatcagccagtcgggcgacttcttgagataccactacaatggtactctgcttgacgggaccctgtttgactcatcctactctcggaatagaacctttgacacatatatcgggcagggctacgtaatcccaggaatggatgaggggctgcttggggtctgcattggagagaaaaggcgcattgtcgtccctccacatctcggctacggggaggaaggaagaggcaacattcctggaagcgccgttctggtctttgatatccatgtcattgattttcataacccatctgactcgatcagcatcactagccactataagccccctgattgcagcgtgctgtctaagaaaggcgattatctaaagtatcattacaatgcctccctcttagacgggaccctgctcgactccacctggaacctcggcaagacgtataatattgtgctgggcagtgggcaggtagtgttaggaatggacatgggattgcgcgaaatgtgtgtgggcgagaaacgaacggtgatcatacctcctcacttgggatacggtgaggctggggtggatggcgaggttccagggagcgccgttcttgtcttcgacattgagcttttggaattagtggcagggcttccggaagggtatatgttcatctggaatggcgaggtgtccccaaatctcttcgaagagatcgacaaggatgggaacggagaagtgcttctcgaggagttttccgaatacatacacgcccaggtggcatcaggaaagggcaagttagccccaggctttgacgctgagctaatcgtgaagaatatgtttacgaaccaagatagaaacggagatggcaaggtgaccgcggaagaattcaagctgaaagaccaggaggccaaacacgacgaactatag

SEQ ID NO: 103813 - protein, 621 aa, Artificial Sequence
  derived and/or modified sequence
MTKAMKVKTPLRALKSLWDYDFLIYDGVIDNTAPDFLAFKEHFSLAWGGIFSLLEHVEKFLRNYAIPEVKIKGNNLVALLPEFELTNKLTRYDLLSVLEDPAHVQMLINLPGQRYKGQDGNSEAAMKIQATWKCYKARKFFLFYRQQKWASGVIAIAWLLYCHKTRLKKILKESRQRHLENFRIRAKHLAANWNRIRTSRRTIIHIPSLGYSQPVREHIADFNTQQNMQLGRLCDILDANVNVIYICSHHMNDELVLYYKKILSLHAAVKSGNLEDRSDLQDRFKIITPEAVNIFPMIEQLSQLITDHLQIQRWLFKMDSEFRGNGTAFCDIPSYLKCYKWVLKESSRYGLEDWRKKWAQEPALVKISEELAGILAQHAQPVNEKRFPTWRKFLQTFLSQGGVIEAFPPADNVTNLTVDMLIEPNGKISVLSTGDQLHAESPFISSGTTVPQTSVDPQVLTYLCLQIGKACRMRDVVGYFSIDLVTFIDPSTLEQQVWATGLNLAYSDQLALTQLTLYLTNGHLDCSLSTLEVPRFVPKERKKTKCMSALSMPMLATSRYAVMTTQLRHSNLSLVFHYVFLQICRAHGIGYDVENNRRGSPGGPHDLCSPSLHHPSRNIST

SEQ ID NO: 103814 - DNA, 1866 bp, Artificial Sequence
  derived and/or modified sequence
atgactaaggccatgaaggttaagactcctctgagggcccttaaaagcctgtgggactacgactttctcatttacgacggagtgatcgataatactgcacctgattttttagccttcaaagaacacttctctctggcttgggggggtatattcagtttgctcgagcatgttgagaaattcctgaggaactacgctatccccgaggtgaagataaagggaaacaatctggtagcactcctgccagagttcgagctcactaacaagctcactcggtatgacctgctctccgtgttggaggacccagctcacgttcagatgctaattaaccttcccggccagagatataagggccaagatggcaactcagaagccgccatgaagatccaggctacttggaagtgctacaaggcccgaaagtttttcttattctacaggcagcaaaagtgggctagtggtgttatagctatcgcatggttgttgtattgccataagacccggcttaagaagatcctaaaggagtcacgccagagacatttagagaacttcaggatcagagcgaagcacttggcggccaactggaaccgaattcgcacaagccgccgcactatcatccacatacccagcctggggtactcccaacccgtgagggagcacattgccgactttaatacccagcagaacatgcagctcggaaggctatgcgacatactggatgctaatgtgaacgtcatctacatttgttcccatcacatgaacgatgaactggtgctgtattacaaaaagattctgtcattgcacgctgcggtgaagagtggaaaccttgaggatagatccgacctgcaggataggtttaagataatcaccccagaagcagtgaacattttccctatgatcgagcagctgagccaactgatcaccgaccacctccagatacagcggtggttgttcaagatggactccgaattcagaggtaacggcacagccttttgcgacattccctcctacctcaagtgctataaatgggtgctgaaggaaagcagccggtacggactcgaagactggcggaaaaaatgggcacaggaacccgccctggtgaaaattagcgaggagttagcagggattcttgcccaacacgctcagcctgtcaacgagaagcgcttccctacatggaggaagtttttgcagaccttccttagtcagggcggtgtgattgaggccttcccaccagccgataacgtgacgaatctgacggttgacatgttgattgagccgaacggcaagatctccgttctctctacaggcgaccagttacatgcagaaagtccattcatcagtagcgggacaacagtgcctcaaacttccgtagatccacaggtgctgacttacctgtgcctgcaaatcggtaaggcatgtcgcatgcgggacgtcgtcggctatttcagtatcgacttagtgacctttatagacccttccactctcgagcagcaggtttgggcaacaggactcaatcttgcctactctgatcaattggctcttactcagctaacactttatcttactaacggccacctagactgcagcctttctacactggaagtcccgagattcgtgcccaaggaaaggaagaagactaagtgtatgtccgctctgtcaatgccaatgcttgccacttctcggtacgctgtgatgacaacccagctgaggcactcaaacctgtcactggtatttcactacgtctttctgcagatatgccgggcacacggcatcggctacgacgttgagaataacagacgtggatcgccaggcggcccccacgatctgtgttctccctccctccaccacccctccagaaacatctccacatag

SEQ ID NO: 103815 - DNA, 3062 bp, Artificial Sequence
  derived and/or modified sequence
atgacaaaggccatgaaagtcaaaacacctttgagagccctgaaatcactgtgggattatgactttttaatttatgatggtgtcatagacaatacagccccagacttcttagcattcaaggaacattttagcttagcttggggaggtattttttctctcttggaacacgtcgagaagtttctcaggaactatgctataccagaagtcaaaataaaagggaataatttggtggccctccttccagagtttgagctgacgaataaacttaccagatatgaccttctctcagtgttagaggacccagctcatgtccaaatgctgataaatcttccagggcaaaggtacaagggccaagatggaaattcggaggccgccatgaagatccaagccacatggaaatgctacaaagcaagaaaattcttcctcttttatcgccagcagaagtgggcatcaggtgtgattgccattgcttggctgttatattgccataagactcgactaaagaagatactaaaggaatcacgtcagagacacctggagaattttcgcattcgagccaagcatctggcagccaactggaatcgcatcaggacctccaggaggactattatccatatcccatcattagggtattcccagcctgtgagagaacatattgccgatttcaacacacagcagaacatgcagctggggaggctgtgtgacatcttagatgccaatgtgaatgtcatctacatctgctcccatcatatgaatgacgagttagtgctgtattacaaaaaaatcctaagtctacatgcagccgtcaaatctgggaaccttgaggacagaagtgacctgcaggacaggttcaaaattatcacacctgaagctgtaaacatcttccctatgatagagcagctgagtcagctgataactgatcacctgcaaatacagcgttggctctttaaaatggactctgagttccgaggaaatgggactgcattttgtgatattccttcctacctaaagtgctacaaatgggtgctaaaggagagtagcagatatggccttgaagactggagaaagaaatgggcacaagagccagctttggtgaagatctctgaggagctggcgggcattttagcacagcacgcacagccagtcaatgagaaacggttcccgacgtggaggaaattcctccaaacatttctcagtcaagggggtgtgatcgaagcattcccacctgcagacaatgtcaccaacctcacagtggacatgctgatagagcccaacgggaaaatcagcgtgctgtcgacaggggaccagcttcatgctgaaagccccttcatctcctctggtaccaccgtgcctcagacctcagtggatccccaagttctcacttatttgtgcctccaaattggaaaagcctgcagaatgagagatgtggttggttacttttcgatagatctggtgacttttatagatccaagcaccttggaacaacaggtgtgggcaaccggccttaacctcgcatatagtgaccagctggccctgactcaactcaccttatacctgacaaacggccatctggattgcagtttgagcaccctggaagtgccccgctttgttccaaaggaaaggaagaaaaccaaatgcatgagtgcgctgtcaatgccgatgctggcaaccagtcgctatgcagtgatgaccacccagctaagacacagcaatctctcactggttttccactatgtttttctccagatctgtagggcccatggcattggctatgatgttgagaacaatcggcgaggatctccagggggtcctcatgacctttgctcgccatctcttcatcatccatcaagaaatatcagcacctaatatgcaaggcgagaccaattttaagaccaccattgctgatattgaaactattctaagagtaacaaaggaaaacaaaatgagatttgaagaggagcaacagtccaaagatgataaaaacctctctaaacccaagaaatgatcctggaatacagtacataacaatttggatcccagtctggaataaaaagggcaatttttttttctgttagaaataaaagccaggggaaattggtttgctttgtgtgctaggaggtgaatcagaacagattataatgaaatgctctttttaaaacattgtttattaagtgatcttattttatttattaaaccaaaacttatttgtgttttcatttgagagtgttgaacaatcccttcttcttctcaaactcagaaaaaagtaatctgataaaagaagaaagttaaaagtcttactgatatcacctccgcatttacttcctcataggcctcaggattatgtagcttttattttttatgttttataaagttttctcctatttctaatagtccatcgatcttctgcatttataggtttgaataaaggcttaagaattgctatttgtcaaaacacaaatgcctttttttcaaagcttcaaattatattgaaattatatttatatgaatttttaagtgactatcattcatcgtgtttttgttataccaagccactattgtctgctattgttgccatttttcaaaaagtaggataagccagcatctagttaaccaaagcatcagaatgtatctaggtggcagtatctgctcttagtttaagatggagtgtagctcgagctctgtagcttgaataaacatttgtattctctagttctccatttaatacagcagtaggattttttcaagtttagttcaacattatactacctttaaaaaggcagactgttaagattgtagtagtgctgactctaactttcagcattcacttcataattgtccaaaaatatttccacatcagtgagctttactgaagggtgaaataaaagcaaattacaacaccaaaaccattattgttttaaagaatgacctttatgtctataaaaatattttagtgtattggggaaaggaataggatttttacctgtggaatttcaataatttgttaactgtgattcagccacaggctaagagtttctgtaataaaattaacatttgtgtgtgtc

SEQ ID NO: 103816 - DNA, 1866 bp, Artificial Sequence
  derived and/or modified sequence
atgaccaaggccatgaaggtgaagacccccctgcgggccctgaagagcctgtgggactatgacttcctgatctatgatggagtgattgacaacacagccccagacttcctggccttcaaggagcacttcagcctggcctggggcggcatcttcagcctgctggagcacgtggagaagttcctgaggaactatgccatccctgaggtgaagatcaagggcaacaacctggtggccctgctgcctgagtttgagctgaccaacaagctgaccaggtatgacctgctgtctgtgctggaggaccctgcccacgtgcagatgctgatcaacctgcccggccagcgctacaagggccaggacggcaacagcgaggccgccatgaagatccaggccacctggaagtgctacaaggccaggaagttcttcctgttctaccggcagcagaagtgggccagcggggtcatcgccatcgcctggctgctgtactgccacaagacccggctgaagaagatcctgaaggagagccggcagaggcacctggagaacttccgcatccgggccaagcacctggccgccaactggaaccgcatccgcaccagcaggaggaccatcatccacatccccagcctgggctacagccagcctgtgcgggagcacatcgctgacttcaacacccagcagaacatgcagctgggccgcctgtgtgacatcctggatgccaacgtgaatgtcatctacatctgcagccaccacatgaatgatgagctggtgctgtactacaagaagatcctgagcctgcatgctgctgtgaagagcggcaacctggaggacagaagtgacctgcaggaccgcttcaagatcatcaccccagaggccgtgaacatcttccccatgattgagcagctgagccagctgatcacagaccacctgcagatccagcgctggctgttcaagatggacagcgagttcagaggaaatggaacagccttctgtgacatccccagctacctgaagtgctacaagtgggtgctgaaggagagcagccgctatggcctggaggactggaggaagaagtgggcccaggagcccgccctggtgaagatcagcgaggagctggccggcatcctggcccagcacgcccagcctgtgaatgagaagcgcttccccacctggaggaagttcctgcagaccttcctgagccagggcggcgtcatcgaggccttccccccagctgacaacgtgaccaacctgactgtggacatgctgattgagcccaacgggaagatctctgtgctgagcactggagaccagctgcatgctgagagccccttcatcagcagcggcaccaccgtgccccagacctctgtggacccccaggtgctgacctacctgtgcctgcagatcggcaaggcctgcaggatgagagatgtggtgggctacttcagcattgacctggtgaccttcatcgaccccagcaccctggagcagcaggtgtgggccaccggcctgaacctggcctacagcgaccagctggccctgacccagctgaccctgtacctgaccaacggccacctggactgcagcctgagcaccctggaggtgcccaggtttgtgcccaaggagaggaagaagaccaagtgcatgtctgccctgtccatgcccatgctggccaccagccgctatgctgtgatgaccacccagctgcggcacagcaacctgagcctggtgttccactacgtgttcctgcagatctgccgggcccatggaattggctatgatgtggagaacaacagaagaggcagccctgggggcccccatgacctgtgcagccccagcctgcaccaccccagcaggaacatcagcacctag

SEQ ID NO: 103817 - DNA, 1866 bp, Artificial Sequence
  derived and/or modified sequence
atgaccaaggccatgaaggtgaagacccccctgcgggccctgaagtccctctgggattacgattttctcatctatgacggcgtaattgataacactgctccggattttctggccttcaaagagcacttcagcctggcctggggcggcatattttccctgctggagcatgtggaaaagtttctaaggaattatgcaatacccgaagttaaaataaaggggaataacctggtggcgctcctgcctgagttcgagctgactaataaattgacgaggtacgatctgctgtcagtcctcgaggatcctgcccacgttcagatgcttattaacctgcccggccagcgctacaagggccaggacgggaacagtgaagcagcaatgaagatccaagccacctggaaatgctacaaggcacggaaattctttctattttacagacagcagaaatgggcttccggcgtgattgctatcgcatggttgctctactgccacaagacgcgtctgaagaaaatcctcaaagaaagccgacagcgtcatctggagaattttcgtataagggctaaacatcttgctgccaactggaataggatccggaccagtcggcggacaattattcatataccttcccttggctattcccagccagtccgcgaacacattgccgatttcaatacccagcaaaacatgcaattgggcagactctgcgacattttagacgcgaacgtcaacgtaatatatatatgttctcatcacatgaatgacgagctcgtgctgtattacaaaaagattctgtcattacacgctgcagtcaagtccgggaatctcgaggataggtccgatctgcaggaccggttcaagatcatcaccccagaggcagttaatatattcccaatgattgagcagctctcccagttgattaccgaccatctccagattcagcgctggctgttcaagatggattcagaatttagaggtaacgggactgccttctgcgatatccccagctacctgaagtgttacaagtgggtactaaaagaatcctctagatacggattggaagactggaggaagaagtgggcccaggagccagccctagttaaaataagtgaggagcttgcaggcatcctggcccagcacgcccagcctgtgaacgagaagaggttccccacctggaggaagttccttcaaacctttcttagccaaggaggcgtgatcgaggccttcccccccgctgacaacgtcacgaacctgaccgtggatatgctaatcgagccgaatggcaagatctccgtgctcagtacaggtgatcaactgcacgcagagtcacctttcatcagttctgggactactgtccctcaaacaagcgttgacccccaggtgcttacatatttgtgtttacagatcggaaaggcctgccgtatgagggatgtagtaggctattttagcatcgacctagtcacttttattgacccgtccactctggagcaacaggtctgggccacagggcttaacttagcgtacagtgatcagcttgcccttacccaacttacactgtatctgacaaatggccacttggactgctccctttcaacactggaagtacctcggtttgtccctaaagagcggaaaaaaaccaagtgcatgagtgctctgtccatgccaatgctcgctacatcaagatacgccgtcatgaccacccagctgcggcattctaacctgtccttggtttttcactacgtgttcctgcagatctgccgcgcccacgggataggttatgatgtggagaacaataggcgtggaagcccaggtggaccgcacgacctctgcagtccatcacttcaccacccatcaagaaatatctccacctag

SEQ ID NO: 103818 - DNA, 1866 bp, Artificial Sequence
  derived and/or modified sequence
atgaccaaagcaatgaaagtaaagacccccctaagggcactcaagtcgctgtgggattacgatttcctcatatatgatggggtcattgacaatacagcccctgattttctggccttcaaggagcatttttctcttgcctgggggggaattttctccttactggaacatgtggaaaagttcctacggaactacgctatccccgaagtaaaaattaaggggaacaacctggtggcattgttacctgaatttgaactgacaaacaagctgaccagatacgacctcctgagcgtcctggaggatcctgcccatgtacaaatgctcatcaatctgcccggtcagcgctacaaggggcaggacggcaattccgaggctgcaatgaagatccaggccacttggaaatgttacaaagcccgtaagttttttcttttttataggcagcagaagtgggcctccggagtgattgcgatagcatggctactctattgtcacaaaaccagattaaagaaaattctaaaggaatcacggcagcggcatctcgagaatttccgcattcgagcgaaacacttggcagctaattggaatcgaatccgaaccagccgacgcactattattcacataccatcgttgggatattcccagcccgtgcgggaacatattgcagacttcaatacccaacagaacatgcaactcggccgattgtgcgacatccttgacgctaacgtaaacgtcatatacatttgctctcaccatatgaatgatgagttggtgctctactacaagaagattttatctttacatgcggctgtcaagtccgggaacctcgaagaccggagcgacttacaagatcgcttcaaaatcattacgcccgaggctgtaaacatcttcccgatgatagaacagctctcacagctgattacagatcacctccagattcagagatggttgttcaaaatggactcggagtttcgcggaaacggaaccgccttttgcgacataccgagttacctcaagtgctacaagtgggttctgaaagaatcatcccgatatggactggaggattggaggaagaagtgggcacaggagcctgccctggtgaaaattagcgaggaactggcgggaattctggctcagcacgctcagccggttaacgaaaagcggttccccacctggcgaaagttcttgcagaccttcctctcgcaggggggtgttattgaggcctttcctcccgcagataacgtgacaaacttaaccgtagatatgctcattgagcccaatggcaaaattagtgtcctgtctactggcgatcaactacacgctgaatctcccttcatttccagcggaactactgttcctcagacgtcggttgacccacaggtgttaacctatctatgcctccaaataggcaaagcatgtcgcatgagggacgtggtcggttatttctctatcgatctggtaacctttatagacccgtcaaccctcgagcagcaggtttgggccaccggtttgaatctggcgtacagcgaccagctggccctgacacagttaacactatatctaacaaacggacacctcgattgttccttatctaccctagaggtgcccaggtttgttccgaaggaacggaagaagacaaaatgcatgtccgcactgagtatgccgatgttagcaaccagcaggtacgccgtgatgaccactcagctccgacattcaaaccttagcctggtgtttcactatgttttcctgcagatttgtcgcgctcacggcatcgggtacgatgtcgagaacaacaggcgcggttcgccagggggacctcacgacctctgttccccctctctccatcacccttcccggaatatctctacgtag

SEQ ID NO: 103819 - DNA, 1866 bp, Artificial Sequence
  derived and/or modified sequence
atgaccaaggccatgaaggtgaagacccccctgagagccctgaagagcctgtgggactacgacttcctgatctacgacggcgtgatcgacaacaccgcccccgacttcctggccttcaaggagcacttcagcctggcctggggcggcatcttcagcctgctggagcacgtggagaagttcctgagaaactacgccatccccgaggtgaagatcaagggcaacaacctggtggccctgctgcccgagttcgagctgaccaacaagctgaccagatacgacctgctgagcgtgctggaggaccccgcccacgtgcagatgctgatcaacctgcccggccagagatacaagggccaggacggcaacagcgaggccgccatgaagatccaggccacctggaagtgctacaaggccagaaagttcttcctgttctacagacagcagaagtgggccagcggcgtgatcgccatcgcctggctgctgtactgccacaagaccagactgaagaagatcctgaaggagagcagacagagacacctggagaacttcagaatcagagccaagcacctggccgccaactggaacagaatcagaaccagcagaagaaccatcatccacatccccagcctgggctacagccagcccgtgagagagcacatcgccgacttcaacacccagcagaacatgcagctgggcagactgtgcgacatcctggacgccaacgtgaacgtgatctacatctgcagccaccacatgaacgacgagctggtgctgtactacaagaagatcctgagcctgcacgccgccgtgaagagcggcaacctggaggacagaagcgacctgcaggacagattcaagatcatcacccccgaggccgtgaacatcttccccatgatcgagcagctgagccagctgatcaccgaccacctgcagatccagagatggctgttcaagatggacagcgagttcagaggcaacggcaccgccttctgcgacatccccagctacctgaagtgctacaagtgggtgctgaaggagagcagcagatacggcctggaggactggagaaagaagtgggcccaggagcccgccctggtgaagatcagcgaggagctggccggcatcctggcccagcacgcccagcccgtgaacgagaagagattccccacctggagaaagttcctgcagaccttcctgagccagggcggcgtgatcgaggccttcccccccgccgacaacgtgaccaacctgaccgtggacatgctgatcgagcccaacggcaagatcagcgtgctgagcaccggcgaccagctgcacgccgagagccccttcatcagcagcggcaccaccgtgccccagaccagcgtggacccccaggtgctgacctacctgtgcctgcagatcggcaaggcctgcagaatgagagacgtggtgggctacttcagcatcgacctggtgaccttcatcgaccccagcaccctggagcagcaggtgtgggccaccggcctgaacctggcctacagcgaccagctggccctgacccagctgaccctgtacctgaccaacggccacctggactgcagcctgagcaccctggaggtgcccagattcgtgcccaaggagagaaagaagaccaagtgcatgagcgccctgagcatgcccatgctggccaccagcagatacgccgtgatgaccacccagctgagacacagcaacctgagcctggtgttccactacgtgttcctgcagatctgcagagcccacggcatcggctacgacgtggagaacaacagaagaggcagccccggcggcccccacgacctgtgcagccccagcctgcaccaccccagcagaaacatcagcacctag

SEQ ID NO: 103820 - protein, 345 aa, Artificial Sequence
  derived and/or modified sequence
MEDYSKYNAYTDFSSCRLECSGAILAHCNLHLLGSSISPASASRVAGTTGLLNHQWLKETDVPQKSRQLYAIIAEYGSRLYKYQARLRMPKEQLELLKKESQNLENNFRQILFLIEQIDVLKALLRDMKDGMDNNHNWNTHGDPVEDPDHTEEVSNLVNYVLKKLREDQVEMADYALKSAGASIIEAGTSESYKNNKAKLYWHGIGFLNHEMPPDIILQPDVYPGKCWAFPGSQGHTLIKLATKIIPTAVTMEHISEKVSPSGNISSAPKEFSVYGITKKCEGEEIFLGQFIYNKTGTTVQTFELQHAVSEYLLCVKLNIFSNWGHPKYTCLYRFRVHGTPGKHI

SEQ ID NO: 103821 - DNA, 846 bp, Artificial Sequence
  derived and/or modified sequence
tgatacgccatcatcgccgagtacggcagcagactgtacaagtaccaggccagactgagaatgcccaaggagcagctggagctgctgaagaaggagagccagaacctggagaacaacttcagacagatcctgttcctgatcgagcagatcgacgtgctgaaggccctgctgagagacatgaaggacggcatggacaacaaccacaactggaacacccacggcgaccccgtggaggaccccgaccacaccgaggtgctggacgaggaggtgagcaacctggtgaactacgtgctgaagaagctgagagaggaccaggtggagatggccgactacgccctgaagagcgccggcgccagcatcatcgaggccggcaccagcgagagctacaagaacaacaaggccaagctgtactggcacggcatcggcttcctgaaccacgagatgccccccgacatcatcctgcagcccgacgtgtaccccggcaagtgctgggccttccccggcagccagggccacaccctgatcaagctggccaccaagatcatccccaccgccgtgaccatggagcacatcagcgagaaggtgagccccagcggcaacatcagcagcgcccccaaggagttcagcgtgtacggcatcaccaagaagtgcgagggcgaggagatcttcctgggccagttcatctacaacaagaccggcaccaccgtgcagaccttcgagctgcagcacgccgtgagcgagtacctgctgtgcgtgaagctgaacatcttcagcaactggggccaccccaagtacacctgcctgtacagattcagagtgcacggcacccccggcaagcacatctag

SEQ ID NO: 103822 - DNA, 1038 bp, Artificial Sequence
  derived and/or modified sequence
atggaggactacagcaagtacaacgcctacaccgacttcagcagctgcagactggagtgcagcggcgccatcctggcccactgcaacctgcacctgctgggcagcagcatcagccccgccagcgccagcagagtggccggcaccaccggcctgctgaaccaccagtggctgaaggagaccgacgtgccccagaagagcagacagctgtacgccatcatcgccgagtacggcagcagactgtacaagtaccaggccagactgagaatgcccaaggagcagctggagctgctgaagaaggagagccagaacctggagaacaacttcagacagatcctgttcctgatcgagcagatcgacgtgctgaaggccctgctgagagacatgaaggacggcatggacaacaaccacaactggaacacccacggcgaccccgtggaggaccccgaccacaccgaggaggtgagcaacctggtgaactacgtgctgaagaagctgagagaggaccaggtggagatggccgactacgccctgaagagcgccggcgccagcatcatcgaggccggcaccagcgagagctacaagaacaacaaggccaagctgtactggcacggcatcggcttcctgaaccacgagatgccccccgacatcatcctgcagcccgacgtgtaccccggcaagtgctgggccttccccggcagccagggccacaccctgatcaagctggccaccaagatcatccccaccgccgtgaccatggagcacatcagcgagaaggtgagccccagcggcaacatcagcagcgcccccaaggagttcagcgtgtacggcatcaccaagaagtgcgagggcgaggagatcttcctgggccagttcatctacaacaagaccggcaccaccgtgcagaccttcgagctgcagcacgccgtgagcgagtacctgctgtgcgtgaagctgaacatcttcagcaactggggccaccccaagtacacctgcctgtacagattcagagtgcacggcacccccggcaagcacatctag

SEQ ID NO: 103823 - DNA, 846 bp, Artificial Sequence
  derived and/or modified sequence
tgatacgctataatcgcggaatatgggtcccggttatacaaataccaagcgcggttgcggatgccaaaggagcaactggagctgctgaagaaagaatcgcaaaacctcgaaaacaatttcagacagatcctttttctcatcgagcagatcgatgtgctcaaggcactgctgagggacatgaaagacggcatggataataaccacaattggaatacgcatggggaccccgtggaagatccagatcacactgaagttctggacgaggaggtgagcaaccttgtcaattatgtcctgaagaaactgcgcgaggaccaggttgagatggctgattatgcgctgaagtctgcaggagcctctatcatcgaagctggaacaagtgagagctataaaaacaataaagccaagctgtattggcacggaataggctttctgaatcatgaaatgccgcccgacatcattctccaaccagatgtatatcctggaaaatgctgggccttccctggaagtcaaggccacacactgattaagctggcaactaagatcatccctaccgcagtgaccatggagcatatttccgagaaagtgtccccttctggcaacatttcaagcgctcctaaggagttctccgtttacggcatcacgaagaagtgtgaaggagaggaaatatttctggggcagtttatttataacaaaaccggtactacagttcaaactttcgaactgcagcatgctgtgtctgagtaccttctgtgcgtgaagttaaatatcttctcaaattgggggcaccccaagtatacctgcctttatcggtttcgcgtccacggaactccaggaaaacacatctag

SEQ ID NO: 103824 - DNA, 1038 bp, Artificial Sequence
  derived and/or modified sequence
atggaagactattctaagtataacgcctacacagatttcagttcctgcaggctggaatgctcgggagcaatacttgcccactgtaatctgcacctgctcggctcctcaatttccccagcttcggcttccagagtggccggcaccacaggactcttgaatcaccaatggttgaaagaaaccgatgtaccccagaagagccgacaattgtacgcaattatcgctgaatatgggagtcgcttatacaagtatcaggcccggctgagaatgcctaaggagcagctcgagcttctcaagaaggaaagccagaaccttgaaaacaactttcggcagatcctgtttctcatcgagcaaatcgacgttctaaaggccttacttagggacatgaaggatggaatggataataaccacaactggaatactcacggggatcccgtcgaagatcctgatcacacggaggaagtctccaacttggtgaactacgttcttaaaaagctacgagaagaccaggtcgaaatggctgactacgcccttaagagtgccggggcctccattatcgaagctgggactagcgaatcttataagaacaacaaagccaagctgtactggcacgggatcggatttttaaaccatgaaatgcctccggacatcattctgcagccagacgtgtaccctggaaaatgttgggccttccccggaagtcaggggcatacccttatcaagctggccaccaaaatcatcccaacagccgtgactatggaacatataagtgaaaaagtgtctccttccgggaatatttcttccgcgccgaaagaattttctgtttatggaataacaaagaagtgtgagggagaagagatcttcctcggccagttcatttataataagacaggaacaacagtgcagacatttgagctccagcacgcagtgtccgagtaccttttatgcgtcaaactaaatatcttctcgaactggggacatcctaagtatacctgtttgtatcggttccgtgtgcacggcacgcctggcaagcatatctag

SEQ ID NO: 103825 - DNA, 846 bp, Artificial Sequence
  derived and/or modified sequence
tgatatgccatcatcgccgagtatggcagccggctgtacaagtaccaggcccggctgaggatgcccaaggagcagctggagctgctgaagaaggagagccagaacctggagaacaacttccggcagatcctcttcctgattgagcagattgatgtgctgaaggccctgctgcgggacatgaaggatggcatggacaacaaccacaactggaacacccatggagaccctgtggaggaccctgaccacacagaggtgctggatgaggaggtgagcaacctggtgaactacgtgctgaagaagctgcgggaggaccaggtggagatggctgactatgccctgaagtctgctggggccagcatcattgaagctggcaccagcgagagctacaagaacaacaaggccaagctgtactggcatggaattggcttcctgaaccacgagatgcccccagacatcatcctgcagccagatgtgtacccaggcaagtgctgggccttccctggcagccagggccacaccctcatcaagctggccaccaagatcatccccacagctgtgaccatggagcacatcagcgagaaggtgagccccagcggcaacatcagcagcgcccccaaggagttctctgtgtatggcatcaccaagaagtgtgagggggaggagatcttcctgggccagttcatctacaacaagacaggcaccaccgtgcagacctttgagctgcagcacgctgtgtctgagtacctgctgtgtgtgaagctgaacatcttcagcaactggggccaccccaagtacacctgcctgtaccgcttccgggtgcacggcaccccaggcaagcacatctag

SEQ ID NO: 103826 - DNA, 1038 bp, Artificial Sequence
  derived and/or modified sequence
atggaggactacagcaagtacaatgcctacacagacttcagcagctgccgcctggagtgcagcggggccatcctggcccactgcaacctgcacctgctgggcagcagcatcagccctgccagcgccagccgggtggccggcaccaccggcctgctgaaccaccagtggctgaaggagacagatgtgccccagaagagccggcagctgtatgccatcatcgccgagtatggcagccggctgtacaagtaccaggcccggctgaggatgcccaaggagcagctggagctgctgaagaaggagagccagaacctggagaacaacttccggcagatcctcttcctgattgagcagattgatgtgctgaaggccctgctgcgggacatgaaggatggcatggacaacaaccacaactggaacacccatggagaccctgtggaggaccctgaccacacagaggaggtgagcaacctggtgaactacgtgctgaagaagctgcgggaggaccaggtggagatggctgactatgccctgaagtctgctggggccagcatcattgaagctggcaccagcgagagctacaagaacaacaaggccaagctgtactggcatggaattggcttcctgaaccacgagatgcccccagacatcatcctgcagccagatgtgtacccaggcaagtgctgggccttccctggcagccagggccacaccctcatcaagctggccaccaagatcatccccacagctgtgaccatggagcacatcagcgagaaggtgagccccagcggcaacatcagcagcgcccccaaggagttctctgtgtatggcatcaccaagaagtgtgagggggaggagatcttcctgggccagttcatctacaacaagacaggcaccaccgtgcagacctttgagctgcagcacgctgtgtctgagtacctgctgtgtgtgaagctgaacatcttcagcaactggggccaccccaagtacacctgcctgtaccgcttccgggtgcacggcaccccaggcaagcacatctag

SEQ ID NO: 103827 - DNA, 846 bp, Artificial Sequence
  derived and/or modified sequence
tgatacgccatcatcgccgagtacggcagccggctgtacaagtaccaagctcgattaaggatgccaaaagagcagctggagctgcttaaaaaagagagccagaacctcgaaaataatttccggcagatcttgttcctcatcgaacagatcgatgtactgaaagctctccttagggacatgaaagatggaatggacaataaccacaactggaacacccatggcgaccccgtcgaagatccagaccatactgaggtgctcgacgaggaagtcagcaatctagtgaattatgtcctgaagaagctcagagaagatcaagtagagatggccgactatgccctgaagtccgctggggcctcaataatcgaggccggtactagcgagtcctataaaaataataaggcaaagttgtattggcacggcatcggttttctgaaccacgagatgccccctgatatcatactccagccagatgtctatccaggaaagtgctgggcttttcctgggtcccaggggcataccctgataaagctggccacaaaaatcatccccaccgctgttaccatggaacacatttccgaaaaggtgagtccaagcggcaacatttcttcggcacctaaggagttctcagtctacggaatcaccaagaaatgcgaaggggaagagatatttctgggacaattcatatacaacaagacgggcactacagtccagacattcgaactacagcacgccgtgtccgaatacttactctgtgtgaaactgaacatctttagtaattggggtcaccctaagtacacttgcctctacaggtttagagtgcacggtacccctgggaagcatatatag

SEQ ID NO: 103828 - DNA, 1038 bp, Artificial Sequence
  derived and/or modified sequence
atggaggactacagcaagtacaacgcctacaccgacttcagcagctgtcgtttggagtgtagcggggctattctggctcactgcaatctccacctgcttggcagtagcatttcaccagctagcgcttcaagggttgccgggaccacagggctgcttaatcaccagtggctcaaagaaaccgacgtcccccaaaagtcacgccagctgtacgcgattattgctgaatatggaagtaggctctataagtaccaggcgagattgcgcatgccaaaggagcaattggagctgttgaaaaaggaaagccagaatctcgaaaacaactttaggcagattctcttccttatcgagcagatagatgttcttaaggcgctgctgcgagatatgaaggatgggatggataacaatcacaactggaacactcacggggacccagttgaagatccagatcacaccgaggaggtgtctaatctggtgaactacgtcctgaagaaactgagggaggaccaggtggagatggccgactatgccttgaagtccgcaggggcttccataatcgaggccggaacctccgaatcttataagaataataaggcgaagctgtactggcacgggattggtttccttaatcacgaaatgccacccgacatcatcttgcagccagatgtttaccctgggaagtgctgggcttttccaggatcccagggtcatacgctgattaagctggcgaccaagatcattccaactgctgtgacaatggagcacatttcagagaaagtttcgccctcgggcaacattagtagcgctccaaaggaatttagtgtgtatggtattacaaagaagtgtgagggcgaggagatcttcttgggtcagttcatatacaacaagacagggaccaccgtgcagaccttcgaattgcagcatgccgtgtccgaatacctgctgtgcgtgaagctgaatattttcagtaactggggccaccccaaatatacctgcctatatcgtttcagagtgcatggcactccaggcaagcacatatag

SEQ ID NO: 103829 - DNA, 846 bp, Artificial Sequence
  derived and/or modified sequence
taatacgcaattatcgcggagtatgggagccggctgtataagtatcaggccagactgagaatgcctaaggagcagctggaactgctgaaaaaggagtcccagaatcttgagaataactttagacaaatcctgttcctgatcgaacagatagatgtgctcaaggccctactccgcgatatgaaggatggcatggacaacaatcataactggaacacccacggcgatcccgtggaagatcccgaccatacagaggtgctggatgaggaggtgagcaatctggtgaattacgtcctgaagaagttacgcgaggatcaagtggagatggccgattacgctctgaaatccgctggcgctagcatcattgaagcagggacttcagagtcatataagaacaacaaggcaaaactgtactggcacgggatcggttttctgaatcatgagatgccaccggacatcattcttcaacccgatgtctaccccggaaaatgctgggcctttcctggctcccaggggcatacgctgataaaattagctaccaagataattcccacagctgtaaccatggagcacatctctgagaaagtgtccccgtcaggcaatatctctagcgccccaaaggagttttctgtgtatggtattacaaagaaatgcgagggggaggagatatttttgggccagttcatctacaataagacaggtaccacggtgcaaacatttgagctgcaacatgcagtgagcgaatatctcctttgtgtgaagttgaatatcttttccaactggggacaccccaagtacacgtgtttatacaggtttcgcgtgcacgggacccctggcaaacacatctag

SEQ ID NO: 103830 - DNA, 1038 bp, Artificial Sequence
  derived and/or modified sequence
atggaggactattccaaatataacgcttataccgatttctcttcctgtcggctggagtgctccggtgcgatcctggcacactgcaatctgcatctgctcggctcctcaatatctccagcatcagcttccagggttgctggaacaaccgggttattgaaccatcaatggctcaaggaaaccgacgttcctcaaaaatcaagacagctctatgctatcatcgccgaatacggttcgaggttgtacaaataccaggcaagattgcggatgccaaaggaacagctcgagctgctaaagaaagagtctcaaaatcttgagaacaactttcgtcagatattgtttctgattgaacaaatcgatgtgttaaaagctctcctgagggacatgaaagacggaatggacaacaatcataattggaacacccacggcgacccggtcgaagatccagatcacacagaggaggtgtcgaatttggttaattacgtactcaaaaagctgcgggaggatcaggtggaaatggcagactacgccctgaaatccgctggagcgtcaataatcgaagccggaaccagcgagagttataaaaacaacaaagccaagctttactggcatgggatcgggtttctgaatcatgaaatgcctccagatatcattctgcagcccgatgtataccccggaaagtgctgggccttcccagggtcccaggggcacaccctgattaaactggccaccaagattattcccacagccgtgacaatggagcatatttcagagaaggtgtcccctagtggtaacatctcctcagcacctaaagaattttctgtgtacggtatcacaaagaagtgcgaaggagaggaaatcttcttgggccagtttatatacaacaaaacaggtaccaccgtgcagactttcgagctccagcatgccgtgagcgagtacctgctgtgcgtcaagcttaacatcttttcaaactggggacacccaaaatatacttgcctatatcgcttcagggtccacggtacacctggcaagcacatatag

SEQ ID NO: 103831 - DNA, 1027 bp, Artificial Sequence
  derived and/or modified sequence
tatatgccataattgcagaatatggttcaaggctttataaatatcaggccagacttcgtatgcctaaagagcaactggaacttttaaagaaggaaagccagaatctggaaaacaattttcgtcaaattctatttttgatcgaacaaatagatgtcctgaaggcattgctaagagatatgaaggatggtatggacaataatcacaactggaacacccatggagaccctgtggaggacccggaccacacagaggtcctggatgaggaagtgtcaaacttggtcaattatgtacttaaaaagttgagagaagaccaagtcgagatggctgattatgccctgaagtcggccggagcctccatcattgaagctgggacctcagaaagttataaaaataataaagcaaaattgtactggcatgggataggtttcctaaatcatgaaatgcctccagatattattcttcagccggatgtctaccctggaaagtgctgggcttttccaggttcccagggtcataccctaatcaagcttgctacaaagatcataccaactgctgttaccatggagcacatctcagagaaggtgtctccgtcaggaaacatctccagtgcacccaaggaattttctgtctatggcatcacaaaaaaatgtgaaggagaagaaattttcctaggtcagtttatatataacaaaacaggaaccaccgttcaaacatttgaactccagcatgcagtttctgaatatttattatgtgtgaaacttaatatctttagcaactggggacacccgaagtatacttgtttatatcgattcagggtccatggcacaccaggcaagcacatctagaagagttggtacagaaggccatgccacatgtccagaatattcaagaatgcttattctcttagatgataccgcacccataggaattgagaattgggagtgggaagaaaacctcaaagtggttcatacttgcctgtaaaaagtaaatgcattttactaataaaaaaatatggaagtaaattaaa

SEQ ID NO: 103832 - DNA, 1456 bp, Artificial Sequence
  derived and/or modified sequence
acaaaacaaatttagaaactgtatgtatagcttcatgtttttcataaaataggaatgaggacaaatgttgctcttcatcctaccagctgtttgttctttggtaggggatcatgagtggaaaaacaaaggcaagaagggctgccatgttttttagacgttgctctgaagacgccagcggtagcgccagtggcaatgctttgttatcagaggacgaaaatcctgatgcgaatggggtaactcgatcatggaagattattctaagtacaatgcttacactgacttttcttcttgtaggctggagtgcagtggtgcgatcttggctcactgcaacctccacctcctgggttcaagcatttctcctgcctcagcctcccgagtagctgggaccacaggactcctaaatcatcagtggcttaaagaaacagatgttcctcagaaatccagacaattatatgccataattgcagaatatggttcaaggctttataaatatcaggccagacttcgtatgcctaaagagcaactggaacttttaaagaaggaaagccagaatctggaaaacaattttcgtcaaattctatttttgatcgaacaaatagatgtcctgaaggcattgctaagagatatgaaggatggtatggacaataatcacaactggaacacccatggagaccctgtggaggacccggaccacacagaggaagtgtcaaacttggtcaattatgtacttaaaaagttgagagaagaccaagtcgagatggctgattatgccctgaagtcggccggagcctccatcattgaagctgggacctcagaaagttataaaaataataaagcaaaattgtactggcatgggataggtttcctaaatcatgaaatgcctccagatattattcttcagccggatgtctaccctggaaagtgctgggcttttccaggttcccagggtcataccctaatcaagcttgctacaaagatcataccaactgctgttaccatggagcacatctcagagaaggtgtctccgtcaggaaacatctccagtgcacccaaggaattttctgtctatggcatcacaaaaaaatgtgaaggagaagaaattttcctaggtcagtttatatataacaaaacaggaaccaccgttcaaacatttgaactccagcatgcagtttctgaatatttattatgtgtgaaacttaatatctttagcaactggggacacccgaagtatacttgtttatatcgattcagggtccatggcacaccaggcaagcacatctagaagagttggtacagaaggccatgccacatgtccagaatattcaagaatgcttattctcttagatgataccgcacccataggaattgagaattgggagtgggaagaaaacctcaaagtggttcatacttgcctgtaaaaagtaaatgcattttactaataaaaaaatatggaagt

SEQ ID NO: 103833 - DNA, 322 bp, Artificial Sequence
  derived and/or modified sequence
caattaccggagtggaggcagggcccaggcagcactgccctccaagatcttcccttgggcttttcagcagtaaggggacatgcaccccaagggcctccacttggcctgaccttgctgcgggggctctctgtccccaggaacagtagagatggcaagcttatcgagaccctctctgcccagctgcctctgctccttcctcctcctcctcctcctccaagtgtcttccagctatgcaggattggttgcagtggcacgatcatggctcattgcagcctccacctcccaggctcaagtgatcctcctgactcagcctcttgaatag

SEQ ID NO: 103834 - protein, 172 aa, Artificial Sequence
  derived and/or modified sequence
MLAERRRKQKWAVDPQNTAWSNDDSKFGQRMLEKMGWSKGKGLGAQEQGATDHIKVQVKNNHLGLGATINNEDNWIAHQDDFNQLLAELNTCHGQETTDSSDKKEKKSFSLEEKSKISKNRVHYMKFTKGRCQSLHSRGERNHDNQRLHHPGVLCQADGSTEEQAPGSSSRV

SEQ ID NO: 103835 - protein, 174 aa, Artificial Sequence
  derived and/or modified sequence
MSMLAERRRKQKWAVDPQNTAWSNDDSKFGQRMLEKMGWSKGKGLGAQEQGATDHIKVQVKNNHLGLGATINNEDNWIAHQDDFNQLLAELNTCHGQETTDSSDKKEKKSFSLEEKSKISKNRVHYMKFTKGRCQSLHSRGERNHDNQRLHHPGVLCQADGSTEEQAPGSSSRV

SEQ ID NO: 103836 - DNA, 519 bp, Artificial Sequence
  derived and/or modified sequence
atgctggccgagagaagaagaaagcagaagtgggccgtggacccccagaacaccgcctggagcaacgacgacagcaagttcggccagagaatgctggagaagatgggctggagcaagggcaagggcctgggcgcccaggagcagggcgccaccgaccacatcaaggtgcaggtgaagaacaaccacctgggcctgggcgccaccatcaacaacgaggacaactggatcgcccaccaggacgacttcaaccagctgctggccgagctgaacacctgccacggccaggagaccaccgacagcagcgacaagaaggagaagaagagcttcagcctggaggagaagagcaagatcagcaagaacagagtgcactacatgaagttcaccaagggcagatgccagagcctgcacagcagaggcgagagaaaccacgacaaccagagactgcaccaccccggcgtgctgtgccaggccgacggcagcaccgaggagcaggcccccggcagcagcagcagagtgtag

SEQ ID NO: 103837 - DNA, 525 bp, Artificial Sequence
  derived and/or modified sequence
atgagcatgctggccgagagaagaagaaagcagaagtgggccgtggacccccagaacaccgcctggagcaacgacgacagcaagttcggccagagaatgctggagaagatgggctggagcaagggcaagggcctgggcgcccaggagcagggcgccaccgaccacatcaaggtgcaggtgaagaacaaccacctgggcctgggcgccaccatcaacaacgaggacaactggatcgcccaccaggacgacttcaaccagctgctggccgagctgaacacctgccacggccaggagaccaccgacagcagcgacaagaaggagaagaagagcttcagcctggaggagaagagcaagatcagcaagaacagagtgcactacatgaagttcaccaagggcagatgccagagcctgcacagcagaggcgagagaaaccacgacaaccagagactgcaccaccccggcgtgctgtgccaggccgacggcagcaccgaggagcaggcccccggcagcagcagcagagtgtag

SEQ ID NO: 103838 - DNA, 519 bp, Artificial Sequence
  derived and/or modified sequence
atgctggcagagcggcggagaaaacagaaatgggctgtggacccccagaacacagcatggtccaacgacgattccaagttcggtcagagaatgctcgaaaagatgggctggtctaagggcaaaggactgggtgctcaggagcagggagcaactgatcatattaaagtccaggtgaagaacaatcacctgggccttggcgctaccataaataacgaggataactggatagctcaccaagacgatttcaaccaactgctggcggaattaaatacctgtcacggccaagaaaccactgacagcagtgataaaaaggagaagaaatcgttcagcctcgaagagaaatcaaagatctcaaagaatcgtgtgcattatatgaagttcactaaaggtcggtgtcagtctctgcattccaggggggaaaggaatcacgataatcagcggttgcaccatcccggggtgctttgccaggccgatggcagcactgaggaacaagccccagggtcctctagtcgcgtgtag

SEQ ID NO: 103839 - DNA, 525 bp, Artificial Sequence
  derived and/or modified sequence
atgagtatgctcgcagagaggagacgaaagcagaaatgggccgttgatccgcagaacaccgcttggagcaatgacgatagcaaattcgggcagagaatgctcgagaagatgggctggtcaaaaggtaaggggctgggcgctcaagagcagggtgctaccgaccacatcaaggtacaagtgaagaacaaccatctgggccttggggctacgatcaataacgaagacaattggatcgctcaccaagatgactttaatcagcttctggcagagctcaatacatgccacgggcaggaaaccaccgattctagtgacaagaaggagaaaaaatcttttagcctggaggagaagtccaaaattagtaagaacagagtgcactacatgaaattcactaaagggcgctgtcagagcctgcactccaggggggagagaaaccacgacaaccagaggctccatcatccaggagttctctgtcaggccgatggtagcactgaagagcaggcccctggctctagtagcagagtctag

SEQ ID NO: 103840 - DNA, 519 bp, Artificial Sequence
  derived and/or modified sequence
atgctggccgagaggaggaggaagcagaagtgggccgtggacccccagaacacagcctggagcaatgatgacagcaagtttggccagaggatgctggagaagatgggctggagcaagggcaagggcctgggcgcccaggagcagggcgccacagaccacatcaaggtgcaggtgaagaacaaccacctgggcctgggcgccaccatcaacaatgaagacaactggatcgcccaccaggatgacttcaaccagctgctggccgagctgaacacctgccacggccaggagaccacagacagcagtgacaagaaggagaagaagagcttcagcctggaggagaagagcaagatcagcaagaacagagtgcactacatgaagttcaccaagggccgctgccagagcctgcacagcagaggagagagaaatcatgacaaccagaggctgcaccaccctggggtgctgtgccaggctgatggcagcacagaggagcaggcccctggcagcagcagccgggtgtag

SEQ ID NO: 103841 - DNA, 525 bp, Artificial Sequence
  derived and/or modified sequence
atgtccatgctggccgagaggaggaggaagcagaagtgggccgtggacccccagaacacagcctggagcaatgatgacagcaagtttggccagaggatgctggagaagatgggctggagcaagggcaagggcctgggcgcccaggagcagggcgccacagaccacatcaaggtgcaggtgaagaacaaccacctgggcctgggcgccaccatcaacaatgaagacaactggatcgcccaccaggatgacttcaaccagctgctggccgagctgaacacctgccacggccaggagaccacagacagcagtgacaagaaggagaagaagagcttcagcctggaggagaagagcaagatcagcaagaacagagtgcactacatgaagttcaccaagggccgctgccagagcctgcacagcagaggagagagaaatcatgacaaccagaggctgcaccaccctggggtgctgtgccaggctgatggcagcacagaggagcaggcccctggcagcagcagccgggtgtag

SEQ ID NO: 103842 - DNA, 519 bp, Artificial Sequence
  derived and/or modified sequence
atgctggccgagcggcggcggaagcagaagtgggccgtggacccccagaacactgcttggtccaacgacgacagtaagtttggccagagaatgctagaaaagatgggatggagcaaagggaagggcctgggcgctcaggaacagggagctaccgatcacatcaaggtacaagttaaaaataaccacttaggcctgggggctaccattaacaacgaggataattggattgcccaccaagatgacttcaatcagctccttgccgagctgaacacgtgtcatggccaggagacaacagactcctctgataaaaaggagaagaagagtttctccctagaagagaaaagcaagatatccaagaatcgcgttcattacatgaagttcacaaagggcaggtgtcagtcattgcatagccgcggcgaaaggaaccacgacaaccaaagacttcaccatcccggagtcttatgtcaggcagatggcagcacagaggagcaggcgccggggagttcaagtcgcgtttag

SEQ ID NO: 103843 - DNA, 525 bp, Artificial Sequence
  derived and/or modified sequence
atgagcatgctggccgagcggcggcggaagcagaagtgggccgtggaccctcaaaacactgcgtggtcgaatgatgactctaaattcggtcaaaggatgcttgaaaaaatgggctggtccaaaggaaaggggcttggcgcgcaggaacaaggcgctaccgaccatattaaggtccaggttaagaacaaccaccttggactgggtgccactatcaataatgaagacaattggattgcgcaccaggatgattttaaccagctgctggcggaactgaacacttgtcacgggcaagaaactactgatagtagcgataaaaaggaaaagaaatcctttagcctggaagagaagtctaagattagcaagaaccgggtgcactatatgaaattcacaaagggtagatgccagagtctccactcccgcggggagcggaatcacgataatcaacggctgcaccatcccggggtgttgtgtcaggcagatggcagcaccgaggagcaagctcctggttcctctagtagggtgtag

SEQ ID NO: 103844 - DNA, 519 bp, Artificial Sequence
  derived and/or modified sequence
atgctcgccgagaggagaagaaagcagaaatgggctgtggatccacagaataccgcgtggagcaacgacgatagcaagtttggccaacgtatgttggaaaaaatgggctggtctaagggtaagggattaggtgcgcaggaacagggcgcaaccgaccatataaaggtccaagtgaaaaacaaccaccttggacttggcgctaccataaacaacgaggataattggattgcacaccaggatgatttcaaccaactgctagccgaattgaatacatgtcacggacaggaaacgactgactcatcagataaaaaggagaagaagtcattctctttggaggagaagtctaagatatctaaaaatcgggttcattatatgaaattcacaaaaggtcggtgtcagtccctgcattcgcggggagagaggaaccacgacaaccagcgcctgcaccatcccggagtgctttgccaggcggacggctccaccgaagagcaggctccagggtcctcctcccgggtctag

SEQ ID NO: 103845 - DNA, 525 bp, Artificial Sequence
  derived and/or modified sequence
atgtcgatgcttgctgagaggagacgtaagcagaagtgggctgtggacccacaaaataccgcttggtccaatgacgattccaaatttgggcaacggatgctggagaagatgggctggtctaaaggtaaagggctcggtgcccaagaacagggcgcaaccgaccatatcaaggtgcaggttaaaaacaaccacttaggcctaggggctacaattaataacgaggataattggattgcccatcaggacgactttaatcagctcttagcagaacttaatacgtgccacggtcaggagacaactgatagctccgacaaaaaagagaagaaaagctttagcctcgaggagaaatctaaaatctcaaagaatagagtacactacatgaaattcaccaagggtaggtgccagtctttgcactcccgcggtgagcgcaatcacgataaccagcgccttcatcatcccggtgtactctgtcaggctgatggatctactgaggagcaggccccaggctcttcctcgagggtctag

SEQ ID NO: 103846 - DNA, 1466 bp, Artificial Sequence
  derived and/or modified sequence
cgtccgctgcagtccgccggcgagggagttacgcacgtcctgattctcctggagtctccagcccgcccagtggccgcagtcacccaggtccagaggcggcggtatcacaggctctccgacatgtctatgctggctgaacgtcggcggaagcagaagtgggctgtggatcctcagaacactgcctggagtaatgacgattccaagtttggccagcggatgctagagaagatggggtggtctaaaggaaagggtttaggggctcaggagcaaggagccacagatcatattaaagttcaagtgaaaaataaccacctgggactcggagctaccatcaataatgaagacaactggattgcccatcaggatgattttaaccagcttctggccgaactgaacacttgccatgggcaggaaaccacagattcctcggacaagaaggaaaagaaatcttttagccttgaggaaaagtccaaaatctccaaaaaccgtgttcactatatgaaattcacaaaagggcgatgccagtccctccactccagaggagaacgaaaccacgacaaccagcgccttcaccatccaggagtactttgccaagcggatggcagcactgaagaacaagccccaggttccagttccagggtctgacatttctgagacgcaggtggaacgtaaaagggggaagaaaagaaataaagaggccacaggtaaagatgtggaaagttacctccagcctaaggccaagaggcacacggagggaaagcccgagagggccgaggcccaggagcgagtggccaagaagaagagcgcgccagcagaagagcagctcagaggcccctgctgggaccagagttccaaggcctctgctcaggatgcaggggaccatgtgcagccgcctgagggccgggacttcaccctgaagcccaaaaagaggagagggaagaaaaagctgcaaaaaccagtagagatagcagaggacgctacactagaagaaacgctagtgaaaaagaagaagaagaaagattccaaatgaatccttcccagccggggccttccgaccactcagctgtcagggcactgcgggggcagacacctctggcctgaagtcacagcagagttcaccccagagcgcctgggcgcatcttgtggcatgcccatgggctgccgagtcctgccctctcgccacatttcccccaagttacattcccaggaggacctttttaatgttctcaatcgtggctctcagacacaaataaatttttttgtaaactctgagcccttcagcaagagagtttaattataatcattacaaatacatgcattcatgtaagtgtgcacacgtgtgtgtgcatgtgcgcatctgtgtgtgtgtgtgtgtgtcactatctccgtttgctctcggttcccttcaataacaatgaatggtgctttcttctgaaagactcagcctaattaaaggattaagaggc

SEQ ID NO: 103847 - DNA, 1272 bp, Artificial Sequence
  derived and/or modified sequence
cgtccgctgcagtccgccggcgagggagttacgcacgtcctgattctcctggagtctccagcccgcccagtggccgcagtcacccaggtccagaggcggcggtatcacaggctctccgacatgtctatgctggctgaacgtcggcggaagcagaagtgggctgtggatcctcagaacactgcctggagtaatgacgattccaagtttggccagcggatgctagagaagatggggtggtctaaaggaaagggtttaggggctcaggagcaaggagccacagatcatattaaagttcaagtgaaaaataaccacctgggactcggagctaccatcaataatgaagacaactggattgcccatcaggatgattttaaccagcttctggccgaactgaacacttgccatgggcaggaaaccacagattcctcggacaagaaggaaaagaaatcttttagccttgaggaaaagtccaaaatctccaaaaaccgtgttcactatatgaaattcacaaaagggcgatgccagtccctccactccagaggagaacgaaaccacgacaaccagcgccttcaccatccaggagtactttgccaagcggatggcagcactgaagaacaagccccaggttccagttccagggtctgacatttctgagacgcaggtggaacgtaaaagggggaagaaaagaaataaagaggccacaggtaaagatgtggaaagttacctccagcctaaggccaagaggcacacggagggaaagcccgagagggccgaggcccaggagcgagtggccaagaagaagagcgcgccagcagaagagcagctcagaggcccctgctgggaccagagttccaaggcctctgctcaggatgcaggggaccatgtgcagccgcctgagggccgggacttcaccctgaagcccaaaaagaggagagggaagaaaaagctgcaaaaaccagtagagatagcagaggacgctacactagaagaaacgctagtgaaaaagaagaagaagaaagattccaaatgaatccttcccagccggggccttccgaccactcagctgtcagggcactgcgggggcagacacctctggcctgaagtcacagcagagttcaccccagagcgcctgggcgcatcttgtggcatgcccatgggctgccgagtcctgccctctcgccacatttcccccaagttacattcccaggaggacctttttaatgttctcaatcgtggctctcagacacaaataaatttttttgtaaactctga

SEQ ID NO: 103848 - protein, 174 aa, Artificial Sequence
  derived and/or modified sequence
MTELEYPKGSSIMPAAGTMYLTTSTGYPYTYHNGVAYFHTPEVTSVPPPWPSRSVCSSPVMVAQPIYQQPAYHYQATTQYLPGQWQWSVPQPSASSAPFLYLQPSEVIYQPVEIAQDGGCVPPPLSLMETSVPEPYSDHGVQATYHQVYAPSAITMPAPVMQPEPIKTVWSIHY

SEQ ID NO: 103849 - DNA, 525 bp, Artificial Sequence
  derived and/or modified sequence
atgacggaacttgaataccccaagggcagtagcatcatgcccgcagccggcacgatgtacctcactacttccacagggtacccttatacctatcataacggagtggcctatttccatacccctgaggttaccagtgtgccgccaccctggcccagtcgtagtgtttgctccagccctgtgatggttgctcagcccatttaccaacagcccgcttaccactaccaagccaccactcaatacctgcccgggcagtggcaatggtccgtgcctcagcccagtgccagcagcgccccttttttatatctccagcccagcgaagtgatatatcaacccgtcgaaatagctcaggacggtggctgcgtcccacctccgctttctctgatggagacatcagttcccgagccctattccgaccatggagttcaggctacttatcaccaggtgtatgccccaagtgcaatcactatgccggcccccgtgatgcagccagaacccattaagactgtctggtctattcattactag

SEQ ID NO: 103850 - DNA, 525 bp, Artificial Sequence
  derived and/or modified sequence
atgacagagctggagtaccccaagggcagcagcatcatgcctgctgctggcaccatgtacctgaccaccagcacaggctacccctacacctaccacaatggagtggcctacttccacaccccagaggtgacctctgtgcccccaccctggcccagccgctctgtgtgcagcagccctgtgatggtggcccagcccatctaccagcagcctgcctaccactaccaggccaccacccagtacctgcccggccagtggcagtggagcgtgccccagcccagcgccagcagcgcccccttcctgtacctgcagcccagcgaggtgatctaccagcctgtggagatcgcccaggacggcggctgtgtgcccccacccctgagcctgatggagacctctgtgcctgagccctacagcgaccatggagtgcaggccacctaccaccaggtgtatgcccccagcgccatcaccatgcctgcccctgtgatgcagcctgagcccatcaagacagtgtggagcatccactactag

SEQ ID NO: 103851 - DNA, 525 bp, Artificial Sequence
  derived and/or modified sequence
atgaccgagctggagtaccccaagggcagcagcatcatgcccgccgccggcactatgtacctcactacatcgacaggttacccttacacgtaccataacggagtcgcctactttcacacccccgaagttactagtgtgcctccaccatggccctcccggagcgtctgttcaagccctgtgatggtggcacaacccatataccagcaaccagcttaccattaccaagctaccactcaataccttcctggacagtggcaatggagcgtgccccagccgtcagcctcaagtgctcccttcctgtaccttcaacccagtgaggtgatataccagcctgttgagatcgcccaggatgggggttgcgtacctccacccctctcgctgatggagactagtgttcccgagccctacagcgaccatggcgtgcaggccacataccaccaagtttatgccccatccgcgataacaatgcccgcacctgtgatgcagccagaacccataaagacggtctggagcatccattactag

SEQ ID NO: 103852 - DNA, 525 bp, Artificial Sequence
  derived and/or modified sequence
atgaccgaacttgagtaccctaagggcagttcaattatgcctgccgctggcaccatgtatttgactacatcaactgggtacccatatacatatcataatggggtggcgtacttccacacgcctgaagttacatccgttccaccgccatggccaagccgctccgtgtgtagttcaccagtaatggtcgcacagcctatttatcagcagcccgcttatcactatcaggccactactcagtacttgcccggacagtggcagtggtccgtgccacaaccaagcgcatcatctgctccgtttctctatctccagcccagcgaagtaatctaccagccagttgagattgcacaggatggcggatgcgtcccccctcctctctcattaatggaaacttcagtgcccgaaccctatagtgatcacggagtccaagcaacttatcaccaggtttacgcgccatcagccatcaccatgcctgcccctgtgatgcagcctgaaccaatcaagactgtgtggtccatacattactag

SEQ ID NO: 103853 - DNA, 1372 bp, Artificial Sequence
  derived and/or modified sequence
agacgccccggctcggagtcccagggccacagccgaaactcgccctcccgcgcccctctccggcttgcagcgcccgcccgcaccgccacctgccacccgaggcgacgcagtccgcttctccccacccgccaggtggcaggttcagggccggggtccgagcctgcttccctgcagctgccacagccaccctcgccgccagggggcgagagtcccaggcaggacaagcagcgctgctgccttggcgtgaaggtggtttcaaactttaggcttcttttccctaccccgcgtctctgaagagcagagaggaagatggaaaccgagtccgggccgcaaacatcaaaccagatgcaaacagattcattatctccatcccctaatcctgtgtcacctgtgcctttgaataacccaacaagtgccccaagatatggaacagtgatccctaatcgcatctttgtaggaggaattgattttaagacaaacgaaagtgatttaagaaaatttttttcccagtatgggtctgtgaaagaagtgaagattgtaaatgacagagctggagtatccaaagggttctagtataatgccagcagctggaacaatgtatctaacaacttcaactggatatccttatacttaccataatggtgttgcttattttcatactccagaggtaacttcggtcccaccgccttggccttcacgttctgtatgtagctcccctgtgatggtagctcagcccatttatcagcaacctgcatatcactaccaggccaccacacagtatttaccaggacagtggcagtggagtgttcctcagccttctgcctcttctgctccattcttatacctgcaaccttctgaggttatttatcaaccagtggaaattgcacaggatggtggatgtgttcctcctccactgtctctgatggaaacttcagttccagagccttattctgatcatggagttcaagcaacatatcaccaggtttatgctccaagtgccatcactatgcctgcgcctgtgatgcagcctgagccaattaaaacagtgtggagcattcattattaagacaattgggcagctctattccagctcaactgatttcttgtccaatgatccttgcgtggccgagatccagcttcaacgaaccagctagaagctgcccgttgtgaaacttagtgttagttaatacctcaccatactcagttattccactataagctgtctaaatttgatgaaatttgctttttcagctgttctacaaaattatttaggtagatgtggcatgttggttttttatgtgctaacctaactgtaatgaccttttctacaacatgttttatccattccataaataataaccacattgggaat

SEQ ID NO: 103854 - DNA, 525 bp, Artificial Sequence
  derived and/or modified sequence
atgaccgagctggagtaccccaagggcagcagcatcatgcccgccgccggcaccatgtacctgaccaccagcaccggctacccctacacctaccacaacggcgtggcctacttccacacccccgaggtgaccagcgtgccccccccctggcccagcagaagcgtgtgcagcagccccgtgatggtggcccagcccatctaccagcagcccgcctaccactaccaggccaccacccagtacctgcccggccagtggcagtggagcgtgccccagcccagcgccagcagcgcccccttcctgtacctgcagcccagcgaggtgatctaccagcccgtggagatcgcccaggacggcggctgcgtgcccccccccctgagcctgatggagaccagcgtgcccgagccctacagcgaccacggcgtgcaggccacctaccaccaggtgtacgcccccagcgccatcaccatgcccgcccccgtgatgcagcccgagcccatcaagaccgtgtggagcatccactactag

SEQ ID NO: 103855 - DNA, 1270 bp, Artificial Sequence
  derived and/or modified sequence
agatctcgaggttgattctcaaggggaggggccagtgagggcacattgctttggaggagtagtttaataaactctctagtgctggaagttttagcaaacggaggagccttcaaacccggcaacagtccccatctaggtgtttccgtaacacatgcggaattattgctagtggaatttcaggctttctttgttgtttaactcaatgcatcgctaattgtttataatgaacttagatgttgcctccacctgagccttgctattgctaacattaaaatattttgtaggcctggcgcgatggctcccgcctgtaatcccagcactttgggaggccaaggtgggcggatcacgaggtcaggagatcgagaccatcctggccaaaatgcaaacatcaaaccagatgcaaacagattcattatctccatcccctaatcctgtgtcacctgtgcctttgaataacccaacaagtgccccaagatatggaacagtgatccctaatcgcatctttgtaggaggaattgattttaagacaaacgaaagtgatttaagaaaatttttttcccagtatgggtctgtgaaagaagtgaagattgtaaatgacagagctggagtatccaaagggtatggtttcgtcacttttgaaacacaagaagatgcacaaaaaattttacaagaggctgaaaaacttaattataaggataagaagctgaacattggtccagcaataagaaaacaacaagtagggatccctcgttctagtataatgccagcagctggaacaatgtatctaacaacttcaactggatatccttatacttaccataatggtgttgcttattttcatactccagaggtaacttcggtcccaccgccttggccttcacgttctgtatgtagctcccctgtgatggtagctcagcccatttatcagcaacctgcatatcactaccaggccaccacacagtatttaccaggacagtggcagtggagtgttcctcagccttctgcctcttctgctccattcttatacctgcaaccttctgaggttatttatcaaccagtggaaattgcacaggatggtggatgtgttcctcctccactgtctctgatggaaacttcagttccagagccttattctgatcatggagttcaagcaacatatcaccaggtttatgctccaagtgccatcactatgcctgcgcctgtgatgcagcctgagccaattaaaacagtgtggagcattcattattaagacaattgggcagctctattc

SEQ ID NO: 103856 - protein, 718 aa, Artificial Sequence
  derived and/or modified sequence
MMEELHSLDPRRQELLEARFTGVGVSKGPLNSESSNQSLCSVGSLSDKEVETPEKKQNDQRNRKRKAEPYETSQGKGTPRGHKISDYFERRVEQPLYGLDGSAAKEATEEQSALPTLMSVMLAKPRLDTEQLAQRGAGLCFTFVSAQQNSPSSTGSGNTEHSCSSQKQISIQHRQTQSDLTIEKISALENSKNSDLEKKEGRIDDLLRANCDLRRQIDEQQKMLEKYKERLNRCVTMSKKLLIEKSKQEKMACRDKSMQDRLRLGHFTTVRHGASFTEQWTDGYAFQNLIKQQERINSQREEIERQRKMLAKRKPPAMGQAPPATNEQKQRKSKTNGAENETLTLAEYHEQEEIFKLRLGHLKKEEAEIQAELERLERVRNLHIRELKRIHNEDNSQFKDHPTLNDRYLLLHLLGRGGFSEVYKAFDLTEQRYVAVKIHQLNKNWRDEKKENYHKHACREYRIHKELDHPRIVKLYDYFSLDTDSFCTVLEYCEGNDLDFYLKQHKLMSEKEARSIIMQIVNALKYLNEIKPPIIHYDLKPGNILLVNGTACGEIKITDFGLSKIMDDDSYNSVDGMELTSQGAGTYWYLPPECFVVGKEPPKISNKVDVWSVGVIFYQCLYGRKPFGHNQSQQDILQENTILKATEVQFPPKPVVTPEAKAFIRRCLAYRKEDRIDVQQLACDPYLLPHIRKSVSTSSPAGAAIASTSGASNNSSSN

SEQ ID NO: 103857 - DNA, 2157 bp, Artificial Sequence
  derived and/or modified sequence
atgatggaggaacttcattctctggaccctcgcagacaggaactcctcgaagcacggtttactggcgtcggcgtctctaagggccctctgaactcggagtcatctaaccagagtttatgctcagtaggtagcctgtccgataaagaagtcgagacgcccgagaaaaaacagaatgaccagcgcaatcgcaagcgcaaggcagagccgtacgagacctctcagggcaagggcacgccaagggggcacaagatttcagactacttcgagagaagagtggaacagccactgtatggcctggatggttcagcggccaaagaggctaccgaggagcaaagtgctctgcctacgttgatgtcggttatgctcgccaagcccaggctggacaccgagcagttggctcagcgtggagctgggctttgtttcaccttcgtctccgcacagcagaactctccatccagtacaggcagcggcaacaccgagcacagttgcagctctcagaagcagatcagtattcagcatagacagacgcagtctgacctgactatagagaaaatctctgccttagagaacagtaagaatagcgatctcgagaagaaggagggacgcattgatgacctcctccgagcaaactgcgatcttcggcgccagatcgatgaacaacagaagatgctggaaaagtacaaggaacgcttaaaccggtgcgtcactatgagtaagaaactgttaattgagaagagtaagcaggagaagatggcgtgtcgagacaagtccatgcaggaccgcttacggctaggccactttaccacagttcgacacggggcttcattcaccgaacagtggaccgacggatacgccttccagaatctgattaaacagcaggaaaggattaatagtcaacgggaggagattgaaagacagcggaagatgctcgcaaagcgtaagcctcccgctatgggtcaagctccgcccgccaccaacgaacagaaacaacgaaagagtaagacaaatggggccgagaatgagaccttgactctggccgaataccacgagcaggaggaaatctttaagttgcgactgggtcatctgaagaaggaggaggctgagatccaggcagaactggaacgtctggaacgcgtgagaaacctacatataagagagcttaaaagaatccataatgaagataactcgcaattcaaagatcaccctactctcaatgaccggtacctgcttttacacctgctgggccgcggagggtttagcgaggtctacaaggcatttgacttgactgaacagcgatacgtagccgtcaaaattcaccaactgaataagaactggcgagacgagaaaaaagagaactaccataaacatgcttgtagggagtataggatccataaggagctggaccaccctagaatagtcaagctttatgactactttagcctggacactgacagcttctgcactgtcctcgaatactgtgaggggaacgatttagacttttacttaaagcaacacaagctgatgagcgagaaggaggccaggtcaattatcatgcaaatcgttaacgccctgaagtatttgaatgagataaaacctcctataattcactacgatctgaagccggggaatatcctcctggtgaatggcacagcctgtggagaaattaaaatcactgatttcggcttgagcaaaattatggatgatgactcttacaactccgtcgacgggatggagctgacaagtcagggagctgggacatattggtatttgccaccagaatgctttgtcgtcggaaaagaaccacctaagatctccaataaagtggatgtctggagcgttggcgtgatattctaccaatgtctgtatggtcgaaagccattcggccataatcaatctcagcaggatattctgcaggagaatactatactcaaggcaaccgaagtacagtttccgcctaagcctgtcgttacgccggaagccaaggcgtttatcagaaggtgtctggcttataggaaagaggatcgcatcgacgtgcaacagctggcctgtgacccctacctgctgccccacatccggaagtccgtctcaacaagctctcccgccggagcagccatcgcgagtaccagcggtgcaagtaataatagtagttcaaactag

SEQ ID NO: 103858 - DNA, 2157 bp, Artificial Sequence
  derived and/or modified sequence
atgatggaagaacttcactcgcttgacccccggaggcaagagctcctggaggcacgctttactggcgtgggagtgtccaaaggccccctgaactctgagtcttccaatcagtcgctgtgttctgtgggctccctgtctgacaaggaggtagagacccccgaaaaaaaacagaacgaccagcgaaacagaaagcggaaagccgagccatatgagacctcacagggtaagggaacacctcgggggcataagataagcgattacttcgaacgccgggtcgagcagcccctatatggcttggatgggtcggcagccaaagaggccacagaggagcaatcagccctgcccactctcatgagcgtgatgttagctaaacctcggctagataccgaacagctggcccagagaggagctgggctatgttttaccttcgtcagcgcgcagcagaattcaccatcaagcactgggagcggcaacactgagcactcttgcagcagccaaaagcagatctctattcaacatcggcagactcaatccgacttgacaatcgagaaaatcagtgcgctggagaacagcaagaatagtgatctcgagaagaaggagggcaggattgatgacctgctgcgcgctaactgcgatctcagaagacagatcgatgagcagcagaagatgctggaaaagtataaggaacgattaaatagatgtgtgacgatgtctaagaaactgcttatcgaaaaatccaagcaagagaaaatggcctgtcgggataagtctatgcaggataggctgcgactgggacacttcacaaccgtaagacacggtgcctcctttactgaacagtggacagacggctatgcatttcagaacctcatcaaacagcaagaacgcatcaactcccagcgggaagaaattgagaggcagcgcaaaatgctggccaagagaaagccccccgctatggggcaggcccccccagctacaaatgagcagaagcaacggaaaagcaagacgaatggcgccgaaaatgaaacgcttacattagccgagtaccacgagcaggaagagatttttaagcttcgcctcggccatttgaagaaagaggaagccgaaatccaggctgagctggaacggcttgagcgagtgagaaacctgcatatcagagaactcaaacgcattcataatgaggataactcccagttcaaagaccatcccacactgaatgaccggtatctgctgttgcacctcctggggcgcggcggcttctccgaggtgtataaggcattcgatctgacagagcaacgttacgtggctgtgaaaatccatcaactcaataaaaactggagagacgagaagaaggagaactatcacaagcacgcttgccgggagtaccggatccataaagagcttgatcatccacggatagtgaaactatatgactatttctctctggataccgactctttctgtaccgttttggagtactgtgaggggaacgatctcgatttctacctcaagcaacacaagcttatgtccgaaaaggaggctagatcgattataatgcagattgttaacgcactgaaatacctgaacgaaatcaagccgcccatcattcattacgatttgaagcccgggaacattctgctagttaacggtacggcttgtggagaaataaaaattaccgacttcgggctgtccaagatcatggatgacgattcctataattccgttgatggcatggaattaacaagccagggcgccggtacatattggtatctgcctccagagtgttttgtggtcgggaaagaaccccctaagatcagtaataaggttgatgtatggtccgtgggggtcatcttttaccagtgcctctatggaagaaaaccgttcggccataatcaaagccaacaggatattcttcaagagaacacaatattgaaggccacagaagtgcagtttccaccgaagccagtggtaacgccagaggcgaaagcctttatccggcggtgcctcgcctatagaaaagaagaccgcattgacgtgcaacagttggcttgtgatccttatctcctcccacacatcagaaaatccgtgtctacatcttcccccgccggggctgctatcgccagtacaagtggagcaagcaataactcgtcttctaactag

SEQ ID NO: 103859 - DNA, 2157 bp, Artificial Sequence
  derived and/or modified sequence
atgatggaggagctgcacagcctggacccccggcggcaggagctgctggaggcccgcttcaccggggtgggcgtgtccaagggccccctgaacagcgagagcagcaaccagagcctgtgcagcgtgggcagcctgagtgacaaggaggtggagaccccagagaagaagcagaatgaccagaggaacaggaagaggaaggccgagccctatgagaccagccagggcaagggcaccccccggggccacaagatcagtgactactttgagcggcgggtggagcagcccctgtatggcctggatggcagcgctgccaaggaggccacagaggagcagagcgccctgcccaccctgatgtctgtgatgctggccaagccccggctggacacagagcagctggcccagagaggagctggcctgtgcttcacctttgtgtctgcccagcagaacagccccagcagcacaggcagcggcaacacagagcacagctgcagcagccagaagcagatcagcatccagcaccggcagacccagagcgacctgaccatcgagaagatcagcgccctggagaacagcaagaacagcgacctggagaagaaggagggcagaattgatgacctgctgcgggccaactgtgacctgcggcggcagattgatgagcagcagaagatgctggagaagtacaaggagcggctgaacagatgtgtgaccatgagcaagaagctgctgattgagaagagcaagcaggagaagatggcctgccgggacaagtccatgcaggaccggctgcggctgggccacttcaccaccgtgcgccacggggccagcttcacagagcagtggacagatggctacgccttccagaacctgatcaagcagcaggagcgcatcaacagccagcgggaggagattgagcggcagaggaagatgctggccaagaggaagcccccagccatgggccaggcccccccagccaccaatgagcagaagcagaggaagagcaagaccaacggggctgaaaatgagaccctgaccctggccgagtaccacgagcaggaggagatcttcaagctgcggctgggccacctgaagaaggaggaggccgagatccaggccgagctggagcggctggagcgggtgaggaacctgcacatccgggagctgaagaggatccacaatgaagacaacagccagttcaaggaccaccccaccctgaatgaccgctacctgctgctgcacctgctgggccggggcggcttcagcgaggtgtacaaggcctttgacctgacagagcagagatatgtggccgtgaagatccaccagctgaacaagaactggagagatgagaagaaggagaactaccacaagcacgcctgccgggagtaccgcatccacaaggagctggaccacccccgcatcgtgaagctgtatgactacttcagcctggacacagacagcttctgcaccgtgctggagtactgtgagggcaatgacctggacttctacctgaagcagcacaagctgatgtctgagaaggaggcccggagcatcatcatgcagatcgtgaatgccctgaagtacctgaatgagatcaagccacccatcatccactatgacctgaagccaggcaacatcctgctggtgaatggaacagcctgtggggagatcaagatcacagactttggcctgagcaagatcatggatgatgacagctacaacagcgtggatggcatggagctgaccagccagggcgccggcacctactggtacctgcccccagaatgttttgtggtgggcaaggagccccccaagatcagcaacaaggtggatgtgtggagcgtgggcgtcatcttctaccagtgcctgtatggcaggaagcccttcggccacaaccagagccagcaggacatcctgcaggagaacaccatcctgaaggccacagaggtgcagtttcctcccaagcctgtggtgaccccagaggccaaggccttcatccgccgctgcctggcctacagaaaagaagatagaattgatgtgcagcagctggcctgtgacccctacctgctgccccacatcaggaagtctgtgtccaccagcagccctgctggagctgccatcgccagcaccagcggggccagcaacaacagcagcagcaactag

SEQ ID NO: 103860 - DNA, 2157 bp, Artificial Sequence
  derived and/or modified sequence
atgatggaggagctgcacagcctggacccccggcggcaggagctgcttgaagccagatttaccggggttggggtatcaaagggacctctgaatagcgaaagtagtaaccagagcctgtgttccgtcggaagcctcagtgataaagaggtggagaccccggagaagaagcagaatgaccaacggaaccgaaaacgtaaggccgagccctatgagacctcgcaggggaaggggaccccgcggggtcataaaataagtgattacttcgagcggcgggtggagcagccactatacggactcgacggctccgcagctaaggaagcaacagaagagcaaagcgccctgccaaccttgatgagtgtcatgctggccaagccccgcttggacacagagcagttggctcagcggggtgccggactttgtttcaccttcgtgtccgcacagcagaactcaccctcatcaaccggcagcggtaacaccgagcactcctgttcaagtcagaaacagatcagcatccaacacagacagacacaatctgatttaacgatcgagaagatttccgcccttgagaatagtaaaaatagtgaccttgaaaagaaggaggggagaattgatgacctgctgcgggccaactgtgacttgcggaggcagattgacgaacagcagaagatgctggagaagtataaagaaaggctcaacagatgcgtcacgatgtctaaaaagctcctgattgagaagagcaaacaggagaaaatggcttgtcgtgataagagcatgcaggacagattaaggctgggccattttactactgtacgacacggagcgtcattcaccgaacagtggacggacggatacgcattccaaaacttaattaaacagcaagagcggattaattcacaacgcgaggagatagaacggcagaggaagatgctagccaagcgcaagccccctgccatgggccaggcccccccggctacaaacgagcaaaaacagagaaagtccaaaactaacggggctgaaaacgagactttgacattagctgagtatcacgaacaggaagaaattttcaaattacggttggggcatctgaaaaaagaagaggctgagatccaggcggagcttgaacgcctggaacgcgtcagaaacctgcatatccgcgagttaaaaagaatccataatgaggacaattcccaattcaaggatcaccccaccctgaacgacaggtatctgctgctacatcttttgggccggggggggttctctgaggtttacaaggcctttgatctgaccgagcagagatacgtggccgttaagatccatcagctgaacaaaaactggcgcgacgagaaaaaggaaaattatcataagcatgcctgccgagaatacaggattcacaaagaattggaccaccctcgaatcgtgaaactctatgattacttttcgctggataccgactctttctgtaccgtgctggagtactgcgaaggtaatgaccttgacttttacttaaagcaacataaactcatgtcagagaaagaagcgagaagcattatcatgcaaatagtgaatgcccttaaatacctgaatgagatcaaacctccaatcatacactacgacttgaaaccgggaaacattttgctggttaacggaacagcctgtggagaaatcaagataaccgactttggcctctcaaagataatggacgacgactcttataattctgtggacggcatggagctgactagccagggggcagggacctattggtatcttccacccgaatgcttcgtcgttggaaaggaaccccccaagatctctaacaaggtggacgtttggtctgtcggcgttatcttttaccagtgtctctacggcagaaagccttttggccacaatcagtcacagcaggacatcttgcaagagaatacaatcctgaaagctactgaggttcaatttccccctaagcctgttgtgacacccgaagccaaagcctttattcgccgatgtttggcttatcggaaggaagacaggattgacgtgcaacagctcgcctgtgatccttacctgctaccgcacatccgcaaaagtgtcagcactagctcaccggctggggctgctatcgctagcacctccggtgcgagtaataactcatcatccaactag

SEQ ID NO: 103861 - DNA, 2157 bp, Artificial Sequence
  derived and/or modified sequence
atgatggaggagctgcacagcctggacccccggcggcaggagctgcttgaggctaggttcacaggggtcggcgtctctaaaggacctctgaactcagagtctagcaaccagtccctctgctctgtcggcagccttagtgataaagaggttgagacccctgaaaaaaagcaaaacgaccagcggaatcggaaaaggaaagcggagccatacgagacttcacaggggaaaggtacacccaggggtcataagatctccgactactttgagcgccgggttgagcaaccactgtatggcctggatgggtcagctgcaaaagaggccaccgaagaacaatccgccttgcctaccctgatgtcagtgatgctcgcgaagcctagactcgacaccgaacagcttgctcagagaggggccggcctttgcttcacttttgtgagtgcccaacagaacagtccatcttctaccggcagcggtaataccgagcactcttgctctagccagaagcaaatctctatacagcatagacaaacccagtcagatctcacaatcgagaagatcagcgctctagaaaactccaaaaactccgatcttgaaaaaaaagaaggaaggatagatgatctgctgcgtgccaactgtgatcttcgaagacagattgatgaacagcaaaaaatgcttgagaagtacaaagaacggctcaaccggtgtgttaccatgtctaaaaaactgctgatagaaaaatctaaacaggagaaaatggcttgcagggataaatccatgcaagacagactgagattggggcacttcacgaccgtacggcacggcgcttcattcactgaacagtggaccgacggttacgcatttcaaaatctgattaagcaacaggagcgtatcaactcgcagcgggaggagattgagagacagaggaaaatgctggcgaaacggaaaccgcctgccatgggtcaggcaccaccagcaacaaatgaacagaaacagagaaaaagcaagaccaatggtgccgagaacgagacactgacactggcggagtaccatgaacaggaagagatcttcaaacttcgtctcggacacctcaagaaggaagaggctgagatacaggctgagctggagcgcctcgagagggtccgtaatctgcatattcgagagctcaaaagaatccacaatgaggataactcccagtttaaggatcaccctacactcaacgatcgatacctcctgcttcacttgcttggtaggggtggtttctcagaagtgtacaaggctttcgatctgacagagcagcgctacgtcgctgtgaaaattcatcagctgaataagaactggcgtgacgaaaagaaagagaactaccataaacacgcttgtagagagtaccggattcataaagaactagatcatccacggattgtgaaactgtatgactattttagcctagacactgatagcttttgcacggtgctggaatattgcgagggtaatgacttagacttttacctgaagcagcataaactaatgtctgagaaggaggccaggtcaatcatcatgcagatagtgaatgccctgaagtacctgaacgagataaagccacctatcattcattacgatttgaaacctggtaatattctgttggtgaatgggactgcttgcggagagattaaaataaccgacttcggcctgtcaaaaataatggacgatgattcttataattctgtagacggtatggaactgacatctcagggggccggtacatattggtacctccctcccgaatgctttgtggttggaaaagaaccacctaagattagcaacaaggtagacgtctggtccgtgggtgtgatcttctaccagtgtctatacggaaggaaaccattcggccataaccagtcccagcaggacatcctgcaggagaacacaattcttaaggcgactgaagtgcaattcccaccaaaacctgtggtgacccctgaagcaaaagccttcattaggagatgcttagcataccgaaaagaagacagaatagatgtgcagcagctcgcatgcgacccctatctgcttcctcatatcagaaaatcggtatccacctcatccccagcgggggctgccatagccagtaccagcggtgcttcgaataactcctcctctaattag

SEQ ID NO: 103862 - DNA, 5341 bp, Artificial Sequence
  derived and/or modified sequence
gcggccgcccgggcccgggcccgcgtcgggcgcctggctctgtacgcgagcccggggatctgcggccttcgtgccccccctcccccgcccgccctctcgtggagcccggcgccggcggcggctgcccgggcggggggttgcggcgctcaggagaggccccggctccgccccgggcctgcccagggggagagcggagcggtccgcagccgggtcgggtcggggcccctcccgggaggagcgtggagcggcggcggcggcggcggcagcagaaatgatggaagaattgcatagcctggacccacgacggcaggaattattggaggccaggtttactggagtaggtgttagtaagggaccacttaatagtgagtcttccaaccagagcttgtgcagcgtcggatccttgagtgataaagaagtagagactcccgagaaaaagcagaatgaccagcgaaatcggaaaagaaaagctgaaccatatgaaactagccaagggaaaggcactcctaggggacataaaattagtgattactttgagcgacgagtagaacagcccctctatggtttagatggcagtgctgcaaaggaggcaacggaggagcagtctgctctgccaaccctcatgtcagtgatgctagcaaaacctcggcttgacacagagcagctggcgcaaaggggagctggcctctgcttcacttttgtttcagctcagcaaaacagtccctcatctacgggatctggcaacacagagcattcctgcagctcccaaaaacagatctccatccagcacagacagacccagtccgacctcacaatagaaaaaatatctgcactagaaaacagtaagaattctgacttagagaagaaggagggaagaatagatgatttattaagagccaactgtgatttgagacggcagattgatgaacagcaaaagatgctagagaaatacaaggaacgattaaatagatgtgtgacaatgagcaagaaactccttatagaaaagtcaaaacaagagaagatggcgtgtagagataagagcatgcaagaccgcttgagactgggccactttactactgtccgacacggagcctcatttactgaacagtggacagatggttatgcttttcagaatcttatcaagcaacaggaaaggataaattcacagagggaagagatagaaagacaacggaaaatgttagcaaagcggaaacctcctgccatgggtcaggcccctcctgcaaccaatgagcagaaacagcggaaaagcaagaccaatggagctgaaaatgaaacgttaacgttagcagaataccatgaacaagaagaaatcttcaaactcagattaggtcatcttaaaaaggaggaagcagagatccaggcagagctggagagactagaaagggttagaaatctacatatcagggaactaaaaaggatacataatgaagataattcacaatttaaagatcatccaacgctaaatgacagatatttgttgttacatcttttgggtagaggaggtttcagtgaagtttacaaggcatttgatctaacagagcaaagatacgtagctgtgaaaattcaccagttaaataaaaactggagagatgagaaaaaggagaattaccacaagcatgcatgtagggaataccggattcataaagagctggatcatcccagaatagttaagctgtatgattacttttcactggatactgactcgttttgtacagtattagaatactgtgagggaaatgatctggacttctacctgaaacagcacaaattaatgtcggagaaagaggcccggtccattatcatgcagattgtgaatgctttaaagtacttaaatgaaataaaacctcccatcatacactatgacctcaaaccaggtaatattcttttagtaaatggtacagcgtgtggagagataaaaattacagattttggtctttcgaagatcatggatgatgatagctacaattcagtggatggcatggagctaacatcacaaggtgctggtacttattggtatttaccaccagagtgttttgtggttgggaaagaaccaccaaagatctcaaataaagttgatgtgtggtcggtgggtgtgatcttctatcagtgtctttatggaaggaagccttttggccataaccagtctcagcaagacatcctacaagagaatacgattcttaaagctactgaagtgcagttcccgccaaagccagtagtaacacctgaagcaaaggcgtttattcgacgatgcttggcctaccgaaaggaggaccgcattgatgtccagcagctggcctgtgatccctacttgttgcctcacatccgaaagtcagtctctacaagtagccctgctggagctgctattgcatcaacctctggggcgtccaataacagttcttctaattgagactgactccaaggccacaaactgttcaacacacacaaagtggacaaatggcgttcagcagcgggtttggaacatagcgaatccgaatggatctgatgaaacctgtaccaggtgcttttattttcttgcttttttcccatccatagagcatgacagcatcgattctcattgaggagaaaccttgggcagctccggccaggccttgtaggaaaaggccccgcccgaggttccagcgtcaacggccactgtgtgtggctgctctgagtgaggaaaaaattaaaaagaaaaactggttccatgtactgtgaacttgaaaacttgcagactcaggggggtccctgatgcagtgcttcagatgaagaatgtggacttgaaaatacagactgggctagtccagtgtctatatttaaacttgttcttttcttttaataaagtttaggtaacatctcctgaaaagcttgtagcacaaaggctcagctggggatggtgtttgacttcggaggaaaaaagttgctattgcccgttaaaggcactagagttagtgttttatccctaaataatttcaatttttaaaaacatgcagcttccctctccccttttttatttttgaaagaatacatttggtcataaagtgaaacccgtattagcaagtacgtggcaatgttcattccaatcagatgcagctttctcctccgtctggtctcctgtttgcaattgcttccctcatctcagtagggaaaaaattgagtgggagtactgagatgtgtgggtttttgccattggacaaagaatgaggttagaagactgcagcttggagtctctctaggttttcaactatttcttcacaatttgaacacttgacggttgtcccttttaatttatttgaagtgctatttttttaaataaaggttcatctgtccatgcagtcctcttggattctctgaatgtagtaactatgaagctatgccaaaggtaggcagaaaatgggcttgggagccagacactccagggatcagtagttcctacccatagtctttgtgtgcttgctaaatggtgtacatttcttgttaaccacgttattaaaacttgatcagcacataagctttcttctgttagatcttttggcagcaaacaaccttccccccaagcctctgaattttgtgggtgtgtggtggtgtgtgtctgtgtgtgcatgtacacacacactttgtctagctcactttaaaagattcatcaaatggaattttaaaaataatctgaaaagaaatagatatttcaggccgggcctggtggttcacgcctgtaatcccagcactttgggaggccgaggtgggtggatcacgaggtcgggagttcgagatcagtctggtcaacatggtgaaacgccatctctactaaaaatataaaaattagcctggcgtggtggcgtgtgcctctagtcccagctacccgggaggctgaggcaggagaatttctggaacccaggaggcggaggttgcagtgagccgagatggcaccactgcaatccagcctaggcaacagaatgagactctgtctcagaaaaaaaaaaaaaaaaaaaaggagaaatagatgtttcaaatatgaacattcttttggcaccaattttcttttttaatttggttgtttctgagatgtatgatcaactgaagatggagctgaaatgggagacgggtggccccaccgtgcccttgaaacagcagagcactcctcagtagagagggagggagccaagagcctgaacatgtggtcgccagcttggaatgttactgacatatgtggcgagggcttagccagaaatatttaaagatgtagtattccggcctgtgagttgtctgggcagggagggggagtcagaaagggtagagagctctcaaataactcatgactctagtgttcctttcacatgtgaacagtgtcactgatgacacattttctaggaccttcgtttgttttgtggacctgcctcagtctcctcagtatcaggcgatcttaagggaagatggagtgtttcaaattggagagaagttcatgggtaggtatcgtcctgtggaattctgaatgcaaggaagtcaaccccagaggccttggtacccccagctttctaaaactactttattacaatttatatgtatatacacatgcacatataaacgtgtgcatttatgtatgtgtgtatagtaccttttttaaaaaaacatttcctccaagctgctaagcaaagggtctcacaggtcgagcacagtgctgagaggatggtgtctgcataatgaagacatggatgaagctgagaccgtgttcaaactcactgaaaacaatgaagttctattccttttttcttcctctccaatgatcttgcagttgatttgtttgttttttaattttttaacatttttttaacgttgaaaaaatgctgcgtctttctttaagccttcccagtaacttcctgccttttttttccccgtgggcttttaagtgaagctgcaggattttatctttcaatctgccctttctacccttgtcctattgaaaggatgccctcttcccttgcttttttggtctagggcctgtttggagctaactaggcttggctgagtccgggcaagaccttcttccgaggcatggacaagccccagagaacatgcagaacattgacctttccattgactgtctttcaagcagccagtgaaatcactaagtggggttcttccatgacatattttgttaatatgggtttcactttttccaagaatagtcccttgttgccacaatgttgatttactttacacaatgacagtatgtattaatttgtaattaaacccatccagattgttttagccttttcccaatggggtgggggagggaagaaggatattaaaataagttttaagaagc

SEQ ID NO: 103863 - DNA, 2511 bp, Artificial Sequence
  derived and/or modified sequence
aaggaattttctttttgcagcagaaatgatggaagaattgcatagcctggacccacgacggcaggaattattggaggccaggtttactggagtaggtgttagtaagggaccacttaatagtgagtcttccaaccagagcttgtgcagcgtcggatccttgagtgataaagaagtagagactcccgagaaaaagcagaatgaccagcgaaatcggaaaagaaaagctgaaccatatgaaactagccaagggaaaggcactcctaggggacataaaattagtgattactttgagcgacgagtagaacagcccctctatggtttagatggcagtgctgcaaaggaggcaacggaggagcagtctgctctgccaaccctcatgtcagtgatgctagcaaaacctcggcttgacacagagcagctggcgcaaaggggagctggcctctgcttcacttttgtttcagctcagcaaaacagtccctcatctacgggatctggcaacacagagcattcctgcagctcccaaaaacagatctccatccagcacagacagacccagtccgacctcacaatagaaaaaatatctgcactagaaaacagtaagaattctgacttagagaagaaggagggaagaatagatgatttattaagagccaactgtgatttgagacggcagattgatgaacagcaaaagatgctagagaaatacaaggaacgattaaatagatgtgtgacaatgagcaagaaactccttatagaaaagtcaaaacaagagaagatggcgtgtagagataagagcatgcaagaccgcttgagactgggccactttactactgtccgacacggagcctcatttactgaacagtggacagatggttatgcttttcagaatcttatcaagcaacaggaaaggataaattcacagagggaagagatagaaagacaacggaaaatgttagcaaagcggaaacctcctgccatgggtcaggcccctcctgcaaccaatgagcagaaacagcggaaaagcaagaccaatggagctgaaaatgaaacgttaacgttagcagaataccatgaacaagaagaaatcttcaaactcagattaggtcatcttaaaaaggaggaagcagagatccaggcagagctggagagactagaaagggttagaaatctacatatcagggaactaaaaaggatacataatgaagataattcacaatttaaagatcatccaacgctaaatgacagatatttgttgttacatcttttgggtagaggaggtttcagtgaagtttacaaggcatttgatctaacagagcaaagatacgtagctgtgaaaattcaccagttaaataaaaactggagagatgagaaaaaggagaattaccacaagcatgcatgtagggaataccggattcataaagagctggatcatcccagaatagttaagctgtatgattacttttcactggatactgactcgttttgtacagtattagaatactgtgagggaaatgatctggacttctacctgaaacagcacaaattaatgtcggagaaagaggcccggtccattatcatgcagattgtgaatgctttaaagtacttaaatgaaataaaacctcccatcatacactatgacctcaaaccaggtaatattcttttagtaaatggtacagcgtgtggagagataaaaattacagattttggtctttcgaagatcatggatgatgatagctacaattcagtggatggcatggagctaacatcacaaggtgctggtacttattggtatttaccaccagagtgttttgtggttgggaaagaaccaccaaagatctcaaataaagttgatgtgtggtcggtgggtgtgatcttctatcagtgtctttatggaaggaagccttttggccataaccagtctcagcaagacatcctacaagagaatacgattcttaaagctactgaagtgcagttcccgccaaagccagtagtaacacctgaagcaaaggcgtttattcgacgatgcttggcctaccgaaaggaggaccgcattgatgtccagcagctggcctgtgatccctacttgttgcctcacatccgaaagtcagtctctacaagtagccctgctggagctgctattgcatcaacctctggggcgtccaataacagttcttctaattgagactgactccaaggccacaaactgttcaacacacacaaagtggacaaatggcgttcagcagcgggtttggaacatagcgaatccgaatggatctgatgaaacctgtaccaggtgcttttattttcttgcttttttcccatccatagagcatgacagcatcgattctcattgaggagaaaccttgggcagctccggccaggccttgtaggaaaaggccccgcccgaggttccagcgtcaacggccactgtgtgtggctgctctgagtgaggaaaaaattaaaaagaaaaactggttccatgtactgtgaacttgaaaacttgcagactca

SEQ ID NO: 103864 - DNA, 2157 bp, Artificial Sequence
  derived and/or modified sequence
atgatggaagagctccactcactcgatcctagaagacaggagctgttagaggcacgatttacaggtgtcggagtgtcaaaagggcctctgaattccgaatcctccaaccagtctctttgcagtgtaggcagcttgtcagacaaggaggtggagacacccgaaaaaaaacagaacgaccagagaaatcggaagaggaaagctgagccctatgaaactagccagggaaaggggactcctcgcggacacaagataagcgattatttcgaacggcgtgtcgaacagccgttgtatggcctcgatggttcagctgctaaggaggctaccgaggagcagagtgcactccccaccctaatgagcgtcatgctggctaaaccccgactcgacaccgagcagcttgcgcagagaggcgctgggctgtgttttaccttcgtgtcagcccagcagaacagcccgagcagtacgggttccggcaacacggagcattcctgttcatcgcagaagcagattagcatccagcaccgccagacccagagcgatcttacaattgagaagatctctgccctggagaattccaagaactcggatttagagaagaaggagggcagaattgacgatttgcttagggctaactgtgacctgaggcgtcagattgatgaacagcagaagatgcttgaaaaatacaaagaacgattgaaccgttgcgtgaccatgagtaaaaaactcctgatcgagaaatctaaacaggagaagatggcctgtagggacaagagtatgcaggaccgtttacggcttggtcatttcactaccgtgcgacacggtgcttccttcaccgaacaatggactgatgggtacgcatttcagaatctgataaagcagcaggaaagaatcaactcgcagcgggaggagattgagagacagaggaagatgttagccaagcgaaaaccacccgcaatggggcaggccccacctgcaacaaacgagcagaagcagaggaaaagtaaaacaaacggagccgaaaatgaaacactgacccttgcagagtatcacgaacaggaagaaatcttcaaactgagactggggcatttaaagaaggaggaggcggagatacaggcagaactggagcgactggaaagagtgcggaatcttcacatacgcgaacttaagaggattcacaacgaagacaactctcaattcaaagaccaccccacattaaacgacaggtatctcttgttgcatctgctgggaagaggtggattcagcgaagtgtacaaggcgtttgatttgactgagcagaggtatgtcgcagtcaagattcatcagttgaacaaaaactggcgagatgagaagaaggagaattatcacaagcacgcttgtcgcgagtatcggattcacaaagagcttgaccatccgaggatcgttaagctctacgactacttctcactggacactgacagcttctgtacagtgttagagtactgtgagggaaacgacttagatttttacctgaagcaacacaagctgatgtccgaaaaggaggcgcgatctatcattatgcagatcgtaaacgcactcaagtatcttaatgagattaagccaccaattatccactatgatctcaaaccgggtaatatcctcttggtcaatgggacagcttgtggcgaaataaagataaccgattttggactttccaagatcatggatgatgatagctacaattccgtggatggtatggaactgacctctcagggcgctggcacgtactggtaccttcccccagaatgcttcgtcgtggggaaagaaccacctaagatttcaaataaagttgatgtatggtccgtgggcgtgatattctaccaatgtctgtacggcagaaaaccttttgggcataatcagtctcaacaggatatccttcaggagaacacaattttgaaagctacagaggttcagttccctcccaagccggtcgtcacccccgaggctaaagcttttattcgcaggtgtctcgcctatagaaaagaggacagaatcgacgtccagcaacttgcctgtgatccgtacctgctaccacacatacgcaagtccgtgtctacctcaagtccggctggtgctgctatcgcttcaacatccggagcctctaataacagcagtagcaattag

SEQ ID NO: 103865 - DNA, 2157 bp, Artificial Sequence
  derived and/or modified sequence
atgatggaagagcttcattcacttgatccacgaagacaggagctgttagaagcgaggttcactggagtgggggtgagtaaaggcccattaaattctgaatccagcaaccagagcctttgttcagtgggctctttgtcagacaaagaggtagagacccccgaaaaaaaacagaacgaccagcgcaatcggaagagaaaggccgaaccctacgagaccagccagggaaaagggactccccgaggtcacaaaatcagcgattacttcgaaaggagggtggagcaaccactctatggtttggacgggagcgcggcaaaagaggccacggaagagcagagtgctctgcctaccctcatgagcgtgatgctcgccaagccacgactagacaccgaacagctcgcccagcgtggggctggcctgtgctttaccttcgtctccgcacagcagaactccccgtcttccaccgggagcggtaatacggagcactcctgcagttcacagaagcaaatcagtattcaacaccgacagactcagtcagacctgacaattgagaaaatctccgcgctggagaactctaagaactctgacttggaaaagaaggaggggaggattgacgacttgctaagggccaactgcgacctccggagacagatagacgagcaacagaagatgttggaaaaatacaaagaacggttaaatcgatgcgtgaccatgagcaagaagctgctgatcgagaaaagtaagcaggagaaaatggcttgcagggacaaatcaatgcaggatcgcttacgcctgggccacttcacaacagtacgtcacggcgcatctttcacggagcaatggaccgacgggtacgcattccagaatctcataaagcagcaggagcgcattaacagccagcgtgaggaaattgagagacagagaaaaatgttagccaagcgaaagccccctgcgatgggacaggcgccacctgccactaatgaacagaagcagagaaaatccaagacaaatggagcggaaaatgagaccctgaccctcgcggagtaccacgagcaagaggagattttcaagctgcggttggggcacctcaaaaaggaagaggctgaaatccaagccgaactcgagagactggagcgagttaggaatctgcacattcgggaactgaaaaggatccataacgaggacaatagccagttcaaagaccacccaacactcaatgatcgatatctgctgttacatctcctaggccgaggcggattcagcgaagtgtataaggcattcgacctgactgagcagcgctatgtcgcagtgaagatccatcagttgaataagaattggagagatgagaagaaggagaattaccataaacacgcatgtcgcgagtaccgcattcataaggagttggatcatccgagaatcgtcaagctgtatgattacttctccttggataccgacagcttttgcactgtcctcgagtattgtgaggggaatgatctagacttttacctgaaacaacacaagctgatgagcgagaaggaagccagatccataatcatgcagatcgtgaatgccctgaagtacctgaatgaaattaagcccccaatcattcactacgatttaaagcctggcaacatcctgctcgttaacggaacggcttgtggggaaattaagattaccgactttggcctaagcaagattatggacgatgatagctataactcagtcgatggaatggagttgacttcacaaggagcagggacttactggtacctacctcccgaatgctttgtggtgggtaaggagccaccgaaaatctccaataaagtggatgtctggagcgtgggtgtgatcttctaccaatgcctgtacggcagaaagcccttcggacataaccaatctcagcaagatatactgcaggagaacacgatcctgaaggccactgaagtccagtttccccctaaaccagtggtgacccccgaagccaaggctttcatcaggcgttgcctggcctacagaaaagaggatcgcatcgatgttcagcaactggcctgcgatccctacctcttgccacacatccggaaaagtgtcagcacgtccagtcccgcaggcgctgctatcgcgtcaacatccggtgccagcaacaattctagcagtaattag

SEQ ID NO: 103866 - DNA, 2157 bp, Artificial Sequence
  derived and/or modified sequence
atgatggaggagctgcacagcctggaccccagaagacaggagctgctggaggccagattcaccggcgtgggcgtgagcaagggccccctgaacagcgagagcagcaaccagagcctgtgcagcgtgggcagcctgagcgacaaggaggtggagacccccgagaagaagcagaacgaccagagaaacagaaagagaaaggccgagccctacgagaccagccagggcaagggcacccccagaggccacaagatcagcgactacttcgagagaagagtggagcagcccctgtacggcctggacggcagcgccgccaaggaggccaccgaggagcagagcgccctgcccaccctgatgagcgtgatgctggccaagcccagactggacaccgagcagctggcccagagaggcgccggcctgtgcttcaccttcgtgagcgcccagcagaacagccccagcagcaccggcagcggcaacaccgagcacagctgcagcagccagaagcagatcagcatccagcacagacagacccagagcgacctgaccatcgagaagatcagcgccctggagaacagcaagaacagcgacctggagaagaaggagggcagaatcgacgacctgctgagagccaactgcgacctgagaagacagatcgacgagcagcagaagatgctggagaagtacaaggagagactgaacagatgcgtgaccatgagcaagaagctgctgatcgagaagagcaagcaggagaagatggcctgcagagacaagagcatgcaggacagactgagactgggccacttcaccaccgtgagacacggcgccagcttcaccgagcagtggaccgacggctacgccttccagaacctgatcaagcagcaggagagaatcaacagccagagagaggagatcgagagacagagaaagatgctggccaagagaaagccccccgccatgggccaggccccccccgccaccaacgagcagaagcagagaaagagcaagaccaacggcgccgagaacgagaccctgaccctggccgagtaccacgagcaggaggagatcttcaagctgagactgggccacctgaagaaggaggaggccgagatccaggccgagctggagagactggagagagtgagaaacctgcacatcagagagctgaagagaatccacaacgaggacaacagccagttcaaggaccaccccaccctgaacgacagatacctgctgctgcacctgctgggcagaggcggcttcagcgaggtgtacaaggccttcgacctgaccgagcagagatacgtggccgtgaagatccaccagctgaacaagaactggagagacgagaagaaggagaactaccacaagcacgcctgcagagagtacagaatccacaaggagctggaccaccccagaatcgtgaagctgtacgactacttcagcctggacaccgacagcttctgcaccgtgctggagtactgcgagggcaacgacctggacttctacctgaagcagcacaagctgatgagcgagaaggaggccagaagcatcatcatgcagatcgtgaacgccctgaagtacctgaacgagatcaagccccccatcatccactacgacctgaagcccggcaacatcctgctggtgaacggcaccgcctgcggcgagatcaagatcaccgacttcggcctgagcaagatcatggacgacgacagctacaacagcgtggacggcatggagctgaccagccagggcgccggcacctactggtacctgccccccgagtgcttcgtggtgggcaaggagccccccaagatcagcaacaaggtggacgtgtggagcgtgggcgtgatcttctaccagtgcctgtacggcagaaagcccttcggccacaaccagagccagcaggacatcctgcaggagaacaccatcctgaaggccaccgaggtgcagttcccccccaagcccgtggtgacccccgaggccaaggccttcatcagaagatgcctggcctacagaaaggaggacagaatcgacgtgcagcagctggcctgcgacccctacctgctgccccacatcagaaagagcgtgagcaccagcagccccgccggcgccgccatcgccagcaccagcggcgccagcaacaacagcagcagcaactag

SEQ ID NO: 103867 - protein, 172 aa, Artificial Sequence
  derived and/or modified sequence
MAVARAGVLGVQWLQRASRNVMPLGARTASHMTKDMFPGPYPRTPEERAAAAKKYNMRVEDYEPYPDDGMGYGDYPKLPDRSQHERDPWYSWDQPGLRLNWGEPMHWHLDMYNRNRVDTSPTPVSWHVMCMQLFGFLAFMIFMCWVGDVYPVYQPVCRHHFSYNLGFLSALG

SEQ ID NO: 103868 - DNA, 519 bp, Artificial Sequence
  derived and/or modified sequence
atggctgtggctcgtgctggggtgctgggagtgcagtggttgcagcgagccagccgtaatgttatgccactaggggcacgaactgcaagtcatatgaccaaggacatgtttccaggtccataccccagaactcctgaggagcgcgccgctgcagctaagaaatataatatgcgggttgaagattacgagccctaccctgatgatggcatggggtatggagactaccccaagctgcctgacagatcccagcatgagcgagacccctggtacagttgggatcagcctggactgcgccttaattggggcgaaccaatgcattggcatctagacatgtacaatcggaatcgtgtagatacttccccaacccccgtttcctggcacgttatgtgtatgcaactcttcggattcctggcctttatgattttcatgtgttgggtaggagacgtgtatcccgtgtatcagcccgtttgccgccatcatttctcatacaaccttggcttcttaagtgcactgggttag

SEQ ID NO: 103869 - DNA, 519 bp, Artificial Sequence
  derived and/or modified sequence
atggccgttgcaagggcgggggtccttggggtccagtggctgcagagggcgtcgcgaaacgtcatgcctctgggagccaggactgcaagtcacatgactaaggatatgtttcctggaccatatcctcggactcccgaagagagggccgcagctgcaaaaaagtataacatgcgggtggaggactacgagccatacccagatgatggcatgggatatggcgactatccgaaacttcccgaccggtcccaacacgaacgggatccctggtatagctgggaccagcctgggctgcgattaaactggggcgagcctatgcattggcacctagatatgtataacaggaacagggtggacaccagcccgacccctgtctcctggcatgtcatgtgcatgcagctcttcgggttcctcgccttcatgatctttatgtgctgggtcggcgatgtctaccccgtgtaccagcccgtgtgcagacatcacttttcttacaatctggggttcctgagcgccctcggctag

SEQ ID NO: 103870 - DNA, 519 bp, Artificial Sequence
  derived and/or modified sequence
atggctgtggcccgggccggcgtgctgggcgtgcagtggctgcagagggccagcagaaatgtgatgcccctgggcgccaggacagccagccacatgaccaaggacatgtttcctggcccctaccccaggaccccagaggagagagctgctgctgccaagaagtacaacatgagggtggaggactatgagccctacccagatgatggcatgggctacggggactaccccaagctgcctgacaggagccagcacgagcgggacccctggtacagctgggaccagcccggcctgcggctgaactggggcgagcccatgcactggcacctggacatgtacaacagaaacagagtggacaccagccccacccctgtgtcctggcacgtgatgtgcatgcagctgtttggcttcctggccttcatgatcttcatgtgctgggtgggagatgtgtaccctgtgtaccagcctgtgtgccgccaccacttctcctacaacctgggcttcctgagcgccctgggctag

SEQ ID NO: 103871 - DNA, 684 bp, Artificial Sequence
  derived and/or modified sequence
gaagaaggtgaagatggcggtggccagggccggggtcttgggagtccagtggctgcaaagggcatcccggaacgtgatgccgctgggcgcacggacagcctcccacatgaccaaggacatgttcccggggccctatcctaggaccccagaagaacgggccgccgccgccaagaagtataatatgcgtgtggaagactacgaaccttacccggatgatggcatggggtatggcgactacccgaagctccctgaccgctcacagcatgagagagatccatggtatagctgggaccagccgggcctgaggttgaactggggtgaaccgatgcactggcacctagacatgtacaacaggaaccgtgtggatacatcccccacacctgtttcttggcatgtcatgtgtatgcagctcttcggtttcctggctttcatgatattcatgtgctgggtgggggacgtgtaccctgtctaccagcctgtgtgtaggcaccacttctcttacaatttaggctttctctctgccttgggctgagtgaggaagaggagtgctgttcctgccttcctagcccagctgggtctgaccagaggctactgtgtacccatttaccatgcgtgattgttaactcagagtggggtgtagccaggtattgactgaatgtatgttcttgctgacctgtgtttttt

SEQ ID NO: 103872 - DNA, 1234 bp, Artificial Sequence
  derived and/or modified sequence
gtgcagaagggaaacgtgaagaaggtgaagatggcggtggccagggccggggtcttgggagtccagtggctgcaaagggcatcccggaacgtgatgccgctgggcgcacggacagcctcccacatgaccaaggacatgttcccggggccctatcctaggaccccagaagaacgggccgccgccgccaagaagtataatatgcgtgtggaagactacgaaccttacccggatgatggcatggggtatggcgactacccgaagctccctgaccgctcacagcatgagagagatccatggtatagctgggaccagccgggcctgaggttgaactggggtgaaccgatgcactggcacctagacatgtacaacaggaaccgtgtggatacatcccccacacctgtttcttggcatgtcatgtgtatgcagctcttcggtttcctggctttcatgatattcatgtgctgggtgggggacgtgtaccctgtctaccagcctgtgtgtaggcaccacttctcttacaatttaggctttctctctgccttgggctgagtgaggaagaggagtgctgttcctgccttcctagcccagctgggtctgaccagaggctactgtgtacccatttaccatgcgtgattgttaactcagagtggggtgtagccaggatagaccatgaagctgaaggaacttgagcggccagctgtccaggcatggagcccagccagccaataccctttgtatctggccacaggaacatctgcccaacagctagattcctccttcagcacaaatggcacattggaaatatttgaggttgatttcagggacccttctctggacttgaaacacagaggagtcctttctgccttgagcagggcaacctcctggcttcaggggccagcgattctgaaatcttcatttgggatctgaataacttgaatgtgccaatgaccctgggatccaagtcacagcagcctccagaggacatcaaggcactgtcttggaaccggcaagcccaacacattctgtcttctgctcaccccagtggcaaggcagttgtgtgggatctcaggaagaatgaacctatcatcaaagtcagtgatcacagcaacaggatgcactgctcaggcctggcctggcatcctgacatagccacccagttagtgctgtgctcagaggatgatcgacttcccgtgattcagctgtgggacttgcgctttgcctcctcgcccttgaa

SEQ ID NO: 103873 - DNA, 519 bp, Artificial Sequence
  derived and/or modified sequence
atggccgtggcccgggccggcgtgctgggcgtgcagtggctgcagagggcgtctcggaacgtgatgccactgggcgccagaacggccagtcacatgaccaaagatatgttcccaggtccatatccacgaacaccagaggaacgggctgccgccgcaaaaaagtacaacatgcgggtcgaggattacgagccctaccctgacgacgggatggggtatggcgattaccccaagctgcccgatagatcacaacacgagcgcgatccatggtactcctgggaccagcccggtctcagactgaattggggagagcccatgcactggcatcttgacatgtacaatcgcaaccgcgtcgataccagcccaactcccgtgtcttggcatgtgatgtgtatgcagctctttggatttctggcatttatgatctttatgtgttgggttggcgatgtgtacccagtatatcagccagtgtgcaggcatcattttagctacaacctgggattcctgtccgccctgggttag

SEQ ID NO: 103874 - DNA, 519 bp, Artificial Sequence
  derived and/or modified sequence
atggccgtggcccgggccggcgtgctgggcgtgcagtggctgcagagagcaagcaggaatgtcatgcctctcggggcacggaccgccagtcacatgacaaaggatatgtttcccgggccctatccccgaacgccagaggagcgagcagccgcagctaagaaatataacatgcgcgttgaggactacgagccctatccagacgacggtatggggtacggggactacccaaagctgccagaccggtctcagcacgaaagagacccctggtatagctgggatcagccagggctgaggctaaactggggagaacccatgcactggcacttagatatgtataaccggaaccgggttgacacatccccaactcctgttagctggcacgttatgtgtatgcagctgttcgggtttttggcctttatgatttttatgtgctgggtgggcgacgtgtacccagtctaccagcctgtgtgcaggcaccacttctcttacaatttggggtttctttcagctttgggatag

SEQ ID NO: 103875 - DNA, 519 bp, Artificial Sequence
  derived and/or modified sequence
atggcagtcgccagggcgggagtcctaggcgtgcaatggctacaacgcgcaagcagaaacgtgatgcccttaggggcaagaacagcttcccatatgacaaaggacatgttcccagggccttaccctagaacccctgaggaacgggctgccgctgccaaaaaatacaatatgcgcgtggaggattacgagccctaccctgatgacggcatgggatatggtgactaccccaagctccctgaccgcagccagcacgaacgcgatccatggtattcatgggatcagccaggattgcgcttgaattggggcgagccaatgcactggcatctggacatgtataaccgtaatcgggtcgacacctccccgacacctgtgagctggcacgtgatgtgtatgcagctcttcggttttttagcatttatgatctttatgtgctgggtgggagacgtctaccctgtctatcaaccagtatgtcgtcaccactttagttataatctgggattcctcagtgctctggggtag

SEQ ID NO: 103876 - DNA, 519 bp, Artificial Sequence
  derived and/or modified sequence
atggctgtggctagggccggagtgctgggagtgcagtggctgcagcgggctagcaggaatgtcatgccccttggggcacgaacagccagtcacatgacgaaagacatgttccctggcccataccccagaactcctgaggagcgcgctgctgccgctaaaaagtacaacatgcgcgtggaagattatgaaccctaccccgacgacggcatgggatatggcgattatcccaaactgcctgatcggtctcaacatgaacgggacccatggtactcttgggatcagcccggattaagacttaactggggtgaaccaatgcactggcatctcgatatgtataacagaaatagggtggacacatcccccacccccgtgtcatggcacgtcatgtgtatgcagctgtttggatttctggcctttatgattttcatgtgctgggtgggcgacgtgtacccagtttatcaacccgtttgccggcaccatttctcatataatttaggcttcctgagtgccttgggctag

SEQ ID NO: 103877 - DNA, 519 bp, Artificial Sequence
  derived and/or modified sequence
atggccgtggccagagccggcgtgctgggcgtgcagtggctgcagagagccagcagaaacgtgatgcccctgggcgccagaaccgccagccacatgaccaaggacatgttccccggcccctaccccagaacccccgaggagagagccgccgccgccaagaagtacaacatgagagtggaggactacgagccctaccccgacgacggcatgggctacggcgactaccccaagctgcccgacagaagccagcacgagagagacccctggtacagctgggaccagcccggcctgagactgaactggggcgagcccatgcactggcacctggacatgtacaacagaaacagagtggacaccagccccacccccgtgagctggcacgtgatgtgcatgcagctgttcggcttcctggccttcatgatcttcatgtgctgggtgggcgacgtgtaccccgtgtaccagcccgtgtgcagacaccacttcagctacaacctgggcttcctgagcgccctgggctag

SEQ ID NO: 103878 - DNA, 468 bp, Artificial Sequence
  derived and/or modified sequence
atgacgaaagacatgttccccggcccctatcctcgtacccctgaagaacgcgcggctgccgccaagaagtacaatatgcgggtcgaggattacgagccataccccgacgatggaatgggttatggtgattaccccaagcttcccgaccgtagccaacatgagcgcgatccctggtactcgtgggaccaacctggtctacgcctgaattggggcgagcccatgcattggcatctggacatgtacaaccgaaaccgcgtggacacaagtcccacacctgtttcgtggcacgtcatgtgcatgcagctgttcgggtttcttgcctttatgattttcatgtgctgggtaggcgatgtatacccggtgtaccagcctgtcggtccaaaacaatatccttacaataatctctatcttgagagggggggagaccccagcaaagagcccgaacgtgtcgtccactacgagatctag

SEQ ID NO: 103879 - DNA, 468 bp, Artificial Sequence
  derived and/or modified sequence
atgaccaaggacatgtttcctggcccctaccccaggaccccagaggagagagctgctgctgccaagaagtacaacatgagggtggaggactatgagccctacccagatgatggcatgggctatggagactaccccaagctgcctgacaggagccagcacgagcgggacccctggtacagctgggaccagcccggcctgcggctgaactggggcgagcccatgcactggcacctggacatgtacaacagaaacagagtggacaccagccccacccctgtgtcctggcacgtgatgtgcatgcagctgtttggcttcctggccttcatgatcttcatgtgctgggtgggagatgtgtaccctgtgtaccagcctgtgggccccaagcagtacccctacaacaacctgtacctggagcggggcggggaccccagcaaggagcctgagcgggtggtgcactatgagatctag

SEQ ID NO: 103880 - DNA, 468 bp, Artificial Sequence
  derived and/or modified sequence
atgaccaaggacatgttccccggcccctacccccggacccccgaggagcgcgcagccgcagccaagaaatataatatgcgggtggaggattatgaaccttacccagatgatgggatgggatatggggactaccccaagttgccggatagatcacaacacgaaagggatccctggtacagctgggatcaacccggacttagattaaactggggagaacctatgcactggcacctcgacatgtacaaccggaaccgagtcgatacaagtcctactccagtgagttggcacgtcatgtgcatgcaacttttcggctttttagcctttatgatctttatgtgctgggtcggtgacgtgtatcctgtttaccaaccagttggaccgaagcaatatccttacaacaacttgtatctcgagcgcggcggggacccgagcaaggagccagaacgggtcgtgcactatgaaatctag

SEQ ID NO: 103881 - DNA, 468 bp, Artificial Sequence
  derived and/or modified sequence
atgactaaggacatgttccctggcccttacccacggacccccgaggaaagagccgcagcggctaagaagtacaatatgagagttgaggactacgaaccctatcccgacgacggaatgggctatggggactacccgaagcttccagaccggtcccagcatgaaagggacccttggtacagttgggatcagcccggactgcggcttaattggggtgaacccatgcactggcaccttgacatgtacaataggaacagagtagacacgagccccactcctgtgagctggcacgtgatgtgcatgcagttgttcggatttctggcgttcatgatattcatgtgttgggtgggagacgtctatccagtgtaccagccggtgggacccaagcaatacccgtacaataatttgtacctagaaagggggggtgacccgtccaaggagccagagagggtggtgcattacgaaatctag

SEQ ID NO: 103882 - DNA, 468 bp, Artificial Sequence
  derived and/or modified sequence
atgaccaaggacatgttccccggcccctaccccagaacccccgaggagagagccgccgccgccaagaagtacaacatgagagtggaggactacgagccctaccccgacgacggcatgggctacggcgactaccccaagctgcccgacagaagccagcacgagagagacccctggtacagctgggaccagcccggcctgagactgaactggggcgagcccatgcactggcacctggacatgtacaacagaaacagagtggacaccagccccacccccgtgagctggcacgtgatgtgcatgcagctgttcggcttcctggccttcatgatcttcatgtgctgggtgggcgacgtgtaccccgtgtaccagcccgtgggccccaagcagtacccctacaacaacctgtacctggagagaggcggcgaccccagcaaggagcccgagagagtggtgcactacgagatctag

SEQ ID NO: 103883 - protein, 709 aa, Artificial Sequence
  derived and/or modified sequence
MADAGIRRVVPSDLYPLVLGFLRDNQLSEVANKFAKATGATQQDANASSLLDIYSFWLKSAKVPERKLQANGPVAKKAKKKASSSDSEDSSEEEEEVQGPPAKKAAVPAKRVGLPPGKAAAKASESSSSEESSDDDDEEDQKKQPVQKGVKPQAKAAKAPPKKAKSSDSDSDSSSEDEPPKNQKPKITPVTVKAQTKAPPKPARAAPKIANGKAASSSSSSSSSSSSDDSEEEKAAATPKKVWTITSVRAETVPKKQVVAKAPVKAATTPTRKSSSSEDSSSDEEEEQKKPMKNKPGPYSSVPPPSAPPPKKSLGTQPPKKAVEKQQPVESSEDSSDESDSSSEEEKKPPTKAVVSKATTKPPPAKKAAESSSDSSDSDSSEDDEAPSKPAGTTKNSSNKPAVTTKSPAVKPAAAPKQPVGGGQKLLTRKADSSSSEEESSSSEEEKTKKMVATTKPKATAKAALSLPAKQAPQGSRDSSSDSDSSSSEEEEEKTSKSAVKKKPQKVAGGAAPSKPASAKKGKAESSNSSSSDDSSEEEEEKLKGKGSPRPQAPKANGTSALTAQNGKAAKNSEEEEEEKKKAAVVVSKSGSLKKRKQNEAAKEAETPQAKKIKLQTPNTFPKRKKGEKRASSPFRRVREEEIEVDSRVADNSFDAKRGAAGDWGERANQVLKFTKGKSFRHEKTKKKRGSYRGGSISVQVNSIKFDSE

SEQ ID NO: 103884 - DNA, 2130 bp, Artificial Sequence
  derived and/or modified sequence
atggccgacgccggcatcagaagagtggtgcccagcgacctgtaccccctggtgctgggcttcctgagagacaaccagctgagcgaggtggccaacaagttcgccaaggccaccggcgccacccagcaggacgccaacgccagcagcctgctggacatctacagcttctggctgaagagcgccaaggtgcccgagagaaagctgcaggccaacggccccgtggccaagaaggccaagaagaaggccagcagcagcgacagcgaggacagcagcgaggaggaggaggaggtgcagggcccccccgccaagaaggccgccgtgcccgccaagagagtgggcctgccccccggcaaggccgccgccaaggccagcgagagcagcagcagcgaggagagcagcgacgacgacgacgaggaggaccagaagaagcagcccgtgcagaagggcgtgaagccccaggccaaggccgccaaggccccccccaagaaggccaagagcagcgacagcgacagcgacagcagcagcgaggacgagccccccaagaaccagaagcccaagatcacccccgtgaccgtgaaggcccagaccaaggccccccccaagcccgccagagccgcccccaagatcgccaacggcaaggccgccagcagcagcagcagcagcagcagcagcagcagcagcgacgacagcgaggaggagaaggccgccgccacccccaagaaggtgtggaccatcaccagcgtgagagccgagaccgtgcccaagaagcaggtggtggccaaggcccccgtgaaggccgccaccacccccaccagaaagagcagcagcagcgaggacagcagcagcgacgaggaggaggagcagaagaagcccatgaagaacaagcccggcccctacagcagcgtgcccccccccagcgcccccccccccaagaagagcctgggcacccagccccccaagaaggccgtggagaagcagcagcccgtggagagcagcgaggacagcagcgacgagagcgacagcagcagcgaggaggagaagaagccccccaccaaggccgtggtgagcaaggccaccaccaagcccccccccgccaagaaggccgccgagagcagcagcgacagcagcgacagcgacagcagcgaggacgacgaggcccccagcaagcccgccggcaccaccaagaacagcagcaacaagcccgccgtgaccaccaagagccccgccgtgaagcccgccgccgcccccaagcagcccgtgggcggcggccagaagctgctgaccagaaaggccgacagcagcagcagcgaggaggagagcagcagcagcgaggaggagaagaccaagaagatggtggccaccaccaagcccaaggccaccgccaaggccgccctgagcctgcccgccaagcaggccccccagggcagcagagacagcagcagcgacagcgacagcagcagcagcgaggaggaggaggagaagaccagcaagagcgccgtgaagaagaagccccagaaggtggccggcggcgccgcccccagcaagcccgccagcgccaagaagggcaaggccgagagcagcaacagcagcagcagcgacgacagcagcgaggaggaggaggagaagctgaagggcaagggcagccccagaccccaggcccccaaggccaacggcaccagcgccctgaccgcccagaacggcaaggccgccaagaacagcgaggaggaggaggaggagaagaagaaggccgccgtggtggtgagcaagagcggcagcctgaagaagagaaagcagaacgaggccgccaaggaggccgagaccccccaggccaagaagatcaagctgcagacccccaacaccttccccaagagaaagaagggcgagaagagagccagcagccccttcagaagagtgagagaggaggagatcgaggtggacagcagagtggccgacaacagcttcgacgccaagagaggcgccgccggcgactggggcgagagagccaaccaggtgctgaagttcaccaagggcaagagcttcagacacgagaagaccaagaagaagagaggcagctacagaggcggcagcatcagcgtgcaggtgaacagcatcaagttcgacagcgagtag

SEQ ID NO: 103885 - DNA, 2130 bp, Artificial Sequence
  derived and/or modified sequence
atggccgatgccggtatccgccgggtggtcccttccgatctgtacccattggtcctggggtttttgcgtgataaccaactctctgaggttgctaataaattcgctaaggcaaccggcgcaacccaacaagacgccaatgccagctccttactggacatttattccttctggctgaagagcgcaaaagttcctgagcgcaagttgcaggcaaatggacccgtggctaagaaagcgaagaagaaagcatcgtcgtcagatagcgaggactcatccgaggaagaggaagaggtccaaggcccccccgcaaagaaagccgccgtacctgctaaaagagtgggactgccgccagggaaggccgccgccaaggcttctgagtcttccagtagtgaggaatcgtctgacgatgacgatgaggaagatcaaaaaaagcagcccgtgcagaagggagtgaaaccccaggcaaaggcagccaaggcgcctccaaaaaaagcgaagagttccgactctgacagcgacagtagtagcgaggacgagcctcccaaaaatcagaaacctaaaatcactcccgtcaccgtaaaggcccagacaaaggcccctcctaaaccggctagagccgctcctaagatagccaacggaaaagctgcaagtagctcttccagttcatcctcttcttcctcaagcgatgattccgaggaagagaaggccgccgctactccaaagaaagtctggacgatcacaagtgtccgagctgagacagtgcccaaaaagcaggttgtggccaaagcacccgtgaaggcggccaccacccctacgagaaaatcctccagcagcgaggattcttcttcggatgaggaagaggaacaaaaaaagccgatgaagaacaagcctgggccttactcttcggtgcctcccccctcagccccccctcccaaaaagtccctgggcacacagcctcctaagaaagccgtggagaagcagcagcctgtggaaagctccgaggattctagcgacgagtccgacagctcctctgaagaagagaagaaacctcctaccaaagccgtggtcagcaaggccacaaccaagccaccccctgccaaaaaggccgccgagtcgtcttctgattccagtgactctgacagttctgaggacgatgaggcaccatctaagcctgccgggaccaccaagaactcctccaacaagcctgccgtgactacaaagagtcccgcagtgaaacccgccgccgctcctaaacagccagtcgggggcggccagaagttgttaacacggaaagctgactcttctagctctgaagaagaatcttcatcctctgaagaggaaaaaacaaagaaaatggtggccacaaccaagcctaaggctacggccaaagctgctctgagcctccccgccaaacaggcccctcaaggttccagagatagttcctctgacagtgattccagctcctcagaggaagaagaagaaaaaacatcgaagtcagccgtgaaaaaaaagccacagaaggtcgcaggtggcgcggccccctctaagcccgcttcggccaaaaaggggaaggcagagtccagtaatagctcatcttctgatgattcgagcgaagaggaggaggagaagttgaaaggaaaaggctcccctaggccacaggctcccaaagcaaatgggacatccgcccttaccgcccagaacggtaaagctgccaagaactccgaggaagaagaggaggagaagaagaaagccgccgtggtagtcagcaagtcaggcagcctgaagaaaaggaaacaaaatgaagccgctaaagaggcggaaacaccacaggcaaaaaagatcaagcttcaaactcctaacacctttcccaagaggaaaaagggcgagaagcgggcttcatcaccttttaggcgtgtgcgcgaagaagagattgaggtggactcacgagttgccgataactcatttgacgccaaacgaggggccgccggagattggggagagcgagccaatcaggtgctgaaattcacaaaggggaaatcttttagacatgaaaagactaagaaaaagcgcggttcttaccgaggtgggtctatctcagtgcaggtgaactccatcaaatttgattccgaatag

SEQ ID NO: 103886 - DNA, 2130 bp, Artificial Sequence
  derived and/or modified sequence
atggctgatgctggcatcagaagagtggtgcccagcgacctgtaccccctggtgctgggcttcctgcgggacaaccagctgtctgaggtggccaacaagtttgccaaggccaccggggccacccagcaggatgccaatgccagcagcctgctggacatctacagcttctggctgaagagcgccaaggtgcctgagaggaagctgcaggccaatggacctgtggccaagaaggccaagaagaaggccagcagcagtgacagcgaggacagcagcgaggaggaggaggaggtgcagggccccccagccaagaaggctgctgtgcctgccaagagggtgggcctgcccccaggcaaggccgccgccaaggccagcgagagcagcagcagcgaggagagcagtgatgatgatgatgaggaggaccagaagaagcagcctgtgcagaagggcgtgaagccccaggccaaggccgccaaggccccacccaagaaggccaagagcagtgacagcgacagcgacagcagcagtgaagatgagccccccaagaaccagaagcccaagatcacccctgtgacagtgaaggcccagaccaaggccccacccaagccagcccgggccgcccccaagatcgccaacgggaaggccgccagcagcagcagcagcagcagcagcagcagcagcagtgatgacagcgaggaggagaaggccgccgccacccccaagaaggtgtggaccatcacctctgtgcgggcagagaccgtgcccaagaagcaggtggtggccaaggcccctgtgaaggccgccaccacccccaccaggaagagcagcagcagcgaggacagcagcagtgatgaggaggaggagcagaagaagcccatgaagaacaagccaggcccctacagctctgtgcccccacccagcgcccccccacccaagaagagcctgggcacccagccccccaagaaggctgtggagaagcagcagcctgtggagagcagcgaggacagcagtgatgaaagtgacagcagcagcgaggaggagaagaagccacccaccaaggctgtggtgtccaaggccaccaccaagcccccaccagccaagaaggctgctgagagcagcagtgacagcagtgacagcgacagcagtgaagatgatgaggcccccagcaagccagctggcaccaccaagaacagcagcaacaagccagctgtgaccaccaagagccctgctgtgaagccagctgctgcccccaagcagcctgtgggcggcggccagaagctgctgaccaggaaggctgacagcagcagcagcgaggaggagagcagcagcagcgaggaggagaagaccaagaagatggtggccaccaccaagcccaaggccacagccaaggccgccctgagcctgcctgccaagcaggccccccagggcagccgggacagcagcagtgacagcgacagcagcagcagcgaggaggaggaggagaagaccagcaagtctgctgtgaagaagaagccccagaaggtggccggcggggccgcccccagcaagccagccagcgccaagaagggcaaggccgagagcagcaacagcagcagcagtgatgacagcagcgaggaggaggaggagaagctgaagggcaagggcagcccccggccccaggcccccaaggccaacggcaccagcgccctgacagcccagaatggcaaggccgccaagaacagcgaggaggaggaggaggagaagaagaaggctgctgtggtggtgtccaagagcggcagcctgaagaagaggaagcagaatgaagctgccaaggaggccgagaccccccaggccaagaagatcaagctgcagacccccaacaccttccccaagaggaagaagggggagaagagggccagcagccccttccggcgggtgcgggaggaggagattgaggtggacagccgggtggccgacaacagctttgatgccaagagaggagctgctggggactggggcgagcgggccaaccaggtgctgaagttcaccaagggcaagagcttcagacatgagaagaccaagaagaagaggggcagctaccggggcggcagcatctctgtgcaggtgaacagcatcaagtttgacagcgagtag

SEQ ID NO: 103887 - DNA, 2130 bp, Artificial Sequence
  derived and/or modified sequence
atggccgacgccggcatccggcgggtggtgcccagcgacctgtacccgctggtcctgggttttctgcgggacaatcagctctcagaggtggccaataagttcgcaaaggccaccggcgccacccaacaggatgcaaacgcctctagccttctagacatttactctttctggctgaagagcgcgaaggtgccggagaggaagttacaagctaacggccccgtcgcaaaaaaggccaaaaagaaggcttccagctccgactctgaggattcatccgaggaagaggaagaagttcagggtccacctgcgaagaaggccgcagtgcccgccaaaagggtggggttgccgccgggcaaagccgcagccaaggcttcagaatcctcatccagcgaagagtcatcagatgacgatgacgaggaggaccagaagaagcagcccgtgcaaaaaggcgtgaagccacaggccaaggcagccaaagctcctccgaaaaaagctaagtccagcgactcagatagcgactcttcttcagaagatgagccccctaagaatcagaaaccaaagattactccagttactgtgaaggcccagaccaaggccccacccaagcccgcgcgagcagcgcctaagatcgccaatggtaaggcagcaagttcctcctcaagctcctctagctcctctagtagcgatgacagcgaggaagagaaagccgctgccacccctaagaaggtatggactatcacctcagtcagggcagaaaccgtacccaaaaaacaggttgtcgcaaaggcacccgttaaagctgctacaacccctactcgcaaatccagctcatcagaggactcgagctccgatgaagaggaagaacagaaaaagcccatgaaaaacaaaccaggaccttatagctccgttccccctccgtcagcccccccgcccaaaaaatcgctggggacacagccacccaaaaaagccgtcgagaaacagcagccagtcgagtcttctgaagatagtagtgacgagagtgattccagcagcgaagaagaaaaaaaaccccctacaaaagctgtcgtgtccaaggcgactacaaagccacccccagcgaagaaagcggctgaaagcagctcagacagtagcgactccgattcaagcgaagacgatgaggcccctagtaagcccgccggaactaccaagaactcaagcaataagccagcagttactaccaagagtcctgctgtgaaaccagccgcagcccccaaacagcccgttggaggcggtcagaaacttctcacccggaaggccgacagcagtagctctgaggaggagtcttccagcagcgaggaggagaaaactaaaaagatggtcgcaacaacaaaacctaaggcgactgcgaaggccgcccttagcctgcccgcgaagcaagctccacaagggtctagagatagctcctcagattccgacagctcttcatctgaggaggaggaggaaaagaccagtaagagcgcagtcaagaaaaagccccaaaaagtggcaggtggggccgccccgtccaagcctgcttccgccaaaaaaggcaaagccgagtcctccaactcaagctctagtgatgatagttccgaggaggaggaggagaaactgaagggcaaaggcagtcctaggccccaggctcctaaggccaacggcacctccgccctcacggcgcagaatggaaaggccgctaagaacagtgaagaagaagaggaagagaaaaagaaagccgccgtagtcgtctccaagtctggcagtcttaaaaagcgcaaacagaatgaggcggccaaggaggccgaaactccacaggctaaaaaaatcaagttacagacccctaacacgttccctaagagaaaaaagggtgagaaacgcgctagtagcccattccgcagggttcgcgaggaagaaatagaggtggattctcgtgtggccgacaacagcttcgatgccaagagaggtgccgcaggagactggggggaaagagcaaaccaggttctgaaattcactaagggcaaatctttcagacacgagaagacaaagaagaaaagaggatcttatcgcggcgggtcaatatctgtgcaagtaaactccattaaattcgatagtgagtag

SEQ ID NO: 103888 - DNA, 3966 bp, Artificial Sequence
  derived and/or modified sequence
gcggccggtgggctccgcccttaaccaagatggcgatacgcgtgggaccggaaagagtttatagatttcccgtctaccctacctctgaggtgaaggtgggactgccctgtggagcccaccctttccgttatgcgcccgcgcggcgcaatgacgtaacacaggcccgcccactgcccctgttgggttcctgagtcgtgctgcgtcgacaacggtagtgacgcgtattgcctggaggatggcggacgccggcattcgccgcgtggttcccagcgacctgtatcccctcgtgctcggcttcctgcgcgataaccaactctcagaggtggccaataagttcgccaaagcgacaggagctacacagcaggatgccaatgcctcttccctcttagacatctatagcttctggctcaagtctgccaaggtcccagagcgaaagttacaggcaaatggaccagtggctaagaaagctaagaagaaggcctcatccagtgacagtgaggacagcagcgaggaggaggaggaagttcaagggcctccagcaaagaaggctgctgtacctgccaagcgagtcggtctgcctcctgggaaggctgcagccaaagcatcagagagtagcagcagtgaagagtccagtgatgatgatgatgaggaggaccaaaagaaacagcctgtccagaagggagttaagccccaagccaaggcagccaaagctcctcctaagaaggccaagagctctgattctgattctgactcaagctccgaggatgagccaccaaagaaccagaagccaaagataacacctgtgacagttaaagctcagactaaagcccctcccaaaccagctcgagcagcacctaaaatagccaatggtaaagcagccagtagcagcagtagcagcagcagcagcagtagcagtgatgactcagaggaggagaaggcagcagccacccccaagaaggtctggaccataacttctgtcagggcagagactgtacctaaaaagcaagttgtggccaaggccccagtgaaagcagctaccacccctacccggaagagttctagcagtgaggattcctccagtgacgaggaagaggagcaaaaaaaacccatgaaaaataaaccaggtccctacagttcagtccccccgccttctgctcccccaccaaagaagtctctgggaacccagcctcccaagaaggctgtggagaagcagcagcctgtggaaagcagtgaagacagcagtgatgagtctgattcaagttctgaagaagagaagaaacccccaactaaggcagtagtctctaaagcaaccactaaaccacctccagcaaagaaagcagcagagagctcttcagacagctcagactctgacagctctgaggatgatgaagctccttctaagccagctggtaccaccaagaattcttcaaataagccagctgtcaccaccaagtcacctgcagtgaagccagctgcagcccccaagcaacctgtgggcggtggccagaagcttctgacgagaaaggctgacagcagctccagtgaggaagagagcagctccagtgaggaggagaagacaaagaagatggtggccaccactaagcccaaggcgactgccaaagcagctctatctctgcctgccaagcaggctcctcagggtagtagggacagcagctctgattcagacagctccagcagtgaggaggaggaagagaagacatctaagtctgcagttaagaagaagccacagaaggtagcaggaggtgcagccccttccaagccagcctctgcaaagaaaggaaaggctgagagcagcaacagttcttcttctgatgactccagtgaggaagaggaagagaagctcaagggcaagggctctccaagaccacaagcccccaaggccaatggcacctctgcactgactgcccagaatggaaaagcagctaagaacagtgaggaggaggaagaagaaaagaaaaaggcggcagtggtagtttccaaatcaggttcattaaagaagcggaagcagaatgaggctgccaaggaggcagagactcctcaggccaagaagataaagcttcagacccctaacacatttccaaaaaggaagaaaggagaaaaaagggcatcatccccattccgaagggtcagggaggaggaaattgaggtggattcacgagttgcggacaactcctttgatgccaagcgaggtgcagccggagactggggagagcgagccaatcaggttttgaagttcaccaaaggcaagtcctttcggcatgagaaaaccaagaagaagcggggcagctaccggggaggctcaatctctgtccaggtcaattctattaagtttgacagcgagtgacctgaggccatcttcggtgaagcaagggtgatgatcggagactacttactttctccagtggacctgggaaccctcaggtctctaggtgagggtcttgatgaggacagaagtttagagtaggtcctaagactttacagtgtaacatcctctctggtccttttctgtgttcctagttttgtacagacttgtttttgagtgttgagtagcagggacaaaataagggaatgttattttttaagaaaattcattttcattgttgtctccttccttttctgtgaaagtcctcatactgagaaatttgtatattttatattaaatcacttactattgatttttgttgtgattttcaaaggtggattcccacagataaaatcttggctattgcccaaaacatagtaaagggtcacgtgtgactttttataataggaagaaaattctgcctttgtgagtgcacatgtccacatttcatccctccttccctcaaaaccctagagaggggcattaaagaattgttgatgtatatgcaatgtctgttaagcatgcactatgtatttcatcctcatttattgggtctgggactgaagtttttagccagcatggacctaacctactttttgggataaaattctctgttttgttacaggcaaaattctggtatggcgtgaatgccatgggtcattctgaatatatttttttctgtaattttatcattacacgatgtttgcaatacgtgctttgttttttaatttgaaagcaaacttttctactgttgaaagacattttttgacaacttgacccttcctagtattgagttctaagttgaggactgcatcttctcgttttttacagtatagagaacaaaatgacatgagtttgaaaaatacatatcacttggtattgctgtcttggttgcagtggtgatacagaattggtttcattaattcctacatggttgagaatcactgatcaagaaagtggggggaaaaaaaacaaacgttaaaacctcaatcctcagtaggaaggtagattacattaggtgaaattataggtaatctatgtatgtgctaatggggttggaaagaaccttacagagcatattacctgataaactggagtgggtttgggagaacaaactaataggattattgtgtctcctagttggtacctgggagcaattgacatgcccccttcagaaccttaactgttagtagcagtggctgtaacaacacaaaccagtgaccagagataacagcttttaggccaagctggcctgacggtatggctgcaggaagtgactgagcagtagcggtactcagccagaccaagacggagagggaagagtccacagctttctggaagctaaggcattctggtggtagaaaagtgtgccccaagccttcatggacgagttataggtcttaagattagtctcctcttgtttggattccatacttgctaaataacctgataataacctggttttccatgtaactgcctctaggaagaaaatgtactgttcatgctgacacagatatttcagtctgcatggtaaaagttctaaatcttactacaaaataataaactggctggtttataatgtg

SEQ ID NO: 103889 - DNA, 2130 bp, Artificial Sequence
  derived and/or modified sequence
atggccgatgctggcatccgtagagtcgtgcccagcgacttgtaccccttggtactgggattcttaagggataatcagctgagcgaggttgcaaataaatttgctaaagccacaggggctactcagcaggacgctaacgcctcttcactgctggacatctactccttctggttgaaaagtgctaaggttcccgaaagaaagttacaggccaatggacctgtcgcaaaaaaagccaagaaaaaagctagttcttccgacagcgaggacagtagcgaggaagaggaggaggtccagggaccgccagctaagaaggcagccgtgcctgcaaagagagtgggactcccccctggcaaagcggctgcaaaggcttctgagagctcatcatcagaggagtccagcgacgatgacgatgaagaggatcaaaagaaacagcccgtgcagaaaggcgtcaagccccaggcgaaggcagccaaggcgcctccgaaaaaggctaagtcctcagatagcgacagtgatagctccagcgaagacgaaccgccaaagaaccagaaaccaaagattaccccggtcactgttaaggcccagacaaaggctcccccaaaacccgctcgagccgctccaaagatagccaacggaaaggccgctagctcttcttcctcttcatctagcagttcatcttctgacgactctgaggaggagaaggcggcagccactccaaaaaaagtgtggacaatcacttccgtgcgtgccgagactgtaccgaagaaacaggtagttgcaaaagctcctgtgaaggctgcgaccaccccaacccgaaagtctagttcttcagaggattcctccagcgatgaagaagaagagcagaagaagccaatgaagaacaagcctgggccttatagtagcgtgccaccacctagtgcccctccaccaaagaagagtttgggtacccagccccctaaaaaagctgtcgagaaacaacagccggtcgaatctagcgaggactcatccgatgaatcagattcaagttctgaggaggaaaagaaaccccctacaaaggccgtggtttccaaggccaccaccaaacccccacccgctaagaaggctgccgaatccagctctgattcctccgattcagacagctccgaggacgacgaggccccatccaagccagccggaaccaccaaaaactcgagcaataaaccagcagtcacaacaaaatcacccgctgtgaagcctgccgcagcaccaaaacaacccgttgggggtggacagaaacttttgactaggaaggcagactcgtcctccagtgaagaagagtcttctagttctgaggaggagaagacaaagaaaatggtggctacaaccaagcctaaggctaccgcaaaagctgccctgagtctgcctgccaaacaggcaccccaaggctcacgcgactcctcaagtgactctgattcctcctcgagcgaggaggaggaagaaaagactagtaagtccgcagtgaagaaaaagcctcaaaaggtcgcaggaggagccgctccttcaaaacccgcatccgctaagaaaggcaaagctgaatcatccaattctagttcatctgatgatagctccgaagaggaggaggaaaagctaaagggcaagggctctccacgccctcaggctccaaaggctaatgggacatccgcacttaccgctcagaacggaaaggccgcaaagaactctgaggaggaggaagaagagaagaagaaagccgctgtggtggtgagcaagtctgggagcctcaagaagagaaagcagaatgaagcagcaaaggaagccgagaccccacaggccaagaaaatcaagctccagactcctaacactttccccaaacggaaaaagggggagaagcgggctagtagccctttccggagggtacgcgaagaggagatcgaggtagattcccgcgtggcagataatagttttgacgcaaaacgcggagccgctggggattggggggagcgtgcaaaccaagtgctgaagtttaccaagggcaagtctttcagacacgagaagacaaagaaaaagaggggcagctataggggcggtagcataagcgtgcaggtgaactccatcaaatttgactcagaatag

SEQ ID NO: 103890 - protein, 295 aa, Artificial Sequence
  derived and/or modified sequence
MTENTHFDKIPESCALKSWRHPGLHHGEAALRGEPRIQTLPVASALSSHRTGPPPISPSKRKFSMEPGDEDLDCDNDHVSKMSRIFNPHLNKTANGDCRRDPRERSRSPIERAVAPTMSLHGSHLYTSLPSLGLEQPLALTKNSLDASRPAGLSPTLTPGERQQNRPSVITCASAGARNCNLSHCPIAHSGCAAPGPASYRRPPSAATTCDPVVEEHFRRSLGKNYKEPEPAPNSVSITGSVDDHFAKALGDTWLQIKAAKDGASSSPESASRRGQPASPSAHMVSHSHSPSVVS

SEQ ID NO: 103891 - DNA, 888 bp, Artificial Sequence
  derived and/or modified sequence
atgaccgagaacacccacttcgacaagatccccgagagctgcgccctgaagagctggagacaccccggcctgcaccacggcgaggccgccctgagaggcgagcccagaatccagaccctgcccgtggccagcgccctgagcagccacagaaccggccccccccccatcagccccagcaagagaaagttcagcatggagcccggcgacgaggacctggactgcgacaacgaccacgtgagcaagatgagcagaatcttcaacccccacctgaacaagaccgccaacggcgactgcagaagagaccccagagagagaagcagaagccccatcgagagagccgtggcccccaccatgagcctgcacggcagccacctgtacaccagcctgcccagcctgggcctggagcagcccctggccctgaccaagaacagcctggacgccagcagacccgccggcctgagccccaccctgacccccggcgagagacagcagaacagacccagcgtgatcacctgcgccagcgccggcgccagaaactgcaacctgagccactgccccatcgcccacagcggctgcgccgcccccggccccgccagctacagaagaccccccagcgccgccaccacctgcgaccccgtggtggaggagcacttcagaagaagcctgggcaagaactacaaggagcccgagcccgcccccaacagcgtgagcatcaccggcagcgtggacgaccacttcgccaaggccctgggcgacacctggctgcagatcaaggccgccaaggacggcgccagcagcagccccgagagcgccagcagaagaggccagcccgccagccccagcgcccacatggtgagccacagccacagccccagcgtggtgagctag

SEQ ID NO: 103892 - DNA, 888 bp, Artificial Sequence
  derived and/or modified sequence
atgactgaaaatacacattttgacaagattcccgaatcttgcgcactcaagtcttggaggcacccaggcctccatcatggcgaggccgccctgagaggcgagccacgtatccagacccttcccgtcgcttccgccctgagttcacaccgaaccggcccaccccccatatccccgtccaagcgaaagttcagcatggagcccggcgacgaagacctggactgtgataacgatcacgtctcaaaaatgtcgaggatcttcaacccccatctgaataaaactgccaacggcgactgcaggcgagatcccagggagaggtcaaggtcccctatcgagcgcgcggtggcacctacaatgagtttacacggctctcacttgtatactagcctgccatctctgggacttgagcaacctcttgccttaaccaaaaattctctggacgcttcgagacctgctgggctatccccgacactgaccccaggtgagagacagcaaaatagacctagtgtgataacctgtgcaagcgcaggcgcgaggaattgtaacctgagtcactgccccatagcacattccggctgtgccgcacccggcccagctagttacagacggcccccatcagctgccacaacatgcgatcctgtggtagaagagcatttcaggcgttcccttggcaagaactacaaggagccggagccggcccctaatagcgttagcatcactggcagcgtggacgaccactttgccaaggcccttggggatacttggctacagatcaaagcagctaaggacggggcatccagctccccagagagcgcctcccggcgaggtcaacccgcgtcaccgtcagcacatatggtcagtcattcccactccccttccgttgtttcctag

SEQ ID NO: 103893 - DNA, 888 bp, Artificial Sequence
  derived and/or modified sequence
atgacagagaacacccactttgacaagatccctgagagctgtgccctgaagtcctggaggcaccctggcctgcaccacggggaggccgccctgcggggggagccccgcatccagaccctgcctgtggccagcgccctgagcagccacaggactggacctccacccatcagccccagcaagaggaagttctccatggagcctggagatgaggacctggactgtgacaatgaccacgtgtccaagatgagccgcatcttcaacccccacctgaacaagacagccaatggagactgcagaagagacccccgggagaggagccgcagccccatcgagagagctgtggcccccaccatgagcctgcacggcagccacctgtacaccagcctgcccagcctgggcctggagcagcccctggccctgaccaagaacagcctggatgccagcaggcctgctggcctgagccccaccctgaccccaggagagcggcagcagaaccggcccagcgtcatcacctgtgccagcgctggggccaggaactgcaacctgagccactgccccatcgcccacagcggctgtgccgcccctggccctgccagctacagaagacctccttctgctgccaccacctgtgaccctgtggtggaggagcacttcagaagaagcctgggcaagaactacaaggagcctgagcccgcccccaacagcgtgtccatcactggatctgtggatgaccactttgccaaggccctgggggacacctggctgcagatcaaggccgccaaggatggagccagcagcagccctgagagcgccagcagaagaggccagcctgccagccccagcgcccacatggtgagccacagccacagccccagcgtggtgtcctag

SEQ ID NO: 103894 - DNA, 888 bp, Artificial Sequence
  derived and/or modified sequence
atgaccgagaacacccacttcgacaagatccccgagagctgcgccctgaagtcttggcgacaccctggccttcaccacggtgaggcagccttgaggggcgagccacggatccaaacattgcccgtggcctcagcactgtcttcacacaggaccgggccaccccccatctcaccctcaaagcggaagtttagcatggaaccaggggacgaagatttggactgtgataatgaccacgtgtcaaagatgagtagaatcttcaatccccacctgaacaagacagccaatggcgactgtaggagggacccacgcgagaggagccgtagccctatcgaacgcgctgtggcacccaccatgtctttgcacggctcccatctgtatacaagccttccctcgttaggactcgagcagcctctggcactgactaagaactcactagacgctagccgaccggcaggcctttctcccacactgactcctggagagcggcagcagaacagacctagcgttattacatgcgcctccgctggcgctagaaactgtaatttgagtcactgccctattgcccatagcggctgtgccgcgcccggtcctgcatcctaccgccgccccccatccgctgctaccacctgcgatcccgtcgtggaagaacacttccgacggagtctagggaaaaactacaaggagccggaacctgcacctaacagtgtctccatcacaggcagtgtggatgatcacttcgccaaggcccttggcgatacgtggctgcagattaaggctgccaaggatggggcgtctagcagtccagaatccgcgagtcggaggggccagcctgcctcaccctcagctcacatggtgtcacactcacattcaccatccgtcgtctcctag

SEQ ID NO: 103895 - DNA, 888 bp, Artificial Sequence
  derived and/or modified sequence
atgaccgaaaatacacatttcgataagattccggaaagttgcgcactgaagagctggcgccacccagggctccaccatggggaggccgctctgcggggagagccaagaattcaaactctcccagttgcctcagcattatcaagccacaggaccggtcctccgcctatttccccttcgaagcggaagttctccatggagcctggagatgaggacctcgactgtgataacgaccatgtttcaaaaatgagtcggatcttcaatccgcacttgaataagaccgctaatggagactgtaggagggaccccagagagcggtcaaggagtccaatcgagcgcgcagtagcaccaactatgtccctccatggcagtcatctgtacacatccttgccctcgctgggcctggagcagcccttggcccttacaaaaaactccctggatgcttccaggcccgctggactcagccctaccctaacgccaggcgagcggcaacagaatagaccctccgtaattacctgcgccagtgcaggcgctcgcaattgcaatctgtctcattgtcccatcgcccattctggatgcgcagcccctggccctgcttcatatcgcagaccgccttccgccgcaacaacttgcgatcccgtagtggaagaacatttccgcagaagcttggggaagaactataaggagccggagcccgcaccaaactctgtctccataactggcagcgttgatgatcacttcgccaaagccctcggggatacatggctccagatcaaggcggcaaaggacggggcaagcagtagccctgaaagcgcatccagacgagggcaacccgcaagcccttcggcacacatggtatcacatagccacagtccatctgttgttagctag

SEQ ID NO: 103896 - DNA, 1424 bp, Artificial Sequence
  derived and/or modified sequence
ccgggttgtggacgccaggagtttgccaaacacagcaaacactggtgtgtgagcggctgaaggggactctttccactccgatctccctccctcccagcctgttttgatttactaggacttcctcctccgggcgaggcgggggaaggacgccgccgagcgcctggagttgtgcgcgtgtgcgtgtgcgcgtgtgcgagtgtgaagtgcagcgctggagtgcaacatgctgtaatgggaggaaacccagcggcgtcggagcgcccgggaccgccgcggccgttctgagcgcagtggcgccgagcagcccctcccgcagccggtgtgacctgtcccttcaggctccaaccaggaatggagacgccattggatgttttgtccagggcagcatctctggtgcatgctgatgacgaaaaaccgtcacctgggaacttgttagaaatgcagaatcgtagtcctcgctgcggaactgatgactgagaatacgcattttgacaaaatccctgagtcctgtgcactcaaaagttggagacatccaggtctgcaccatggcgaagctgctctcaggggagaacccagaatacagaccctgccggtggcctctgccctcagcagtcaccgcaccggccctcccccaatcagccccagcaagaggaagttcagcatggagccaggtgacgaggacctagactgtgacaacgaccacgtctccaaaatgagtcgcatcttcaacccccatctgaacaagactgccaatggagactgccgcagagacccccgggagcggagccgcagccccatcgagcgcgctgtggcccccaccatgagcctgcacggcagccacctgtacacctccctccccagccttggcctggagcagcccctcgcactgaccaagaacagcctggacgccagcaggccagccggcctctcgcccacactgaccccgggggagcggcagcagaaccggccctccgtgatcacctgtgcctcggctggcgcccgcaactgcaacctctcgcactgccccatcgcgcacagcggctgtgccgcgcccgggcctgccagctaccggaggccaccgagcgctgccaccacctgtgaccccgtggtggaggagcatttccgcaggagcctgggcaagaattacaaggagcccgagccggcacccaactccgtgtccatcacgggctccgtggacgaccactttgccaaagctctgggtgacacgtggctccagatcaaagcggccaaggacggagcatccagcagccctgagtccgcctctcgcaggggccagcccgccagcccctctgcccacatggtcagccacagtcactccccctctgtggtctcctgaagggagcgcctcctccaacaacacgtggatctgcatggtttgcctgagctttgaacagtcagtactt

SEQ ID NO: 103897 - protein, 658 aa, Artificial Sequence
  derived and/or modified sequence
MSFPRGSQTQKIKHPIGTRKGPLEVPPPTEKDWPKDDEQDHVLVDPDEELDSLPQPYRMINKLVNLLFDQSWEIIEERNALREAESSQIQPTVYPPLGEIQLNKMPNCMAVSQDYVFIGGAKGFSIYNLYSAKQIYAWEKLKVDVTSIWATDLGNEILIAPVDEMGIIRLFYFYKEGLYLVKAINEVDDTSKQTTCIKMEISQGGDFAAFLLQGAGDIWLDVYKLPKETWLKKLEHPQLTSNPKKKVRQPQLNSLGPISADPLEMDANVSFKGDIKLSLPVYIMKIKPPKPVTGTTFKSPLEVFAKIKDCYGLGSGQNHFIKDSQWEQQAEIFNASYKKYLDREWEEEPLSTATFYFLLPSCLFAMPPEVKGPSGMACVLGIHWTRSHNFFLYSLNRTLKDKADPEGVWPCAAPIAVSQLSCSSSYLVLACEDGVLTLWDLAKGQNMYPEGQVKSQMKCVVLCTDASLHLVEASGTQGPTISVLVERPVKHLDKTICAVAPVPALPGMVLIFSKNGSVCLMDVAKREIICAFAPPGAFPLEVPWKPVFAVSPDHPCFLLRGDYSHETASTDDAGIQYSVFYFNFEACPLLENISKNCTIPQRDLDNMAFPQALPLEKRCERFLQKSYRKLEKNPEKEEEHWARLQRYSLSLQRENFKK

SEQ ID NO: 103898 - DNA, 1977 bp, Artificial Sequence
  derived and/or modified sequence
atgagcttccccagaggcagccagacccagaagatcaagcaccccatcggcaccagaaagggccccctggaggtgcccccccccaccgagaaggactggcccaaggacgacgagcaggaccacgtgctggtggaccccgacgaggagctggacagcctgccccagccctacagaatgatcaacaagctggtgaacctgctgttcgaccagagctgggagatcatcgaggagagaaacgccctgagagaggccgagagcagccagatccagcccaccgtgtacccccccctgggcgagatccagctgaacaagatgcccaactgcatggccgtgagccaggactacgtgttcatcggcggcgccaagggcttcagcatctacaacctgtacagcgccaagcagatctacgcctgggagaagctgaaggtggacgtgaccagcatctgggccaccgacctgggcaacgagatcctgatcgcccccgtggacgagatgggcatcatcagactgttctacttctacaaggagggcctgtacctggtgaaggccatcaacgaggtggacgacaccagcaagcagaccacctgcatcaagatggagatcagccagggcggcgacttcgccgccttcctgctgcagggcgccggcgacatctggctggacgtgtacaagctgcccaaggagacctggctgaagaagctggagcacccccagctgaccagcaaccccaagaagaaggtgagacagccccagctgaacagcctgggccccatcagcgccgaccccctggagatggacgccaacgtgagcttcaagggcgacatcaagctgagcctgcccgtgtacatcatgaagatcaagccccccaagcccgtgaccggcaccaccttcaagagccccctggaggtgttcgccaagatcaaggactgctacggcctgggcagcggccagaaccacttcatcaaggacagccagtgggagcagcaggccgagatcttcaacgccagctacaagaagtacctggacagagagtgggaggaggagcccctgagcaccgccaccttctacttcctgctgcccagctgcctgttcgccatgccccccgaggtgaagggccccagcggcatggcctgcgtgctgggcatccactggaccagaagccacaacttcttcctgtacagcctgaacagaaccctgaaggacaaggccgaccccgagggcgtgtggccctgcgccgcccccatcgccgtgagccagctgagctgcagcagcagctacctggtgctggcctgcgaggacggcgtgctgaccctgtgggacctggccaagggccagaacatgtaccccgagggccaggtgaagagccagatgaagtgcgtggtgctgtgcaccgacgccagcctgcacctggtggaggccagcggcacccagggccccaccatcagcgtgctggtggagagacccgtgaagcacctggacaagaccatctgcgccgtggcccccgtgcccgccctgcccggcatggtgctgatcttcagcaagaacggcagcgtgtgcctgatggacgtggccaagagagagatcatctgcgccttcgccccccccggcgccttccccctggaggtgccctggaagcccgtgttcgccgtgagccccgaccacccctgcttcctgctgagaggcgactacagccacgagaccgccagcaccgacgacgccggcatccagtacagcgtgttctacttcaacttcgaggcctgccccctgctggagaacatcagcaagaactgcaccatcccccagagagacctggacaacatggccttcccccaggccctgcccctggagaagagatgcgagagattcctgcagaagagctacagaaagctggagaagaaccccgagaaggaggaggagcactgggccagactgcagagatacagcctgagcctgcagagagagaacttcaagaagtag

SEQ ID NO: 103899 - DNA, 1977 bp, Artificial Sequence
  derived and/or modified sequence
atgagctttcccagggggtctcagacacagaaaatcaagcaccccataggaactcggaaaggtcccctggaggtgcccccgccaacagaaaaagattggccgaaggacgacgagcaggatcatgtcttggtggaccccgacgaggagctagactctttgccacagccttacagaatgattaataagctggtgaacctgctgtttgatcagagctgggagattattgaggagcggaacgccttgcgcgaagccgaaagctcgcagatccagcctactgtctacccccccctcggagagatccagctgaataagatgccaaattgtatggccgtgagccaggattatgtgttcatcggcggagctaagggcttctcaatttacaacttatattcagcaaaacagatttatgcgtgggagaagcttaaagtggatgtgacctccatctgggctacagatctgggaaacgaaattctgatagctcctgttgacgagatgggtataatccgcctattctacttctacaaggaagggctgtatctggtaaaagccatcaatgaggttgacgatacttccaagcagactacctgcattaaaatggaaatttcacagggaggtgactttgccgcatttctgctacagggcgcaggggatatctggttggatgtctacaagctgcccaaagaaacctggctgaaaaaactggagcatccacaactcacctctaaccctaagaaaaaagtacggcagccacaattaaactccctgggacccatctcagccgacccattggaaatggacgctaatgttagttttaagggtgatatcaaattgtcgctgccagtgtacatcatgaagatcaaaccacctaagcctgttaccggcactaccttcaagtctcctctggaggttttcgcaaagattaaggactgttacgggctcggcagtgggcagaatcactttattaaagacagtcagtgggagcagcaggccgagattttcaatgcatcgtacaaaaagtatctggaccgtgagtgggaagaagaacccctaagcacagctaccttctacttcttgctgccatcttgtctcttcgccatgcctcccgaagtcaagggccccagcggcatggcgtgtgtcttgggaattcattggacgaggtcccacaacttctttctctactcactcaaccgcacactgaaagataaagccgaccccgaaggagtttggccttgtgctgcacccatagctgtctcccaactctcctgcagctccagctatctggtcctggcatgtgaagatggcgtcctaaccctttgggacctggccaagggacaaaacatgtacccagaaggccaggtcaaatcacaaatgaagtgcgtagtgctgtgcacagatgcttccctgcatctggtggaggcatccggcacccagggaccaacaatctcagtgcttgtagaaagacccgtcaagcaccttgataaaaccatctgcgctgtggccccagtgccggctttgcccggaatggttctcatcttttcaaaaaatggatccgtctgtctgatggacgtcgcgaaacgagagatcatttgtgcctttgcgcccccaggtgcttttccactggaggtcccatggaagccagtgttcgccgtcagccctgatcacccctgttttctgctgagaggggactacagccacgagaccgccagcacggatgacgccgggatccagtatagtgtcttttatttcaattttgaggcgtgcccacttttggaaaacatttcgaaaaattgcacaattcctcagcgagatttggataacatggcgttcccgcaggcgttgccactggaaaagaggtgcgaaaggttcctgcagaaatcatacagaaaactggaaaagaatcccgagaaggaggaggagcattgggcccgcttgcagaggtattccctctctcttcagagggagaacttcaagaagtag

SEQ ID NO: 103900 - DNA, 1977 bp, Artificial Sequence
  derived and/or modified sequence
atgtccttcccccggggcagccagacccagaagatcaagcaccccatcggcaccaggaagggccccctggaggtgcccccacccacagagaaggactggcccaaggatgatgagcaggaccacgtgctggtggaccctgatgaggagctggacagcctgccccagccctacaggatgatcaacaagctggtgaacctgctgtttgaccagagctgggagatcatcgaggagagaaatgccctgcgggaggccgagagcagccagatccagcccaccgtgtacccacccctgggggagatccagctgaacaagatgcccaactgcatggctgtgtcccaggactatgtgttcatcggcggggccaagggcttcagcatctacaacctgtacagcgccaagcagatctatgcctgggagaagctgaaggtggatgtgaccagcatctgggccacagacctgggcaatgagatcctgattgcccctgtggatgagatgggcatcatccgcctcttctacttctacaaggagggcctgtacctggtgaaggccatcaatgaggtggatgacaccagcaagcagaccacctgcatcaagatggagatcagccagggcggggactttgctgccttcctgctgcagggcgctggggacatctggctggatgtgtacaagctgcccaaggagacctggctgaagaagctggagcacccccagctgaccagcaaccccaagaagaaggtgcggcagccccagctgaacagcctgggccccatctctgctgaccccctggagatggatgccaacgtgtccttcaagggggacatcaagctgagcctgcctgtgtacatcatgaagatcaagccacccaagcctgtgacaggcaccaccttcaagagccccctggaggtgtttgccaagatcaaggactgctacggcctgggcagcggccagaaccacttcatcaaggacagccagtgggagcagcaggccgagatcttcaatgccagctacaagaagtacctggaccgggagtgggaggaggagcccctgagcacagccaccttctacttcctgctgcccagctgcctgtttgccatgcctcctgaggtgaagggccccagcggcatggcctgtgtgctgggcatccactggaccaggagccacaacttcttcctgtacagcctgaacagaaccctgaaggacaaggctgaccctgagggcgtgtggccctgtgccgcccccatcgctgtgtcccagctgagctgcagcagcagctacctggtgctggcctgtgaagatggagtgctgaccctgtgggacctggccaagggccagaacatgtacccagagggccaggtgaagagccagatgaagtgtgtggtgctgtgcacagatgccagcctgcacctggtggaggccagcggcacccagggccccaccatctctgtgctggtggagaggcctgtgaagcacctggacaagaccatctgtgctgtggcccctgtgcctgccctgcccggcatggtgctgatcttcagcaagaatggatctgtgtgcctgatggatgtggccaagcgggagatcatctgtgcctttgcccctcctggggccttccccctggaggtgccctggaagcctgtgtttgctgtgtccccagaccacccctgcttcctgctgcggggggactacagccatgaaacagccagcacagatgatgctggcatccagtacagcgtcttctacttcaactttgaggcctgccccctgctggagaacatcagcaagaactgcaccatcccccagagggacctggacaacatggccttcccccaggccctgcccctggagaagagatgtgagcgcttcctgcagaagagctacaggaagctggagaagaaccctgagaaggaggaggagcactgggcccggctgcagcgctacagcctgagcctgcagcgggagaacttcaagaagtag

SEQ ID NO: 103901 - DNA, 1977 bp, Artificial Sequence
  derived and/or modified sequence
atgagcttcccccggggcagccagacccagaagatcaagcaccccattggaactcggaagggccctcttgaagttcccccccccaccgagaaggactggccaaaagacgatgaacaggaccacgtgcttgtggacccagacgaggagcttgactccttacctcaaccttatcgtatgatcaacaagctggtgaacctgctgttcgatcagagttgggaaattattgaggagcggaacgccctccgcgaggctgaaagttcccaaatccagcccacagtgtacccccctctgggcgagattcagctcaacaagatgccgaattgtatggccgtttcacaagattatgtgtttatcggaggggccaaagggttctctatctacaatctgtacagcgcgaaacagatttacgcctgggaaaaattaaaggttgacgtgactagtatttgggcgaccgacctgggaaacgaaatcttaatagccccagttgatgagatggggattattcgcctgttctacttttacaaagagggactctacttagtgaaggctatcaacgaagtggacgacacctctaaacagaccacttgtattaaaatggagatctctcagggaggcgacttcgcagctttcctcttgcagggagctggagacatttggcttgatgtgtataagctccctaaagagacatggcttaagaaactcgagcatccccagttgacatcaaatccaaaaaaaaaggtcagacagccgcagctaaatagcttgggccctattagcgcagaccctctggaaatggatgctaacgtcagcttcaagggcgacattaagttgagtctgcctgtgtacattatgaagattaagcccccgaaacctgtcaccggcaccaccttcaagagccctctcgaagtattcgccaagatcaaagactgctacggcctgggcagcgggcagaatcacttcattaaggactcccagtgggagcaacaggccgagatctttaacgcgtcatacaagaaatacctagatagagagtgggaggaggagcccttgagtaccgctaccttctacttcctcttgccctcttgcctattcgcaatgccgccggaggtcaagggccctagtgggatggcatgcgttttaggaattcactggacccgctcccataattttttcctctactctctaaacaggacactcaaagataaggccgatcccgaaggcgtctggccatgtgccgcgcctattgcagttagtcagctctcatgtagctcttcttatctagtcctcgcgtgtgaagacggcgtcctgacactgtgggatctcgctaaaggacagaacatgtatccggaggggcaggtgaagagtcagatgaaatgcgtggtgttatgcaccgacgcgtcactgcacctcgtcgaagctagcggtacacaaggcccaaccatctctgtcttagtcgagaggcctgtcaagcatctggacaagaccatctgcgcagttgctcccgtgcccgcactgcccggtatggtgctgattttcagtaagaatggcagcgtctgcctaatggatgtagccaagagagagatcatttgcgccttcgcacccccaggcgccttcccactggaggtgccatggaagccagtgttcgcagtttcacctgatcacccgtgcttccttcttaggggcgactattctcacgagacagcaagcactgatgatgcagggattcagtattctgttttctattttaactttgaggcctgtccactcctcgaaaacatttcgaaaaattgtacaatccctcagcgtgatctggataatatggcctttccccaggcgctaccgctcgagaaaaggtgcgagcgctttctgcagaagagctaccgcaagctggagaaaaatcccgagaaggaagaagaacactgggctcggctgcagagatattccctctcgctgcaaagggagaactttaaaaagtag

SEQ ID NO: 103902 - DNA, 1977 bp, Artificial Sequence
  derived and/or modified sequence
atgagctttccacgcggatcccagacgcagaagattaaacacccgatcgggactcggaaggggcctcttgaagtgcctccacctaccgagaaggactggcctaaggatgatgaacaggatcacgtccttgtggatccggatgaagaactagattccctgcctcagccataccggatgatcaataagcttgtgaatctgctctttgaccagtcttgggaaatcatcgaggagcggaacgctctgcgggaggccgagagttctcagatccaacctacggtctatccacctctaggagagatccagcttaataagatgcctaactgtatggcagtctctcaagactacgtgtttatcggcggagcgaaaggtttttcgatctataacttgtactctgcaaaacaaatctatgcttgggaaaaactcaaagtggatgtcacctcaatttgggcaaccgacctgggaaacgaaattctcattgctcctgttgatgagatgggcattattcgcctgttctatttttataaggaggggctgtatttggtcaaagctatcaacgaggtggatgatacgtccaagcagactacatgcataaaaatggagatttcgcaagggggagacttcgccgcatttctgttacagggagcaggggatatctggttggacgtctacaaattgccaaaagaaacctggctgaagaagctcgaacaccctcagctgacatctaacccaaagaagaaggtgcgccagccccagctgaattccctagggcctatttccgctgacccacttgagatggatgcaaacgtgagcttcaaaggtgacatcaagctgtcactgccggtgtacataatgaaaattaaaccacctaagcctgtaacgggtactacttttaagagccctcttgaagtttttgccaagattaaggactgctatgggctgggctcagggcagaatcacttcataaaggatagccagtgggaacagcaggcagagattttcaatgcctcctacaagaaataccttgatcgcgaatgggaggaggagccactctccactgcgaccttctactttttgctgcctagttgcctgtttgctatgcctcctgaggtcaagggcccatcagggatggcctgtgtgctaggcatccactggacccgtagtcacaatttcttcctctacagcctgaatagaacacttaaggacaaggccgacccagaaggtgtctggccgtgcgcggctcccatcgccgtcagccaactgagctgtagctcctcttacctcgtactggcgtgtgaagatggcgtgcttacactctgggacctggccaaagggcaaaatatgtaccccgagggtcaggtaaagagtcaaatgaagtgcgttgtgctgtgcaccgacgcgtccctgcaccttgtagaagcttccggcacacaaggcccaacaatctcagtgctggtggagcgacccgttaaacatcttgacaaaaccatctgtgccgtggcgccagtcccagccctccccggtatggtgctgatcttttctaaaaatggcagcgtatgtctaatggacgtagcaaaacgcgagattatctgtgcattcgcaccaccaggcgctttccccctcgaggtgccttggaagcctgtctttgctgtgtcaccagaccacccttgctttctgcttaggggagattacagccatgagactgcctctacggacgacgctggcatccagtattctgtgttttactttaattttgaagcctgccccttgctggagaatatctccaaaaattgcacaatcccccaacgggacctggacaatatggctttcccccaggcgctgccgcttgaaaagaggtgtgagcgctttctccaaaagtcatacaggaagctcgaaaagaatccggaaaaggaggaagaacattgggcccgattacaacgctattccctgagcctgcagagagagaatttcaagaagtag

SEQ ID NO: 103903 - DNA, 2293 bp, Artificial Sequence
  derived and/or modified sequence
accaaggcgacgcaacgccgcccggccagcttttcagtttcatagaggttcccagtgccaccttctgtgatgtcattcccaagaggaagtcagacccagaaaataaagcaccccattggtacacgaaagggaccattggaggtgccacccccaacagagaaggactggcctaaagacgatgaacaggatcatgtcctcgtggatccagatgaggagctggattccttgcctcagccttatcgaatgatcaacaagctggtgaaccttctgtttgaccagtcttgggaaattattgaagagagaaacgcactgagggaagctgagagcagccagatccagcccaccgtctaccctccacttggagaaatccagctcaacaaaatgccaaattgtatggctgtttcccaagactatgtgtttattggaggagccaaaggattctcaatttataatctgtacagtgctaaacaaatatatgcgtgggagaagcttaaggttgatgtcacttccatctgggccacagatttagggaatgaaatactcattgctcctgtggatgaaatgggtatcattagactcttttatttttataaggaaggactttacctagtcaaagccatcaatgaagtggatgataccagcaagcaaactacctgtataaagatggagatctctcaaggaggggactttgcagccttcctcctacaaggagccggagatatttggctggatgtgtataaattgcccaaggagacttggctcaagaaactagagcacccccaactcacttcaaatccaaagaaaaaagtcagacagccgcaactgaactcccttggtcccatttctgcagatcctttagaaatggatgcaaatgttagttttaaaggagacattaaattgagtcttccagtttacataatgaagatcaaaccacctaagcctgttacaggcaccacattcaaaagccccctggaagtctttgcaaagatcaaggactgctacggactgggctccgggcagaatcatttcatcaaggacagtcagtgggagcagcaagctgagatcttcaacgcttcctacaagaagtacctagatagggagtgggaggaagagccactcagtacggccaccttctatttccttcttcctagctgcctatttgcaatgccaccggaagtcaagggcccctcaggaatggcctgtgtccttggtatacactggaccagaagtcacaatttcttcctgtattcactaaaccgaactctaaaggataaagctgaccccgagggtgtgtggccctgtgctgcgcccattgcagtctctcagctcagctgctcctcctcctacctggtgctggcctgcgaggatggtgtgctcacgctgtgggacctggccaaaggacagaatatgtatcctgaaggtcaagtgaaatcccaaatgaaatgtgtggtgctgtgcacagacgcctccctccatctggtggaggctagcgggacccaaggacccaccatcagtgtgcttgttgagaggcctgtaaagcacctggataaaaccatctgtgccgtggccccagtcccagccttacctggcatggtgctcatcttttccaagaatggctctgtgtgccttatggatgtggccaagcgtgaaatcatctgtgcctttgcccctccgggagcctttcctctggaggtcccctggaagccagtgtttgctgtgtctccagaccatccatgtttcctgctccgaggagactattcacatgaaactgcgtccaccgacgatgctggaatccaatattctgttttctattttaattttgaggcctgcccactcctggaaaatatctcaaaaaattgtaccattcctcaaagggacttggataacatggccttcccccaagcactgccactggagaagagatgtgagcgtttcctccagaagagctatcggaagctggagaagaacccagagaaggaggaggagcactgggcccggcttcagaggtactccttgtcgctccagagagagaacttcaagaagtgaggctgccaccgccctgggatctctgaaaaggaggtttcagccacgaggcagctgctcccaggacactgaggccaagagaaatgtaacagagccacagctccacaggcctgcactcggagtctggggcctctgcagagccagcaaggggaaaagtataatctgggggaccttcaaccactaagcctcttgtcagagccctcaggcaggcagatgtgtcacccaaataaacagtgatattgtctccaga

SEQ ID NO: 103904 - protein, 233 aa, Artificial Sequence
  derived and/or modified sequence
METSASSSQPQDNSQVHRETEDVDYGETDFHKQDGKAGLFSQEQYERNKSSSSSSSSSSSSSSSSSSSSSESNDEDQQPRATGKHRRSLGAGYPHGNGSPGPGHGEPDVLKDELQLYGDAPGEVVPSGESGLRRRGSDPASGEVEASQLRRLNIKKDDEFFHFVLLCFAIGALLVCYHYYADWFMSLGVGLLTFASLETVGIYFGLVYRIHSVLQGFIPLFQKFRLTGFRKTD

SEQ ID NO: 103905 - protein, 249 aa, Artificial Sequence
  derived and/or modified sequence
MAEAGAGSLSLPGGKAMETSASSSQPQDNSQVHRETEDVDYGETDFHKQDGKAGLFSQEQYERNKSSSSSSSSSSSSSSSSSSSSSESNDEDQQPRATGKHRRSLGAGYPHGNGSPGPGHGEPDVLKDELQLYGDAPGEVVPSGESGLRRRGSDPASGEVEASQLRRLNIKKDDEFFHFVLLCFAIGALLVCYHYYADWFMSLGVGLLTFASLETVGIYFGLVYRIHSVLQGFIPLFQKFRLTGFRKTD

SEQ ID NO: 103906 - DNA, 750 bp, Artificial Sequence
  derived and/or modified sequence
atggccgaggccggcgccggcagcctgagcctgcccggcggcaaggccatggagaccagcgccagcagcagccagccccaggacaacagccaggtgcacagagagaccgaggacgtggactacggcgagaccgacttccacaagcaggacggcaaggccggcctgttcagccaggagcagtacgagagaaacaagagcagcagcagcagcagcagcagcagcagcagcagcagcagcagcagcagcagcagcagcagcgagagcaacgacgaggaccagcagcccagagccaccggcaagcacagaagaagcctgggcgccggctacccccacggcaacggcagccccggccccggccacggcgagcccgacgtgctgaaggacgagctgcagctgtacggcgacgcccccggcgaggtggtgcccagcggcgagagcggcctgagaagaagaggcagcgaccccgccagcggcgaggtggaggccagccagctgagaagactgaacatcaagaaggacgacgagttcttccacttcgtgctgctgtgcttcgccatcggcgccctgctggtgtgctaccactactacgccgactggttcatgagcctgggcgtgggcctgctgaccttcgccagcctggagaccgtgggcatctacttcggcctggtgtacagaatccacagcgtgctgcagggcttcatccccctgttccagaagttcagactgaccggcttcagaaagaccgactag

SEQ ID NO: 103907 - DNA, 750 bp, Artificial Sequence
  derived and/or modified sequence
atggcagaggccggcgcgggatctctgtcgctgccaggggggaaagcaatggagacaagcgcatcttcatctcagccacaggataatagtcaggtgcaccgcgaaacagaggatgttgactatggcgaaacagattttcataagcaggacggcaaggcaggcctgttctctcaggagcagtatgagagaaacaaaagctcgagcagtagttcaagttcaagctcttcctcaagcagttctagcagtagctcttcttctgaaagcaacgatgaagaccagcagccccgtgcaaccgggaaacacagaagatccttgggggccggctatccacatggaaacggttcaccaggcccagggcatggcgaaccagatgtcctgaaagatgaactgcagttgtacggagatgctcccggtgaggtggttccttctggggaaagtgggctgcgacgaagaggctccgaccccgcttccggagaagtggaagcctcacagctgaggagactgaatatcaagaaagatgacgaatttttccactttgtgttgctgtgctttgcaatcggcgcactactagtgtgttatcactattatgccgattggtttatgagcctgggcgtcggcctcctgactttcgcgtcattggagactgtggggatttattttggcctggtttatcggattcactctgttttacagggctttattcccctgttccaaaaatttagacttactggattccgcaagaccgactag

SEQ ID NO: 103908 - DNA, 750 bp, Artificial Sequence
  derived and/or modified sequence
atggccgaggccggggccggcagcctgagcctgcccggcggcaaggccatggagaccagcgccagcagcagccagccccaggacaacagccaggtgcaccgggagacagaagatgtggactatggagaaacagacttccacaagcaggacggcaaggccggcctcttcagccaggagcagtatgaaagaaacaagagcagcagcagcagcagcagcagcagcagcagcagcagcagcagcagcagcagcagcagcagcgagagcaatgatgaggaccagcagccccgggccaccgggaagcaccggcgcagcctgggcgccggctacccccatggaaatggcagccctggccctggccacggggagccagatgtgctgaaggatgagctgcagctgtatggagatgcccctggagaggtggtgcccagcggggagagcggcctgcggcggcggggcagtgaccctgccagcggggaggtggaggccagccagctgcggcggctgaacatcaagaaggatgatgagttcttccactttgtgctgctgtgctttgccatcggggccctgctggtgtgctaccactactatgctgactggttcatgagcctgggcgtgggcctgctgacctttgccagcctggagaccgtgggcatctacttcggcctggtgtaccgcatccacagcgtgctgcagggcttcatccccctcttccagaagttccggctgaccggcttcaggaagacagactag

SEQ ID NO: 103909 - DNA, 750 bp, Artificial Sequence
  derived and/or modified sequence
atggccgaggccggcgccggcagcctgagcctgcccggcggcaaggcaatggaaacctccgcctcttcctcacagcctcaggataactcgcaggtgcaccgcgaaaccgaggatgtggattacggcgagacagatttccacaagcaagacggaaaggctggactcttttcacaggagcaatacgagcggaataaaagttctagtagcagctcttcctcctcgagctcctcatcctccagctcctcatcttcaagtagcgagtctaatgacgaggatcaacagcccagagccactggtaagcacagacgatccctgggcgccggttatcctcacggcaacggatctccagggcctggccacggcgaaccagacgtgttgaaagacgagctccagctatatggcgatgctccaggcgaggttgtgccttccggagagagcgggctgcgaagaaggggcagcgatcccgcatccggggaggtagaggcgagccaactacgaaggctgaatatcaaaaaagatgacgagttttttcacttcgtgttgctgtgcttcgccatcggagcgctgctggtctgttatcactattacgcggattggtttatgagcttaggggttgggctacttaccttcgctagcttagaaacagtcggcatctactttggactggtgtatcggatccactcggtcctgcaaggctttattcccctgttccagaagtttcggctgactggattccgtaagaccgactag

SEQ ID NO: 103910 - DNA, 750 bp, Artificial Sequence
  derived and/or modified sequence
atggccgaggccggagcaggctcactgagcttgcccggtgggaaggcgatggaaacatctgcttccagctcccaaccccaggataacagtcaagtacacagggagaccgaagacgttgactacggagagacggactttcacaaacaggacggtaaggctggcttgttctcccaggaacagtacgagaggaataaatccagttcctcctcatcctcaagcagctcatcatcatcatcttcttcatcatcctcctcgtccgaaagcaatgatgaagaccagcagcctcgggctacaggcaaacatcgtcggtctctgggagcaggctatcctcacggaaatggtagtcccggtcctggccatggagagccagacgtgcttaaagatgagctccagctgtacggcgatgctcccggagaggttgtcccttcaggggagtctggcctacgcagacgcggtagcgatcctgcctcaggtgaagtggaagcatctcaactgcgtcgtctgaacatcaaaaaggacgacgagttttttcatttcgtactgctctgtttcgcgatcggcgctctccttgtttgttatcattactacgcagattggttcatgtcgctgggtgtcggactgctgactttcgcaagccttgagacggttggcatctatttcgggctcgtctaccggatccattccgtcctccagggtttcatccccctgtttcagaaattcagactgacaggatttagaaagacagactag

SEQ ID NO: 103911 - DNA, 984 bp, Artificial Sequence
  derived and/or modified sequence
tttttaacttgtttaactaagggtggctcctgttgagaggtgacagcgtgttggcagccctcgcagccctcgcttgctcttggtgcctcctcagcctcggcgcccactctggccgcacttgaggagcccttcagcccgctgctgcactgtgggagtcccttcctgggatggccgaggccggagccggctccctcagccttccgggaggaaaagccatggagacttcagcatcctcctcccagcctcaggacaacagtcaagtccacagagaaacagaagatgtagactatggagagacagatttccacaagcaagatgggaaggctggactcttttcccaagaacaatatgagagaaacaagtcttcttcctcctcctcctcttcctcctcatcctcctcatcttcttcatcctcctcctcctcagagagcaatgatgaggaccagcaacccagagcaaccggaaaacatcgacggagcctgggggctggatacccccacgggaacggctcacccggtcctgggcatggggagcctgacgttttgaaggatgagcttcaactctatggagatgctcctggagaggtggtaccctctggggaatcaggactccgaaggagaggctctgacccagcaagtggagaagtggaggcctctcagttaagaagactgaatataaagaaagatgatgagtttttccatttcgtcctcctgtgctttgccatcggggccttgctggtgtgttatcactattacgcagactggttcatgtctcttggggtcggcctgctcaccttcgcctccctggaaaccgttggcatctacttcggactagtgtaccgtatccacagcgtcctccaaggcttcatccccctcttccagaagtttaggctgacagggttcaggaagactgactgaggccacttccaggtgggcagcagaggcaggccccagtgtgaccaccactgcgacccctgagcccaca

SEQ ID NO: 103912 - DNA, 2308 bp, Artificial Sequence
  derived and/or modified sequence
agagcttggtacagccaagggtggcacagctgcccccatttcactgtctcctggagtctgaaggcatggctgtggccctgaggcaggaccaggcatgtagctgccccacctgcccctccgcagtgttgtagggaagagtcaagtcagacaggaaggcctggggctgatagcaccagcaggaaggaatgccatcccagtgagcgagtggggcccagggacaacgtcacggtagtcccgccctccttgctgtcacaggtgcagcctgtcctctccttcccctgaccagcccagcatccacatagtctacacagagctccccttgctgcccagacaagctgaaggaccacaggaaaagccatggagacttcagcatcctcctcccagcctcaggacaacagtcaagtccacagagaaacagaagatgtagactatggagagacagatttccacaagcaagatgggaaggctggactcttttcccaagaacaatatgagagaaacaagtcttcttcctcctcctcctcttcctcctcatcctcctcatcttcttcatcctcctcctcctcagagagcaatgatgaggaccagcaacccagagcaaccggaaaacatcgacggagcctgggggctggatacccccacgggaacggctcacccggtcctgggcatggggagcctgacgttttgaaggatgagcttcaactctatggagatgctcctggagaggtggtaccctctggggaatcaggactccgaaggagaggctctgacccagcaagtggagaagtggaggcctctcagttaagaagactgaatataaagaaagatgatgagtttttccatttcgtcctcctgtgctttgccatcggggccttgctggtgtgttatcactattacgcagactggttcatgtctcttggggtcggcctgctcaccttcgcctccctggaaaccgttggcatctacttcggactagtgtaccgtatccacagcgtcctccaaggcttcatccccctcttccagaagtttaggctgacagggttcaggaagactgactgaggccacttccaggtgggcagcagaggcaggccccagtgtgaccaccactgcgacccctgagcccacaagggcagagcagcattctgagagacgcacaggagaccaagccagaccaataaacagaacacttttccttccatgtggtctgaatgttggcaccagcccgggcaggggcatctcatttgggcagtactgctgtgcaacccagctgcaaggatggaaggcagagggtgggtgtggggcctgaggcttcacagtacctggaccagcaggaagattctgggaggtcactgctctcagaggacagcaagggaccctgagctctgcaagctgtgatctgtctgggttcatggtttttctcaaatcccaggctatctgcatgcgctctcaggtgctaccgagccatcctgggagagatggatggtccactgctttgaggcagggagccatcgggctggggccccttggtgaacctgatgcaggtaagatgctgaggactaaaaccattttttttgcacccaaaaaaaaaggcaggaaaatgatcatcagaaactaaatggcagccaggcatgggggctcacaactgtaatcctcgcactttgggaggctcaggctaagggtcgcttgaagctgagagttcaagaccaacctgggcaacatagtgagacccccatctctacaatttttttttaatgaccaaatgtggcggtacatacctgtacatacctgcggttccagctactcaagaggctgaggcaggaggactgcttgagcccaggagttcagggctgcagtgaggtacgatcaagccactgcactccagcctgggcgacagagcaagatcgtttctctaaaattaaaaaaaaaaaaaaaagacaaataaaaattgcatgtatttgtagtgtacaacatgttttgaaatatgtggaatggctaaatcaagctaattaacatatgtatccctcacataccctttttttatgatgagaacagtaaaaacctactgtcagcaatttgcaaagtatacaatacattgttattaactatggtcaccatgctatgtgattgatatcctgaacttgaactgagttcttgatggtcacagacatgctgttctcaaaactcagaagggtaacttctgaggttttgatttcaagtacttgtatgtaacctaatttaacgggagcccagagtgcacagatcagatatttattaaacatataaataaaacacagttttcacgatagaa

SEQ ID NO: 103913 - DNA, 979 bp, Artificial Sequence
  derived and/or modified sequence
aacttgtttaactaagggtggctcctgttgagaggtgacagcgtgttggcagccctcgcagccctcgcttgctcttggtgcctcctcagcctcggcgcccactctggccgcacttgaggagcccttcagcccgctgctgcactgtgggagtcccttcctgggatggccgaggccggagccggctccctcagccttccgggaggaaaagccatggagacttcagcatcctcctcccagcctcaggacaacagtcaagtccacagagaaacagaagatgtagactatggagagacagatttccacaagcaagatgggaaggctggactcttttcccaagaacaatatgagagaaacaagtcttcttcctcctcctcctcttcctcctcatcctcctcatcttcttcatcctcctcctcctcagagagcaatgatgaggaccagcaacccagagcaaccggaaaacatcgacggagcctgggggctggatacccccacgggaacggctcacccggtcctgggcatggggagcctgacgttttgaaggatgagcttcaactctatggagatgctcctggagaggtggtaccctctggggaatcaggactccgaaggagaggctctgacccagcaagtggagaagtggaggcctctcagttaagaagactgaatataaagaaagatgatgagtttttccatttcgtcctcctgtgctttgccatcggggccttgctggtgtgttatcactattacgcagactggttcatgtctcttggggtcggcctgctcaccttcgcctccctggaaaccgttggcatctacttcggactagtgtaccgtatccacagcgtcctccaaggcttcatccccctcttccagaagtttaggctgacagggttcaggaagactgactgaggccacttccaggtgggcagcagaggcaggccccagtgtgaccaccactgcgacccctgagcccaca

SEQ ID NO: 103914 - protein, 203 aa, Artificial Sequence
  derived and/or modified sequence
METSASSSQPQDNSQVHRETEDVDYGETDFHKQDGKAGLFSQEQYERNKSSSSSSSSSSSSSSSSSSSSSGPGHGEPDVLKDELQLYGDAPGEVVPSGESGLRRRGSDPASGEVEASQLRRLNIKKDDEFFHFVLLCFAIGALLVCYHYYADWFMSLGVGLLTFASLETVGIYFGLVYRIHSVLQGFIPLFQKFRLTGFRKTD

SEQ ID NO: 103915 - DNA, 612 bp, Artificial Sequence
  derived and/or modified sequence
atggagaccagcgccagcagcagccagccccaggacaacagccaggtgcacagagagaccgaggacgtggactacggcgagaccgacttccacaagcaggacggcaaggccggcctgttcagccaggagcagtacgagagaaacaagagcagcagcagcagcagcagcagcagcagcagcagcagcagcagcagcagcagcagcagcagcggccccggccacggcgagcccgacgtgctgaaggacgagctgcagctgtacggcgacgcccccggcgaggtggtgcccagcggcgagagcggcctgagaagaagaggcagcgaccccgccagcggcgaggtggaggccagccagctgagaagactgaacatcaagaaggacgacgagttcttccacttcgtgctgctgtgcttcgccatcggcgccctgctggtgtgctaccactactacgccgactggttcatgagcctgggcgtgggcctgctgaccttcgccagcctggagaccgtgggcatctacttcggcctggtgtacagaatccacagcgtgctgcagggcttcatccccctgttccagaagttcagactgaccggcttcagaaagaccgactag

SEQ ID NO: 103916 - DNA, 612 bp, Artificial Sequence
  derived and/or modified sequence
atggaaaccagcgcttcaagttcacagcctcaggacaattcccaggtacatcgggaaacagaagatgtggattatggagaaacagacttccataaacaggacggtaaagctggtctgttcagccaggagcagtacgaaaggaataaatctagctcttcatcaagttctagcagctcttcgagctcatcatcctcttcatctagctcaagcggccctggccatggtgagccggacgtactgaaagacgaactacaactgtatggggacgcccctggcgaggtggtgccctccggtgagagcgggctacgccgccgaggttctgaccctgcctctggggaagttgaggcttctcagctgcgacgactgaacatcaaaaaagatgatgagtttttccactttgtgctcctctgcttcgcaattggcgcattgttggtttgctaccattattacgccgattggttcatgagcttgggtgtcggactacttactttcgcctctttggagacagtgggaatctatttcggcttagtttacaggattcattccgtgctgcagggctttatccctctattccagaagttccggcttaccgggtttaggaaaacagactag

SEQ ID NO: 103917 - DNA, 612 bp, Artificial Sequence
  derived and/or modified sequence
atggagaccagcgccagcagcagccagccccaggacaacagccaggtgcaccgggagacagaagatgtggactatggagaaacagacttccacaagcaggacggcaaggccggcctcttcagccaggagcagtatgaaagaaacaagagcagcagcagcagcagcagcagcagcagcagcagcagcagcagcagcagcagcagcagcagcggccctggccacggggagccagatgtgctgaaggatgagctgcagctgtatggagatgcccctggagaggtggtgcccagcggggagagcggcctgcggcggcggggcagtgaccctgccagcggggaggtggaggccagccagctgcggcggctgaacatcaagaaggatgatgagttcttccactttgtgctgctgtgctttgccatcggggccctgctggtgtgctaccactactatgctgactggttcatgagcctgggcgtgggcctgctgacctttgccagcctggagaccgtgggcatctacttcggcctggtgtaccgcatccacagcgtgctgcagggcttcatccccctcttccagaagttccggctgaccggcttcaggaagacagactag

SEQ ID NO: 103918 - DNA, 612 bp, Artificial Sequence
  derived and/or modified sequence
atggagaccagcgccagcagcagccagccccaggacaacagccaggtacatagagagactgaagacgttgattacggggagaccgatttccacaagcaggatggcaaggcaggactcttttcgcaggagcagtatgaacggaataaatcctcctccagcagctcatcctcctctagcagtagctccagtagcagctcttcatcctcaagcggcccaggacatggcgaacctgacgtccttaaagacgagctgcagctgtacggcgacgctccaggcgaggttgtccctagcggcgagagtgggctccggcggcgcggcagcgaccctgcaagtggcgaagtggaggcttcccagctgcgacgcctcaacataaagaaggatgacgagttctttcattttgtgctcctgtgctttgctataggtgcccttctggtgtgctaccattactacgccgattggttcatgagcctcggcgtcggactgctaacgttcgcctctctcgagacagtaggaatttacttcggtcttgtataccgtatacacagcgttttgcaaggctttatcccactctttcagaagtttcgtctgaccggtttccgtaagaccgattag

SEQ ID NO: 103919 - DNA, 612 bp, Artificial Sequence
  derived and/or modified sequence
atggaaacatcggcaagtagctctcagccgcaggataactctcaagtgcacagggagaccgaggacgtggattacggcgaaaccgattttcacaagcaggacgggaaggccggattgtttagtcaagagcagtacgagcgaaataagagttcttcctcaagctcatccagctctagtagctcctcttcttctagcagtagtagttcctctggtccagggcatggggaacctgatgtactgaaggacgagttgcagctgtacggggatgcaccgggtgaggtcgtacccagcggcgaatccggtttgcgtcgtcggggttctgaccccgcttccggcgaggtggaggcttcgcagcttcgtagactgaatatcaagaaagatgacgagttctttcactttgtcttactctgcttcgccattggggctctgctggtgtgctaccattactatgccgattggttcatgagcctgggcgtggggctgctgacctttgcatccctagagaccgtcggtatctactttggcctcgtgtataggatccactcagtgttgcagggatttatccctttgttccagaagttccggttgacaggctttaggaagacggactag

SEQ ID NO: 103920 - DNA, 1547 bp, Artificial Sequence
  derived and/or modified sequence
gaccagcccagcatccacatagtctacacagagctccccttgctgcccagacaagctgaaggaccacaggaaaagccatggagacttcagcatcctcctcccagcctcaggacaacagtcaagtccacagagaaacagaagatgtagactatggagagacagatttccacaagcaagatgggaaggctggactcttttcccaagaacaatatgagagaaacaagtcttcttcctcctcctcctcttcctcctcatcctcctcatcttcttcatcctcctcctcctcaggtcctgggcatggggagcctgacgttttgaaggatgagcttcaactctatggagatgctcctggagaggtggtaccctctggggaatcaggactccgaaggagaggctctgacccagcaagtggagaagtggaggcctctcagttaagaagactgaatataaagaaagatgatgagtttttccatttcgtcctcctgtgctttgccatcggggccttgctggtgtgttatcactattacgcagactggttcatgtctcttggggtcggcctgctcaccttcgcctccctggaaaccgttggcatctacttcggactagtgtaccgtatccacagcgtcctccaaggcttcatccccctcttccagaagtttaggctgacagggttcaggaagactgactgaggccacttccaggtgggcagcagaggcaggccccagtgtgaccaccactgcgacccctgagcccacaagggcagagcagcattctgagagacgcacaggagaccaagccagaccaataaacagaacacttttccttccatgtggtctgaatgttggcaccagcccgggcaggggcatctcatttgggcagtactgctgtgcaacccagctgcaaggatggaaggcagagggtgggtgtggggcctgaggcttcacagtacctggaccagcaggaagattctgggaggtcactgctctcagaggacagcaagggaccctgagctctgcaagctgtgatctgtctgggttcatggtttttctcaaatcccaggctatctgcatgcgctctcaggtgctaccgagccatcctgggagagatggatggtccactgctttgaggcagggagccatcgggctggggccccttggtgaacctgatgcaggtaagatgctgaggactaaaaccattttttttgcacccaaaaaaaaaggcaggaaaatgatcatcagaaactaaatggcagccaggcatgggggctcacaactgtaatcctcgcactttgggaggctcaggctaagggtcgcttgaagctgagagttcaagaccaacctgggcaacatagtgagacccccatctctacaatttttttttaatgaccaaatgtggcggtacatacctgtacatacctgcggttccagctactcaagaggctgaggcaggaggactgcttgagcccaggagttcagggctgcagtgaggtacgatcaagccactgcactccagcctgggcgacagagcaagatcgtttctctaaaatt

SEQ ID NO: 103921 - protein, 157 aa, Artificial Sequence
  derived and/or modified sequence
METSASSSQPQDNSQVHRETEDVDCPGHGEPDVLKDELQLYGDAPGEVVPSGESGLRRRGSDPASGEVEASQLRRLNIKKDDEFFHFVLLCFAIGALLVCYHYYADWFMSLGVGLLTFASLETVGIYFGLVYRIHSVLQGFIPLFQKFRLTGFRKTD

SEQ ID NO: 103922 - DNA, 474 bp, Artificial Sequence
  derived and/or modified sequence
atggagaccagcgccagcagcagccagccccaggacaacagccaggtgcacagagagaccgaggacgtggactgccccggccacggcgagcccgacgtgctgaaggacgagctgcagctgtacggcgacgcccccggcgaggtggtgcccagcggcgagagcggcctgagaagaagaggcagcgaccccgccagcggcgaggtggaggccagccagctgagaagactgaacatcaagaaggacgacgagttcttccacttcgtgctgctgtgcttcgccatcggcgccctgctggtgtgctaccactactacgccgactggttcatgagcctgggcgtgggcctgctgaccttcgccagcctggagaccgtgggcatctacttcggcctggtgtacagaatccacagcgtgctgcagggcttcatccccctgttccagaagttcagactgaccggcttcagaaagaccgactag

SEQ ID NO: 103923 - DNA, 474 bp, Artificial Sequence
  derived and/or modified sequence
atggaaactagcgcttcaagctctcagccacaagataattctcaagtgcaccgcgaaacggaagacgtagattgtcctgggcacggcgagcctgatgtattgaaggacgaacttcagctatacggagacgcccccggggaagtcgtgccgagcggagagagcggcctgagacgccgtggaagcgatccagcttctggggaagtggaagcctcacagttacggaggttgaacatcaagaaagacgacgaatttttccactttgtgctgctctgcttcgccatcggggccttgctcgtgtgctaccactactacgctgattggtttatgagtctgggagtgggtctcctgacctttgcatctttagaaaccgtgggcatctactttggcctggtttaccgaatacatagcgtcctccagggctttatccccctcttccagaaatttagattaacagggtttcggaaaacggactag

SEQ ID NO: 103924 - DNA, 474 bp, Artificial Sequence
  derived and/or modified sequence
atggagaccagcgccagcagcagccagccccaggacaacagccaggtgcaccgggagacagaagatgtggactgccccggccacggggagccagatgtgctgaaggatgagctgcagctgtatggagatgcccctggagaggtggtgcccagcggggagagcggcctgcggcggcggggcagtgaccctgccagcggggaggtggaggccagccagctgcggcggctgaacatcaagaaggatgatgagttcttccactttgtgctgctgtgctttgccatcggggccctgctggtgtgctaccactactatgctgactggttcatgagcctgggcgtgggcctgctgacctttgccagcctggagaccgtgggcatctacttcggcctggtgtaccgcatccacagcgtgctgcagggcttcatccccctcttccagaagttccggctgaccggcttcaggaagacagactag

SEQ ID NO: 103925 - DNA, 474 bp, Artificial Sequence
  derived and/or modified sequence
atggagaccagcgccagcagcagccagccccaggacaacagccaggtacaccgcgaaacagaggacgtggactgtcctggccatggggaacccgatgtgctaaaggacgagctccaattgtatggggacgctcccggcgaggtcgtcccttctggcgagagtgggctgaggcgcaggggtagtgatccggccagcggggaggtcgaggcctcacagttgagaagactcaatatcaagaaggacgatgaatttttccactttgtgttactgtgctttgcgataggggctctgctggtgtgttatcattattatgccgactggttcatgtctctcggagtgggtctccttaccttcgcctcactggagaccgtgggtatttacttcgggcttgtctatcgtattcacagcgtgctccaggggttcattcctctgttccagaaattccgcctcacagggttcagaaaaacagactag

SEQ ID NO: 103926 - DNA, 474 bp, Artificial Sequence
  derived and/or modified sequence
atggaaaccagtgccagctcttcgcagccgcaggacaacagccaggttcaccgagaaactgaagatgtagattgcccaggtcatggagaacccgatgtcctgaaagacgagcttcagctatatggagatgccccaggggaagtggttccatctggagagtcagggctgcgaaggagaggttccgatccagcctcaggcgaggtcgaggcttcgcaactcaggagacttaacataaagaaagatgacgaattcttccacttcgttctgctctgctttgccatcggggctcttttggtgtgctaccattattatgcggactggtttatgagtttaggcgtgggcctgctgacatttgcctccctcgagaccgtaggcatttattttgggctagtgtatcggattcactccgtcctgcaggggtttatcccccttttccagaagtttcgcttgaccggctttcggaagactgactag

SEQ ID NO: 103927 - DNA, 1785 bp, Artificial Sequence
  derived and/or modified sequence
ctgtcctctccttcccctgaccagcccagcatccacatagtctacacagagctccccttgctgcccagacaagctgaaggaccacaggaaaagccatggagacttcagcatcctcctcccagcctcaggacaacagtcaagtccacagagaaacagaagatgtagactgtcctgggcatggggagcctgacgttttgaaggatgagcttcaactctatggagatgctcctggagaggtggtaccctctggggaatcaggactccgaaggagaggctctgacccagcaagtggagaagtggaggcctctcagttaagaagactgaatataaagaaagatgatgagtttttccatttcgtcctcctgtgctttgccatcggggccttgctggtgtgttatcactattacgcagactggttcatgtctcttggggtcggcctgctcaccttcgcctccctggaaaccgttggcatctacttcggactagtgtaccgtatccacagcgtcctccaaggcttcatccccctcttccagaagtttaggctgacagggttcaggaagactgactgaggccacttccaggtgggcagcagaggcaggccccagtgtgaccaccactgcgacccctgagcccacaagggcagagcagcattctgagagacgcacaggagaccaagccagaccaataaacagaacacttttccttccatgtggtctgaatgttggcaccagcccgggcaggggcatctcatttgggcagtactgctgtgcaacccagctgcaaggatggaaggcagagggtgggtgtggggcctgaggcttcacagtacctggaccagcaggaagattctgggaggtcactgctctcagaggacagcaagggaccctgagctctgcaagctgtgatctgtctgggttcatggtttttctcaaatcccaggctatctgcatgcgctctcaggtgctaccgagccatcctgggagagatggatggtccactgctttgaggcagggagccatcgggctggggccccttggtgaacctgatgcaggtaagatgctgaggactaaaaccattttttttgcacccaaaaaaaaaggcaggaaaatgatcatcagaaactaaatggcagccaggcatgggggctcacaactgtaatcctcgcactttgggaggctcaggctaagggtcgcttgaagctgagagttcaagaccaacctgggcaacatagtgagacccccatctctacaatttttttttaatgaccaaatgtggcggtacatacctgtacatacctgcggttccagctactcaagaggctgaggcaggaggactgcttgagcccaggagttcagggctgcagtgaggtacgatcaagccactgcactccagcctgggcgacagagcaagatcgtttctctaaaattaaaaaaaaaaaaaaaagacaaataaaaattgcatgtatttgtagtgtacaacatgttttgaaatatgtggaatggctaaatcaagctaattaacatatgtatccctcacataccctttttttatgatgagaacagtaaaaacctactgtcagcaatttgcaaagtatacaatacattgttattaactatggtcaccatgctatgtgattgatatcctgaacttgaactgagttcttgatggtcacagacatgctgttctcaaaactcagaagggtaacttctgaggttttgatttcaagtacttgtatgtaacctaatttaacgggagcccagagtgcacagatcagatatttattaa

SEQ ID NO: 103928 - protein, 859 aa, Artificial Sequence
  derived and/or modified sequence
MGRKLDLSGLTDDETEHVLQVVQRDFNLRKKEEERLSELKQKLDEEGSKCSILSKHQQFVEHCCMRCCSPFTFLVNTKRQCGDCKFNVCKSCCSYQKHEKAWVCCVCQQARLLRAQSLEWFYNNVKSRFKRFGSAKVLKNLYRKHRLESGACFDILGGSLFESNLENEGSISGSDSTFYRQSEGHSVMDTLAVALRVAEEAIEEAISKAEAYGDSLDKQNEASYLRDHKEELTEELATTILQKIIRKQKSKSEQQVEEEPGWPHPQSCSTKVADEGTSASPGGYRAPAALWRSQSAFSITGEEALKTPPVEAPSRQPRDQGQHPRAESALPSWKSVDRLDETNLAPVLQSPDGNWVALKDGAPPPTRLLAKPKSGTFQALEVASSVASAYDEMGSDSEEDFDWSEALSKLCPRSRALPRNPQPQPTQAQSSDQGPIAASPSSALSPNPEAMCSDSETSSAGSSREVGHQARLSWLQRKAPRNPAAEKMRLHGELDVNFNPQLASRETSDSSEPEEAPHTTDRRARRWRRARLGSEEPSKEPSSPSAQLRDLDTHQVSDDLSETDISNEARDPQTLTDTTEEKRRNRLYELAMKMSEKETSSGEDQESEPKTESENQKESLSSEDNSQSVQEELKKKFSAVSLCNISTEVLKVINATEELIAGSTGPWESPQVPPDRQKGMFPRGTDQVRLDEQLTSLEENVYLAAGTVYGLETQLTELEDAARCIHSGTDETHLADLEDQVATAAAQVHHAELQISDIESRISALTIAGLNIAPCVRFTRRRDQKQRTQVQTIDTSRQQRRKLPAPPVKAEKIETSSVTTIKTFNHNFILQGSSTNRTKERKGTTKDLMEPALESAVMY

SEQ ID NO: 103929 - DNA, 2580 bp, Artificial Sequence
  derived and/or modified sequence
atgggacggaagcttgatctgagtggcttaacagatgatgaaactgaacacgttcttcaggtggtgcagagagatttcaatttgagaaagaaggaagaggagagactgtctgaactgaagcagaagctggatgaggaggggtcgaagtgctccatcctgtcaaaacatcagcagttcgtcgaacactgttgcatgaggtgctgctctcccttcacctttcttgtcaatacaaagcgccagtgcggcgattgcaaatttaacgtctgcaagagctgctgctcctaccagaagcatgagaaagcgtgggtctgctgtgtatgtcagcaggcaagactcttacgggcccagtcgctggaatggttttacaataacgtcaagtctcggtttaaaaggtttgggtctgccaaagtgctgaaaaacttgtatcgcaaacatcgactggagtccggcgcatgctttgatatcctgggcggctcactcttcgaatccaacctggaaaacgagggatccatttccggctcagatagcaccttctaccggcagagtgagggccacagtgtgatggatactctggccgtggcactaagagtagccgaggaggcaatagaagaagcgataagtaaagcagaggcctacggtgattctctggacaaacagaacgaagcaagctacctgagggatcacaaagaggaactgacagaagagctggctaccaccatactgcaaaagatcatacgaaagcagaaatctaaaagcgagcagcaagtggaagaagaacctggctggcctcacccccagtcatgcagcaccaaggtagctgatgaaggtacaagtgcgtcccccggcggttaccgcgcccctgcggccctctggaggagtcaatccgccttctctattactggagaggaggctctgaaaaccccccctgtagaagccccttctcggcaacctcgcgaccagggccagcatccgcgggctgaatccgccttgcccagctggaagagcgttgatcgcttagacgagaccaacctggctcctgtgctgcagagtcccgatggaaattgggtggcattaaaggacggagcgcccccgcctaccagactcctggctaaaccaaaatcaggcacgttccaggcattagaggtggcctcctctgtcgcctctgcatatgacgagatgggcagcgactccgaagaggatttcgactggagtgaagctttatctaagctatgcccacggagccgtgcactgccaaggaacccccaaccccagccaacacaggcccagagcagtgaccagggtccgattgcagcctcccctagctccgcactctccccgaatccagaagccatgtgttccgactccgaaacctcctctgctggatcctcccgggaagtgggacatcaggccagattatcatggctccagcgtaaggccccgcgcaatccagctgccgagaaaatgcggctgcacggggagctcgatgtcaacttcaatcctcaactcgcctctcgagaaacatcggactcatcagaaccggaggaggcaccgcacacaacagaccgacgagccaggcggtggcggcgggcccgcctcggatccgaagagccatcaaaggagccttccagccccagtgcccagcttcgcgatcttgacacacaccaagttagcgatgatcttagcgagactgacatttccaacgaagcccgcgacccgcaaacgctcacagataccactgaggaaaagaggcgtaatcggctctacgagttagcgatgaagatgtctgagaaggaaacatcctcaggagaggaccaagaatcggagccaaagaccgagagtgaaaatcagaaggagtccttgagcagcgaggataactcacagagcgtgcaggaggaactcaagaagaagttcagcgccgtgagcctttgcaatattagtaccgaagtgctaaaggtaatcaacgcaaccgaggagcttattgctgggagcaccggaccatgggagtctccccaggttccgcccgataggcagaaaggcatgttcccccggggtaccgaccaggtccgcctggacgaacagctgacttcattagaggagaacgtttatcttgcagctgggaccgtatatggcctggagacccagctgaccgagctcgaagacgctgccagatgtatccactccggaaccgacgagacacatcttgcagacttagaggaccaggtagccacagccgctgctcaagtccaccatgctgaactgcagatttctgacatcgaaagtcgcatttctgccctcaccattgccggcctcaatattgctccttgcgtgcgcttcacgaggcgcagagatcagaagcagcgaactcaagtgcaaaccatagatacatcccgccagcagaggcggaaactgccagctccgcccgtgaaagccgaaaaaatcgagacttcgtccgtgacaacaattaaaacattcaatcataattttatccttcaaggctctagtacaaaccgaactaaggagagaaaggggactacaaaggacctgatggagcccgctctcgaatccgccgtcatgtattag

SEQ ID NO: 103930 - DNA, 2580 bp, Artificial Sequence
  derived and/or modified sequence
atgggccgcaagctcgacctctctggcctaacagatgatgagacagaacatgtactgcaagtcgttcagcgcgatttcaacctacggaagaaggaggaggaacgcctcagcgagctcaagcaaaagctggacgaagagggatccaaatgctctatcctgagcaagcatcagcagttcgtggagcattgttgcatgagatgctgtagcccttttacttttttggtaaataccaaacgacagtgtggcgattgcaaatttaacgtatgtaaatcgtgttgtagctatcagaagcacgaaaaagcctgggtgtgttgcgtttgccaacaggcccgcctgctgcgggcacagtccctcgagtggttctacaataatgtgaagtctaggttcaagagattcggatccgctaaggtgcttaaaaacctctaccgtaaacacagactggagtctggagcttgttttgatatcctcggaggctctctgttcgagtcaaatcttgagaatgagggcagcataagcgggagcgactctaccttctaccgacagtcggagggacactccgtgatggacaccctagccgtggcactgagggtcgcagaggaagccatagaggaagctatttcgaaagcagaagcatacggggactcgctcgacaaacagaatgaggcctcttatcttcgagaccacaaagaagagctgaccgaagaactggcaaccaccatcctgcaaaaaatcatcaggaagcaaaagtcaaaaagcgaacagcaggtggaggaggagcccgggtggccacacccccagtcttgcagtactaaggtggccgatgagggaacatccgctagccccggtgggtatcgggccccagccgccctttggcgctctcagtccgcatttagcattacgggggaggaagcgcttaaaaccccaccagtggaagcccccagtcgtcagccccgcgatcaggggcaacaccccagagctgaaagcgcactgccaagttggaagagtgtggacagacttgacgaaacaaatctcgcacccgtgctgcagtcaccggacggtaactgggtggcactcaaagacggtgctccacctcctacaagactcctggcaaagccaaagtccgggacgttccaagcactcgaggttgcctcatcagttgcaagtgcatacgacgaaatgggttctgattctgaggaggacttcgactggtccgaagccctctcaaagctttgtcctcgcagcagagcgctcccccgtaatccccagccacagccaacccaggcccaatcgagcgatcaaggtcctattgcagcatcgcctagtagcgccttatctccaaacccagaggcgatgtgctccgattctgagaccagctctgccggctcctcccgtgaggttggccatcaggccagactgagctggttgcagaggaaggccccacggaatcccgccgctgagaagatgcgcttacatggcgagctggacgtgaattttaacccccaactggcaagcagggagacaagcgacagcagtgagccggaagaagcacctcataccaccgaccgcagggcccggcggtggcggcgcgctcggctcgggagcgaggaaccctccaaggaaccatcatctccgtctgctcagttgagggacctagatacccatcaggtgagtgatgacctaagcgaaacagacatcagcaatgaagccagggacccccagacattgactgacactacggaagagaagagaaggaacagattgtacgagcttgccatgaaaatgtcggagaaggagacctcatctggcgaagatcaggagtccgaacccaagacggagagcgaaaatcagaaagagtctctgagctccgaggacaattctcaaagcgtgcaggaagaactcaagaagaagttctccgctgtctctttgtgcaacatcagcaccgaggtcctgaaagtcattaatgctaccgaggagctgattgccggcagcaccgggccgtgggagtcaccccaagtgcctcccgacaggcagaagggaatgttcccgcgggggaccgaccaggtgagactcgacgaacagctcacgtccctggaggaaaatgtttacctggccgccgggacagtctatggcctggagactcagctgacagagctggaagatgcagcgaggtgcattcactccggaacagacgagactcatttggctgacttggaagatcaggtggccacagccgctgcgcaggtgcatcatgcagagctacagatttcagatattgaatcccgtattagcgctttgacaatagccggactgaatattgcgccctgcgtgcggtttacccgtcgacgcgatcagaagcagcgtacccaagtgcagacaatcgacacttctcgtcagcagcgacgaaaattgccagcaccgcctgtcaaggcggaaaagatcgaaacgagctcagtgacaacaattaaaactttcaaccataactttatcctgcagggctcgtcaactaaccggacgaaagaaaggaagggaacaacaaaggatctgatggagcctgctctggagtccgctgtcatgtactag

SEQ ID NO: 103931 - DNA, 2019 bp, Artificial Sequence
  derived and/or modified sequence
atggatacattagccgtggcactacgagtggcggaggaggccatcgaggaagccatttccaaagccgaggcttatggtgatagtttggacaagcaaaatgaagccagctatctgagagaccacaaggaagagctgacggaggagcttgctacaactattctccagaaaatcattcgtaagcagaagtccaagtccgagcagcaagtggaagaggaacccggctggcctcacccacagtcatgcagtacaaaagtggccgacgagggcacatccgcatcccccggtgggtatcgcgccccagcggccctctggaggtcccaatctgccttcagtatcacaggggaggaggcactgaaaactccacccgtcgaagcacccagcaggcagccccgcgatcagggacagcatccacgagctgagtcagctcttccgtcatggaagtcggttgatcggcttgacgagactaatctggccccagtgctccaatctccagatgggaattgggtagctttgaaggacggagccccgccccctacacggctgttggccaaacccaagagcggtacctttcaagctttggaggtcgcttcctctgttgcaagcgcctatgatgagatgggcagcgattctgaagaggatttcgactggtctgaagccctgtcaaagctatgccctaggtccagggccctacctcgcaacccgcagccacagcctacccaggctcagtcatccgatcagggccctatcgccgcctcaccaagctcagcactctccccaaaccccgaagccatgtgctctgactccgagacctcttctgctggctcatcaagggaggtcggacatcaagccaggctgtcctggctccagcgaaaggctcccagaaatcccgcagccgaaaagatgcgactccacggcgagctggacgtaaactttaacccccaattagcgagccgtgaaacaagtgattctagcgagccagaagaggctccccacacaacagatcgccgggccaggagatggcgcagagcccggttaggttccgaagagccaagcaaggagccaagctctccctcagcccagttacgagatctcgatactcatcaggtctccgacgacttgtccgagaccgacatcagcaacgaggctcgcgatccccagaccttgacagatactaccgaggaaaagaggcgcaaccggctgtacgagctggctatgaagatgtcagagaaggagactagtagtggcgaagaccaagagagcgaacccaagacggaaagtgagaatcagaaggaaagcctgagtagcgaggacaatagccaatctgtccaggaggaattgaaaaaaaagttctccgccgtctctctttgcaacataagcacagaggtcttgaaagtgattaatgctaccgaagaactgatcgcgggctccactggaccatgggagagcccacaggttccgccagacagacagaaggggatgttcccccgcggaaccgatcaagtcagacttgatgagcagctgacctctttggaagagaacgtttacttagcagccggaaccgtatacgggctcgaaactcaactgacagagctggaggatgccgcgcgatgcatccatagtggcacagacgaaacacacttggcagacctcgaggaccaggtggctacggcagcagcccaggtacatcatgccgagctgcagatctcagacatagagtccaggatttctgcattaacaatcgcgggccttaacatcgccccatgtgtgcggtttactcgaagaagagaccaaaagcagcgaacccaggtgcagacgatcgataccagtcgccagcagcggaggaaactcccagcgccaccagtcaaagccgagaaaattgagacgtccagtgtgacaacaattaagactttcaatcataactttatcctacagggcagcagcactaataggactaaggagcgcaagggaaccactaaagatctgatggagcctgcactggagtccgcagtgatgtactag

SEQ ID NO: 103932 - DNA, 2580 bp, Artificial Sequence
  derived and/or modified sequence
atgggcaggaagctggacctgagcggcctgacagatgatgaaacagaacatgtgctgcaggtggtgcagagggacttcaacctgaggaagaaggaggaggagcggctgtctgagctgaagcagaagctggatgaggagggcagcaaatgttccatcctgagcaagcaccagcagtttgtggagcactgctgcatgcgctgctgcagccccttcaccttcctggtgaacaccaagaggcagtgtggggactgcaagttcaacgtgtgcaagagctgctgcagctaccagaagcatgagaaggcctgggtgtgctgcgtgtgccagcaggcccggctgctgcgggcccagagcctggagtggttctacaacaacgtgaagagccgcttcaagcgcttcggcagcgccaaggtgctgaagaacctgtacaggaagcaccggctggagagcggggcctgctttgacatcctgggcggcagcctgtttgagagcaacctggagaatgaaggcagcatcagcggcagtgacagcaccttctaccggcagagcgagggccacagcgtgatggacaccctggccgtggccctgcgggtggccgaggaggccatcgaggaggccatcagcaaggccgaggcctacggggacagcctggacaagcagaatgaggccagctacctgcgggaccacaaggaggagctgacagaggagctggccaccaccatcctgcagaagatcatcaggaagcagaagagcaagtctgagcagcaggtggaggaggagcccggctggccccacccccagagctgcagcaccaaggtggctgatgagggcaccagcgccagccctgggggctaccgggccccagctgccctgtggaggagccagagcgccttcagcatcaccggggaggaggccctgaagaccccacctgtggaggcccccagccggcagccccgggaccagggccagcaccccagggctgagagcgccctgcccagctggaagtctgtggaccggctggatgagaccaacctggcccctgtgctgcagagcccagatggcaactgggtggccctgaaggatggagcccccccacccacccggctgctggccaagcccaagagcggcaccttccaggccctggaggtggccagctctgtggccagcgcctatgatgagatgggcagtgacagtgaagaagattttgactggagcgaggccctgagcaagctgtgccccaggagccgggccctgcccaggaacccccagccccagcccacccaggcccagagcagtgaccagggccccatcgccgccagccccagcagcgccctgagccccaaccctgaggccatgtgcagcgacagcgagaccagcagcgctggcagcagccgggaggtgggccaccaggcccggctgtcctggctgcagaggaaggcccccagaaatcctgctgctgagaagatgaggctgcatggagagctggatgtgaacttcaacccccagctggccagccgggagaccagtgacagcagcgagcctgaggaggccccccacaccacagaccggcgggcccggcgctggaggcgggcccggctgggcagcgaggagcccagcaaggagcccagcagccccagcgcccagctgcgggacctggacacccaccaggtgtctgatgacctgtctgaaacagacatcagcaatgaggcccgggacccccagaccctgacagacaccacagaggagaagagaagaaaccggctgtatgagctggccatgaagatgtctgagaaggagaccagcagtggagaggaccaggagagcgagcccaagacagaaagtgagaaccagaaggagagcctgagcagcgaggacaacagccagagcgtgcaggaggagctgaagaagaagttctctgctgtgtccctgtgcaacatcagcacagaggtgctgaaggtgatcaatgccacagaggagctgattgctggcagcacaggcccctgggagagcccccaggtgcccccagaccggcagaagggcatgttcccccggggcacagaccaggtgcggctggatgagcagctgaccagcctggaggagaatgtgtacctggccgccggcaccgtgtatggcctggagacccagctgacagagctggaggatgctgcccgctgcatccacagcggcacagatgagacccacctggccgacctggaggaccaggtggccacagctgctgcccaggtgcaccacgccgagctgcagatcagtgacatcgagagccgcatcagcgccctgaccatcgccggcctgaacatcgccccctgtgtgcgcttcaccaggagaagagaccagaagcagaggacccaggtgcagaccatcgacaccagccggcagcagaggaggaagctgcctgcccctcctgtgaaggccgagaagattgagaccagctctgtgaccaccatcaagaccttcaaccacaacttcatcctgcagggcagcagcaccaacagaaccaaggagaggaagggcaccaccaaggacctgatggagcccgccctggagagcgctgtgatgtactag

SEQ ID NO: 103933 - DNA, 2019 bp, Artificial Sequence
  derived and/or modified sequence
atggacaccctggccgtggccctgcgggtggccgaggaggccatcgaggaggccatcagcaaggccgaggcctatggagacagcctggacaagcagaatgaggccagctacctgcgggaccacaaggaggagctgacagaggagctggccaccaccatcctgcagaagatcatcaggaagcagaagagcaagtctgagcagcaggtggaggaggagcccggctggccccacccccagagctgcagcaccaaggtggctgatgagggcaccagcgccagccctgggggctaccgggccccagctgccctgtggaggagccagagcgccttcagcatcactggagaggaggccctgaagaccccacctgtggaggcccccagccggcagccccgggaccagggccagcaccccagggctgagagcgccctgcccagctggaagtctgtggaccggctggatgagaccaacctggcccctgtgctgcagagcccagatggcaactgggtggccctgaaggatggagcccccccacccacccggctgctggccaagcccaagagcggcaccttccaggccctggaggtggccagctctgtggccagcgcctatgatgagatgggcagtgacagcgaggaggactttgactggagcgaggccctgagcaagctgtgccccaggagccgggccctgcccaggaacccccagccccagcccacccaggcccagagcagtgaccagggccccatcgccgccagccccagcagcgccctgagccccaaccctgaggccatgtgcagcgacagcgagaccagcagcgctggcagcagccgggaggtgggccaccaggcccggctgtcctggctgcagaggaaggcccccaggaacccagctgctgagaagatgaggctgcacggggagctggatgtgaacttcaacccccagctggccagccgggagaccagtgacagcagcgagcctgaggaggccccccacaccacagacagaagagcccggcgctggaggcgggcccggctgggcagcgaggagcccagcaaggagcccagcagccccagcgcccagctgcgggacctggacacccaccaggtgtctgatgacctgtctgaaacagacatcagcaatgaggcccgggacccccagaccctgacagacaccacagaggagaagagaagaaaccggctgtatgagctggccatgaagatgtctgagaaggagaccagcagcggggaggaccaggagagcgagcccaagacagaaagtgagaaccagaaggagagcctgagcagcgaggacaacagccagagcgtgcaggaggagctgaagaagaagttctctgctgtgtccctgtgcaacatcagcacagaggtgctgaaggtgatcaatgccacagaggagctgattgctggcagcacaggcccctgggagagcccccaggtgcccccagaccggcagaagggcatgttcccccggggcacagaccaggtgcggctggatgagcagctgaccagcctggaggagaatgtgtacctggccgccggcaccgtgtatggcctggagacccagctgacagagctggaggatgctgcccgctgcatccacagcggcacagatgagacccacctggccgacctggaggaccaggtggccacagctgctgcccaggtgcaccacgccgagctgcagatcagtgacatcgagagccgcatcagcgccctgaccatcgccggcctgaacatcgccccctgtgtgcgcttcacccggcggcgggaccagaagcagaggacccaggtgcagaccatcgacaccagccggcagcagaggaggaagctgcctgcccctcctgtgaaggccgagaagattgagaccagctctgtgaccaccatcaagaccttcaaccacaacttcatcctgcagggcagcagcaccaacagaaccaaggagaggaagggcaccaccaaggacctgatggagcccgccctggagagcgctgtgatgtactag

SEQ ID NO: 103934 - DNA, 5077 bp, Artificial Sequence
  derived and/or modified sequence
ggccaggctggccctggctgcctgcggcgcgggcgcctccctcgcagccgctgctgccgacgccgctgcgctcccgcctcctgtcggttcccgggttcccgctgcggctgcggttctggcagccgagcccccgcggtgctgcagcccagctttagcgcgcagaccgacccgcgccccttcttcgccgccggcagcctctaatccacgcggcgcgttgcggcaggtgccctgggcgtactgaggcgcggtggcctgagcccggccgccatcgatgaccccggtcgcggacttgcttcaggctggccaccccccgtcttgtttcatcatctgtgttgagtaaccatggggaggaagctggacctgtctggtttgactgatgatgaaacagagcatgttcttcaggtggttcaaagagacttcaatcttcgcaaaaaagaagaagaacgactaagtgagctgaagcagaagctggatgaggaaggcagcaagtgcagcatcctctcgaagcaccagcagtttgtggagcactgctgcatgcgctgctgctcgcccttcaccttcctcgtcaacaccaagcgccagtgtggagattgcaaattcaatgtctgcaagagctgctgctcctaccagaagcacgaaaaggcctgggtctgctgcgtctgccagcaagcgaggcttctgagggcccaatctctggaatggttctacaataatgtgaagagccgcttcaagcgctttggcagtgccaaggttctgaagaacctgtacaggaagcaccggctggagagtggcgcgtgcttcgacattctaggaggaagcctttttgagtcaaacctggagaatgaaggaagcatttctggcagtgattcaacattttataggcagtcagaaggacatagtgtgatggacaccttggctgtggccctacgggtggctgaagaggccattgaggaagcaatttccaaagcagaggcatatggggacagcctggacaagcaaaatgaggccagttacctgcgggaccacaaggaggagctaactgaggaactggccacgacaatcctgcagaagattatacgaaaacagaagagcaaaagtgagcagcaagtggaagaagagccaggatggccacatccccagagttgcagcacaaaggtggcagatgaggggacctcagcatcccctggaggctaccgtgctcccgctgccctctggaggtcccagtctgccttctcaatcactggagaagaagccctgaagacccctccagtggaggctccatcgaggcagccaagggaccaaggccaacacccgagagcagagtctgctctgcccagctggaagagtgtggacaggctggatgaaacaaacctggccccagttttgcagagccccgacgggaactgggtggccctgaaggatggcgctccaccccccacccgactactggccaaacctaagagcgggacgtttcaggccctggaggtggcctccagtgtggcatctgcctacgatgagatgggctccgatagcgaggaagactttgactggagtgaggccttgagcaagctgtgtcccaggtcccgggccctgcccaggaacccccagcctcagcccacacaggcccagagctctgaccaaggccccatagctgcctccccatcctctgcactctcccccaaccctgaggccatgtgctctgactcggagacctcctccgcaggctcttcccgagaagttgggcaccaggccagactgtcctggttgcagaggaaggcccccaggaaccctgcagctgagaagatgcgcttgcatggagagctggacgtgaacttcaacccccagttggccagcagggagacctcggacagcagcgagccggaggaggccccccacaccacagaccggcgggccaggaggtggagaagagcccgactgggctcagaagagccaagcaaagaaccatcttcccccagcgcccagctccgggatctagacacacatcaggtgtcggatgatttatcagagacagacatcagcaatgaggctcgggatccccagactctcacagacaccacagaggagaaacggagaaacaggctgtacgagttagcaatgaaaatgagtgaaaaggagacttcttcaggggaggatcaggagtctgagcccaagacagaatctgagaaccagaaggaaagtctgtcctctgaagacaacagccagagtgtccaggaagagctgaagaagaagttttctgctgtttctctctgcaacatctccacagaagtcctgaaagtcatcaatgccacagaggagttgatagcaggatctacagggccctgggagtccccacaagtccctcctgacagacagaaggggatgtttcctcgtgggacagaccaagtgagactggatgagcagctgacttccctggaagaaaatgtatacctggcagcaggcactgtgtatggactggagacccagctgactgagctagaagatgccgcccgctgcatccacagtggcactgatgagacccatctggcggatctggaggaccaggtggccacggctgcagcccaagtccaccatgctgaactccagatttcagatattgagagccggatttcagccctgaccattgcaggattaaacatagcaccatgtgtgcgcttcacaagaagacgggatcagaagcaaaggacccaggtacaaaccatagatacatcaaggcagcaaaggaggaaactgcctgctccaccggtgaaagctgaaaaaattgagacatcttcagtgactaccattaaaacatttaaccacaacttcattctccaaggctcctcaacaaacaggactaaggaaaggaaaggcaccaccaaggatttgatggagcctgctctggagtcagctgtgatgtactgacaccatggaattccactgccagtgacccactgcctccggccgtacacgacagtgccttgacccaacagccatcgagtactgtatgtatttccacctgaggagaaggcctggggaggccacagtgcaccattgcacagggctgtcctgatacctcatccagaaagccgtctcagacttcagcactgcggtcttgcccactctctgccttaggctcccaggggaatccaagacagaaaatgaagacactggcttccaacagcagcgctccatgtttaagatacatattttccctgtttgctttgctactgtatgttgactttaagatctttttttaaatacatttgattcagctagtattccatgtcaacaatttgtccaaaggaaaactgctggagggaggtggagggaggaaggtgggaattattatttaatacatcattaatgcttattaatctctcacaagcatctttgtcttgcaaatcctaagggaaaagcaagtccctgcagtgagcactagggacagtctaatttggggattgctcaaccatcaagactgcaggtctcccttcagccacctccttcctgctaaaagcttagcctaccacactaccagtcattcccatcgctttgcaatcacaagccacaggatgagaagttctgactcactcatgccatgcccagggctatctgaaacaatgtctcattaagaatttagggttcttccatgggcttactgacagttgcccagatctgaaggggaaagggtcttgagaaagaccatcactggctcaactttagggcactgtccagagtcaacatgatgtggtttagcagtgatcacatctaaacaaagtttaggtaaatgaattatcgcagagaaaaaccacatgagaaaatttttgtactccaaatttacttcccaataaatattcagcaaagtagtaaaatgaccttaaagataaaaatgattagggaatagccttagaaaatttataggtataaaaaattcaaggacaaactgtgcatttaatggacacaagaattgactctaactccatgtctgtggtttctttgaacccatatcaaatgtatgactatttagagtgtttataagagataatggaactgaactttcactcaattaattgggcattaacaaccttcttttatgtttgttcctgatatagtctgaatcttaggaagaaggtaaaagaaaggaggcaagagaatagttatgatgaatatgtgttaagtgcctgctctgaaggaggcaatgttcttctcatttgaatccttatggcaaccttattcaataggttttcccatatttcagatttaataactgaaggccagagagattaatttgccaaagccacacctttatgctaattatgattggaatgcatcacaaaagcctaactctgttgttttcaacctctacgttattttgctgctatgtgcatttccagatctgattttctgctaacttgtgtgctatgatccactcctgatgggggtctacattaatcttccagtactccttgctgatgctgtgttatgtgtcatctaacagaaatgactcctttgaaataagtaaatctttggctttttgttctgttggtgtgattcaaagcaaaacaaacaaacaaaaacaaattttaagaacacaacaaaaaagatttgacttccgaatagaatgttttctttaagaggcatgaaaagcaactattgttgtgttacagtgttaaaaatattcagttttctttgacaaaaatgtgtactgtgtaagccttgcaaacaaaaaacaacaaaaaagaagcagcagcagcagcctgctgtgtggcatctgaacttttataaaggtttccttgtgccaaataagtgcaaagatttaatttactattaaaaaccataagcatatgttatagttccagaagaattattttgtcatcaagtgattttgatctttagtgtcaatatttatatttagattaatttttataaatgaaaatattttaatggtttaagaaaatgaggacaacaggataatatctttgatgacttctgaaagttatgcttcccttcatgttatatgcacattgccaagaattactgtcaagagaaatgataagtaaaagtcatttatgaaaataaa

SEQ ID NO: 103935 - DNA, 2678 bp, Artificial Sequence
  derived and/or modified sequence
aacccggcggttccgcagctgtgtttgggagacttgggggcgcattagcctggacagctccctgatcggtcttgtttcatcatctgtgttgagtaaccatggggaggaagctggacctgtctggtttgactgatgatgaaacagagcatgttcttcaggtggttcaaagagacttcaatcttcgcaaaaaagaagaagaacgactaagtgagctgaagcagaagctggatgaggaaggcagcaagtgcagcatcctctcgaagcaccagcagtttgtggagcactgctgcatgcgctgctgctcgcccttcaccttcctcgtcaacaccaagcgccagtgtggagattgcaaattcaatgtctgcaagagctgctgctcctaccagaagcacgaaaaggcctgggtctgctgcgtctgccagcaagcgaggcttctgagggcccaatctctggaatggttctacaataatgtgaagagccgcttcaagcgctttggcagtgccaaggttctgaagaacctgtacaggaagcaccggctggagagtggcgcgtgcttcgacattctaggaggaagcctttttgagtcaaacctggagaatgaaggaagcatttctggcagtgattcaacattttataggcagtcagaaggacatagtgtgatggacaccttggctgtggccctacgggtggctgaagaggccattgaggaagcaatttccaaagcagaggcatatggggacagcctggacaagcaaaatgaggccagttacctgcgggaccacaaggaggagctaactgaggaactggccacgacaatcctgcagaagattatacgaaaacagaagagcaaaagtgagcagcaagtggaagaagagccaggatggccacatccccagagttgcagcacaaaggtggcagatgaggggacctcagcatcccctggaggctaccgtgctcccgctgccctctggaggtcccagtctgccttctcaatcactggagaagaagccctgaagacccctccagtggaggctccatcgaggcagccaagggaccaaggccaacacccgagagcagagtctgctctgcccagctggaagagtgtggacaggctggatgaaacaaacctggccccagttttgcagagccccgacgggaactgggtggccctgaaggatggcgctccaccccccacccgactactggccaaacctaagagcgggacgtttcaggccctggaggtggcctccagtgtggcatctgcctacgatgagatgggctccgatagcgaggaagactttgactggagtgaggccttgagcaagctgtgtcccaggtcccgggccctgcccaggaacccccagcctcagcccacacaggcccagagctctgaccaaggccccatagctgcctccccatcctctgcactctcccccaaccctgaggccatgtgctctgactcggagacctcctccgcaggctcttcccgagaagttgggcaccaggccagactgtcctggttgcagaggaaggcccccaggaaccctgcagctgagaagatgcgcttgcatggagagctggacgtgaacttcaacccccagttggccagcagggagacctcggacagcagcgagccggaggaggccccccacaccacagaccggcgggccaggaggtggagaagagcccgactgggctcagaagagccaagcaaagaaccatcttcccccagcgcccagctccgggatctagacacacatcaggtgtcggatgatttatcagagacagacatcagcaatgaggctcgggatccccagactctcacagacaccacagaggagaaacggagaaacaggctgtacgagttagcaatgaaaatgagtgaaaaggagacttcttcaggggaggatcaggagtctgagcccaagacagaatctgagaaccagaaggaaagtctgtcctctgaagacaacagccagagtgtccaggaagagctgaagaagaagttttctgctgtttctctctgcaacatctccacagaagtcctgaaagtcatcaatgccacagaggagttgatagcaggatctacagggccctgggagtccccacaagtccctcctgacagacagaaggggatgtttcctcgtgggacagaccaagtgagactggatgagcagctgacttccctggaagaaaatgtatacctggcagcaggcactgtgtatggactggagacccagctgactgagctagaagatgccgcccgctgcatccacagtggcactgatgagacccatctggcggatctggaggaccaggtggccacggctgcagcccaagtccaccatgctgaactccagatttcagatattgagagccggatttcagccctgaccattgcaggattaaacatagcaccatgtgtgcgcttcacaagaagacgggatcagaagcaaaggacccaggtacaaaccatagatacatcaaggcagcaaaggaggaaactgcctgctccaccggtgaaagctgaaaaaattgagacatcttcagtgactaccattaaaacatttaaccacaacttcattctccaaggctcctcaacaaacaggactaaggaaaggaaaggcaccaccaaggatttgatggagcctgctctggagtcagctgtgatgtactga

SEQ ID NO: 103936 - DNA, 2664 bp, Artificial Sequence
  derived and/or modified sequence
agaaacgagcagtagcactgtgctgttccttcactctggtattgctctctacccagagccctgtgtcttttcttaagaagactacctggcttatcctctgtctgggcttttctggccatgaggacatggagtgaagattttggagctctgtgccctgtgtcctggcgtttaattatttctcaagacacgtgagctaaatttgagtagaagagcttggcagaaagaaaaccaccagttacggcttctgagggcccaatctctggaatggttctacaataatgtgaagagccgcttcaagcgctttggcagtgccaaggttctgaagaacctgtacaggaagcaccggctggagagtggcgcgtgcttcgacattctaggaggaagcctttttgagtcaaacctggagaatgaaggaagcatttctggcagtgattcaacattttataggcagtcagaaggacatagtgtgatggacaccttggctgtggccctacgggtggctgaagaggccattgaggaagcaatttccaaagcagaggcatatggggacagcctggacaagcaaaatgaggccagttacctgcgggaccacaaggaggagctaactgaggaactggccacgacaatcctgcagaagattatacgaaaacagaagagcaaaagtgagcagcaagtggaagaagagccaggatggccacatccccagagttgcagcacaaaggtggcagatgaggggacctcagcatcccctggaggctaccgtgctcccgctgccctctggaggtcccagtctgccttctcaatcactggagaagaagccctgaagacccctccagtggaggctccatcgaggcagccaagggaccaaggccaacacccgagagcagagtctgctctgcccagctggaagagtgtggacaggctggatgaaacaaacctggccccagttttgcagagccccgacgggaactgggtggccctgaaggatggcgctccaccccccacccgactactggccaaacctaagagcgggacgtttcaggccctggaggtggcctccagtgtggcatctgcctacgatgagatgggctccgatagcgaggaagactttgactggagtgaggccttgagcaagctgtgtcccaggtcccgggccctgcccaggaacccccagcctcagcccacacaggcccagagctctgaccaaggccccatagctgcctccccatcctctgcactctcccccaaccctgaggccatgtgctctgactcggagacctcctccgcaggctcttcccgagaagttgggcaccaggccagactgtcctggttgcagaggaaggcccccaggaaccctgcagctgagaagatgcgcttgcatggagagctggacgtgaacttcaacccccagttggccagcagggagacctcggacagcagcgagccggaggaggccccccacaccacagaccggcgggccaggaggtggagaagagcccgactgggctcagaagagccaagcaaagaaccatcttcccccagcgcccagctccgggatctagacacacatcaggtgtcggatgatttatcagagacagacatcagcaatgaggctcgggatccccagactctcacagacaccacagaggagaaacggagaaacaggctgtacgagttagcaatgaaaatgagtgaaaaggagacttcttcaggggaggatcaggagtctgagcccaagacagaatctgagaaccagaaggaaagtctgtcctctgaagacaacagccagagtgtccaggaagagctgaagaagaagttttctgctgtttctctctgcaacatctccacagaagtcctgaaagtcatcaatgccacagaggagttgatagcaggatctacagggccctgggagtccccacaagtccctcctgacagacagaaggggatgtttcctcgtgggacagaccaagtgagactggatgagcagctgacttccctggaagaaaatgtatacctggcagcaggcactgtgtatggactggagacccagctgactgagctagaagatgccgcccgctgcatccacagtggcactgatgagacccatctggcggatctggaggaccaggtggccacggctgcagcccaagtccaccatgctgaactccagatttcagatattgagagccggatttcagccctgaccattgcaggattaaacatagcaccatgtgtgcgcttcacaagaagacgggatcagaagcaaaggacccaggtacaaaccatagatacatcaaggcagcaaaggaggaaactgcctgctccaccggtgaaagctgaaaaaattgagacatcttcagtgactaccattaaaacatttaaccacaacttcattctccaaggctcctcaacaaacaggactaaggaaaggaaaggcaccaccaaggatttgatggagcctgctctggagtcagctgtgatgtactgacaccatggaattccactgccagtgacccactgcctccggccgtacacgacagtgccttgacccaacagccatcgagtactgtatgtatttccacctgaggagaaggcctggggaggccacagtgcaccattgcacagggctgtcctgatacctcatccagaaagccgtctcagact

SEQ ID NO: 103937 - DNA, 2580 bp, Artificial Sequence
  derived and/or modified sequence
atgggccggaagctggacctgagcggcctgaccgacgacgagaccgaacatgtgctccaagtggtgcagagagactttaaccttaggaagaaggaggaggagcgattgtctgagctaaagcagaaactcgacgaagaaggctcaaagtgcagtatccttagtaaacatcagcaattcgtggagcactgttgcatgaggtgctgtagcccatttacatttttagtcaatactaagcggcaatgcggagactgtaagtttaatgtatgcaagagctgttgtagttaccaaaaacacgaaaaggcttgggtgtgctgcgtttgccaacaggcacggcttctcagggcgcaaagcctggagtggttttataacaatgtcaaatcccgcttcaaacgatttggctcagcaaaagtgctcaaaaacctgtacaggaaacacagactggagtccggtgcgtgctttgacatcctgggagggtcattgttcgagtccaatctggagaatgaaggatctatttctggaagcgacagcactttttataggcaatccgaaggccattctgtaatggacacgctcgcagtggcgctgcgcgtggcggaggaagcgatcgaggaagctatctccaaggcagaggcctacggggattccctcgacaaacagaacgaagctagctatctgcgtgaccataaggaggagttgactgaagaactagcaacgaccatcctgcagaagatcatcagaaaacagaaatctaagagcgagcagcaggtggaagaggagcccggatggccgcaccctcagtcttgcagtacgaaggtagcagatgaaggaacatcggcctctccaggtggctaccgtgctccggccgcgctgtggaggagccagagtgcattttccattaccggggaggaagctctcaaaacaccacccgtggaagcgccttctcgacaacccagggaccagggacagcaccccagagctgagtcggccctgccttcctggaaatccgtcgatcgcctggatgagacaaacctggccccagtgctgcagagccctgatggtaattgggttgccctgaaagacggtgctcccccaccgacccggctactggctaaacccaagtcaggcacctttcaggcattggaggtcgctagttcagtggcaagtgcctacgatgaaatggggtccgactccgaggaagattttgattggagtgaggctctttccaagctttgcccgcgttctagggcgctcccccggaacccacagccgcagcctacccaggctcagtcatcagaccagggacctatcgctgcaagcccctcctcagctctctcaccaaacccagaggcaatgtgttcagattccgaaacgtcttccgccgggtcttcgcgtgaagtgggacaccaggctagactgtcatggctccagcgaaaggcccctcggaacccagccgcagagaaaatgcggctccatggagagctggatgtaaatttcaatcctcaactcgcctcccgcgagaccagcgactccagcgagcccgaggaggctccacacaccaccgatcgtagagctcgacgctggcggagggctaggctcgggtctgaggaaccgagtaaagagcctagttcgcccagtgcccagctcagggatctggatactcatcaagtgagtgatgatctttcagaaacggacatttccaatgaggcccgcgatccacagacgctgacagataccaccgaagaaaagaggcgtaacagactgtatgagctcgccatgaagatgtctgagaaggagaccagttcgggcgaagatcaggagagcgagccgaagaccgaaagcgaaaatcagaaggagagtctctccagcgaagacaactctcagagcgtccaagaggaactgaagaaaaaattctccgccgtatctctttgcaatatttcaactgaagttctcaaggtgatcaacgccacagaggaattgatcgccgggtcaaccggaccatgggagagcccgcaggtcccacccgatcggcaaaagggtatgtttccccggggaactgatcaggttcgcttagacgagcaacttacctccctggaagaaaatgtctatttggctgccgggactgtgtacggtctggaaactcagttaacagagctggaagatgctgccagatgcatacactcaggtacagacgagactcatctggccgatctcgaggatcaggttgcaacagcagctgcccaggtgcaccacgccgaattacagatttctgacatcgagagtcggatttcagcattgacaatcgccgggctaaacattgcgccttgtgtgcgcttcacaagacgccgagatcaaaagcagaggacgcaggtccaaaccatcgatacaagccgccagcagcgacgaaagctccccgctccaccagtgaaggccgagaagattgaaacatcatctgtcacgaccatcaagactttcaaccataactttattttgcagggatcctcgacaaatcgaacaaaagagagaaagggcaccacgaaggatctcatggagcctgccctcgaatccgccgtgatgtattag

SEQ ID NO: 103938 - DNA, 2580 bp, Artificial Sequence
  derived and/or modified sequence
atgggccggaagctggacctgagcggcctgaccgacgacgagaccgaacatgtgctccaagtcgtgcaacgcgacttcaaccttaggaagaaggaagaggagcgtctctctgagctaaaacagaaactcgacgaagaaggctctaaatgctctatcctctcaaaacatcagcagtttgtggagcattgctgcatgcggtgctgttcaccgtttacttttctggtgaacaccaagcgacagtgtggtgattgcaaatttaacgtctgtaagtcgtgctgctcatatcagaagcatgagaaagcctgggtatgttgtgtctgccagcaagcgcggctgctccgggcccagagcctggagtggttctacaataacgtaaagtcccgcttcaagcgattcggctccgctaaagtgttgaagaacctctacaggaaacaccgtcttgagtctggcgcctgtttcgacatactgggggggagcctattcgaatccaatttggaaaatgagggcagtatctcaggatcagactcgactttctatcgtcaaagcgaggggcacagcgtgatggataccttggctgttgcattgcgcgtggccgaggaggctatagaggaggccatctcaaaggcagaggcatatggcgattccctcgataaacagaacgaggcttcatatttgagagaccataaagaggaactgacagaagagctcgctacaacaatcctgcagaaaataattagaaaacagaaatccaagtccgagcaacaggtagaggaggagccaggctggcctcacccccagtcatgcagcacaaaggtggccgacgaagggacatctgcatcaccgggcggataccgcgcaccagccgctctttggcgcagccaaagcgctttctctattactggcgaggaagctctcaagactcctcccgttgaggcaccttctcgccagccccgagatcagggccagcatccaagggctgagtctgcactcccaagctggaagtctgtggacagacttgacgaaaccaatctggcccccgtgctgcagtctccagacggaaattgggtcgctcttaaggacggggcccctcccccaacgcggctcctggctaagcctaagtccgggacattccaagccctggaggtggcatcatctgttgctagcgcctatgacgaaatggggtccgattctgaggaggatttcgattggtctgaggccttgtcgaagctgtgcccccgaagcagagccttgccgagaaatccgcagccccagccaacccaggctcagagctccgaccaggggcctattgccgccagccctagctctgcgctgtccccgaatccagaggctatgtgcagtgacagcgaaaccagctccgcaggttcttctcgagaggtggggcatcaggctcgcctctcctggttacagcgaaaggccccgcggaacccggcagcggaaaagatgcggttgcatggggagctggatgtaaactttaacccacagctggcttcacgggagactagtgactcaagcgaaccagaggaggccccacataccacggacagacgagcccgccgttggcggagggcgcggctcggcagcgaagagccctcaaaggagccttctagtccatccgctcagctgagggacttagacacccaccaggtctctgacgacctctccgagactgacatttccaatgaagcccgagaccctcagactttgaccgacaccacagaggagaaacgacgaaatcgtctttacgagctggccatgaaaatgtccgagaaagaaacctcttcaggcgaggaccaagaatcggagcccaaaaccgagtcggaaaatcaaaaggagagcctgtcaagcgaagacaattctcagagcgtgcaggaggaactcaaaaaaaagtttagtgccgtgagcctgtgtaacatctctactgaagtgttgaaggtcattaatgccactgaggagctgattgcaggcagcacaggcccctgggaatctccccaagtcccgcccgacaggcagaagggtatgtttcctcgggggaccgatcaggtccgcttggatgaacagctcacgagcctggaggagaacgtgtacctcgccgcgggaactgtctacgggcttgagactcagttgactgagctggaggatgctgcaagatgcattcactccgggacagacgagacacacctggctgatctggaggatcaggtggcgactgcagctgcacaagtgcaccacgcagagctgcagatcagcgacatcgagagcaggatcagcgccttgactatcgctggcctgaatattgccccctgtgtgcgcttcactagacggcgagatcaaaaacagcggacgcaggtgcagacaatcgacacctcaagacaacagcggcggaaactgccggccccacccgtcaaggctgagaaaatcgagactagcagcgtcactactatcaaaacatttaaccacaatttcatcctgcaaggcagctcaaccaatcgtaccaaggagcggaaaggcacaaccaaggatcttatggaaccagccctcgaaagcgccgtgatgtattag

SEQ ID NO: 103939 - DNA, 2019 bp, Artificial Sequence
  derived and/or modified sequence
atggacaccctggccgtggccctgcgggtggccgaggaggccatcgaggaagccatctctaaagccgaggcctatggcgacagcttagacaagcagaatgaggcctcctaccttagggatcataaggaggagctgactgaggaattggccactactattctgcagaagatcatcaggaaacaaaagtccaagtccgagcaacaagtggaggaggagcccggatggccccacccccagagttgtagcaccaaagtggctgacgagggcacaagtgcgagccctggaggttatcgtgcccccgccgcactctggcgatcacagagcgcgttctcaatcaccggagaggaagccctaaaaacccctcctgtggaggccccttcacgtcagccccgggatcagggacagcatccgcgggctgagagcgctctgcctagctggaagtcagtcgataggttggatgaaacaaatctagcgccagtgctgcagagccctgacgggaattgggtggcccttaaggacggcgcgccaccgcccacacgcttgctggccaaaccaaagtccggaacttttcaagccctggaggttgctagtagcgtcgcctcagcctacgatgagatgggatctgatagcgaggaggacttcgattggtccgaggcgcttagcaagctgtgtcctcgcagccgcgcactcccccgaaacccccagccccagcccacacaggcgcagagtagtgaccaggggccaatcgccgcaagcccaagttctgccctcagtcctaatcctgaagctatgtgtagcgactctgagactagcagcgctggcagtagtcgtgaggtgggccaccaggctcggttgtcttggctccaaagaaaggcgccacggaaccctgctgctgaaaagatgaggctgcacggggagttagacgtaaacttcaacccgcagctggcgtcccgggagacaagcgattcttcagagcctgaagaggctcctcatacaacggataggcgggcgagacggtggcgaagagcaaggctagggtccgaggaaccctctaaagaacctagttccccgtcggcccaattacgggaccttgatactcatcaggtatctgacgatctgagcgagaccgacattagtaacgaagccagagatccacagacgctgacggacacgaccgaagaaaagcggaggaacagactatatgaactcgcgatgaagatgtctgaaaaggaaactagttccggcgaagaccaagagtctgaaccgaagaccgagagtgagaatcagaaggagtccctgagttctgaagacaacagtcaatcagttcaggaggagctgaagaagaaattctcggcagttagcctgtgtaatatctctacagaagtactcaaggttataaacgccaccgaggagctaatagccggctccacaggcccgtgggagtctcctcaggtgccacccgatcggcaaaagggaatgttccctaggggcacagatcaggttagactggacgaacagctaacttccctggaggagaatgtctatttagctgctggcactgtgtatggcctggagacccagcttacggaacttgaagatgctgccagatgtattcacagtggcacggatgaaacccatcttgcagacctcgaagatcaggtcgcgacggcagccgcgcaggtgcatcacgccgaactgcagataagcgacatcgagtcgagaatcagcgccctgaccatcgccggactcaatatagctccctgcgttcgatttactaggagacgtgaccagaaacagcgtacccaggtgcagaccattgatacgtcaaggcaacaacgccggaagctcccagctccccccgtgaaagcggagaagatcgaaactagtagcgtaaccaccatcaagacctttaatcacaatttcatcttgcaaggatccagtacaaaccgcacaaaagagaggaagggcactactaaggatctgatggagcctgccctagaatccgcagtgatgtattag

SEQ ID NO: 103940 - DNA, 2580 bp, Artificial Sequence
  derived and/or modified sequence
atgggcaggaagttagatcttagcggcctgaccgatgatgagacagagcatgtgctgcaggtggtgcagcgggactttaatctgaggaagaaggaagaggagcgcctttctgagctgaaacagaagcttgatgaagaaggctccaagtgttccatcctcagtaaacatcagcagtttgtggagcactgctgcatgaggtgttgctcccctttcaccttcttagttaacacaaagcgacaatgtggagactgcaagtttaacgtttgtaaatcctgctgctcctaccagaagcacgaaaaggcctgggtatgctgcgtatgccagcaggcgaggcttttacgtgctcaaagtttggaatggttttacaataatgtgaagtcgcggtttaaaagattcgggagtgccaaggtcctgaagaatctctacaggaagcacagacttgagtcaggggcttgctttgacatcctgggaggatcactcttcgagtctaatctggaaaacgaaggcagtatctccggaagcgactccaccttctataggcagtcggagggacattctgtcatggatacactcgcagtggcactccgcgttgcagaggaagccatagaggaggcaatcagcaaagccgaagcctacggagattctcttgataagcagaacgaggcctcttatctcagagatcataaagaggaacttaccgaggagctcgcaacaactatcctccagaaaatcatcagaaagcagaagtctaaatccgagcagcaagtggaagaagaaccaggatggccccaccctcagagctgttctactaaggttgccgatgaagggacttctgctagccctggtgggtatagggctccagcggctctgtggaggagtcagagtgcatttagtatcaccggcgaggaagcgttaaagaccccaccagttgaggctccgtcacgtcagcccagagaccagggtcagcatcctcgcgctgagtctgcgcttccaagctggaagtcggttgatcgcttggatgaaacaaatctggctccagtactgcagagtcctgacggtaactgggttgcactcaaggacggagccccaccacccacaagactgctggcaaaacccaagtcaggaacattccaggctctcgaggtggccagcagtgtcgctagcgcttacgacgagatgggctcagactcagaagaagattttgattggtccgaggcactttctaagctgtgcccccgatcccgagctcttccacgcaatcctcagcctcagcctacgcaggcacagagctccgaccaaggcccaattgccgctagtccctcatctgctctctccccaaaccctgaagccatgtgctcggactccgagacctcttcggcagggtccagtcgcgaggtcggtcaccaggcacggcttagttggctccagcgcaaggcaccgaggaatcccgcagctgagaaaatgcgtttgcacggcgaactagacgtgaatttcaacccccagctggcttctcgcgagacatctgactcttccgaacccgaagaagctccacatacaacggaccggagagcaagaagatggcggcgagcaagactgggcagtgaagaaccttcaaaggaaccctcttcacctagcgcccagctgcgagacctggatacacaccaggtgagtgatgacctgagtgaaacagacatatcaaatgaggctcgggaccctcagacgctgactgatacgacagaggagaagcgaagaaatcgcctgtacgagttggctatgaaaatgtctgaaaaggaaacctcaagtggcgaggatcaggagtccgaacccaagactgagagcgaaaaccaaaaagagagcctatcatctgaggacaactcccagtcagtccaggaggaactcaagaagaagttctcggccgtaagcctgtgcaatatttctacagaagttctgaaggtgatcaatgcaacggaagagctgattgccggatctactggtccctgggagtccccacaagtgcctcccgacagacagaagggcatgttcccacgtggcaccgaccaggtacgtcttgacgagcagctgacctcactggaggagaacgtctacctcgccgctggaacagtttatgggctggaaactcagctcacagagctggaggatgcggctagatgcattcacagcggcacagacgagacacacttggcagacctagaggaccaggtcgcgacagctgctgctcaggtgcaccacgccgaactgcagataagtgatatcgagagtaggatcagtgctcttaccattgccggtttaaatatcgccccatgtgtccgatttacccgccgaagggaccagaaacaacggacccaagtgcaaaccatcgacacaagtcggcagcagcggcgaaaactccctgccccaccagtcaaggccgaaaaaatcgaaacatccagtgtgactactatcaaaacattcaatcacaattttattttacagggcagcagtactaacagaacaaaggagagaaaggggacaacgaaggaccttatggagcccgctttggaaagcgctgtgatgtactag

SEQ ID NO: 103941 - DNA, 2580 bp, Artificial Sequence
  derived and/or modified sequence
atgggcagaaagcttgacctttccggactgactgacgatgagactgaacatgtcctgcaggtagtgcagcgcgatttcaacctccggaagaaagaggaagagcgactgtccgaactgaaacagaaactcgacgaagaaggatccaaatgttccattttgtctaaacaccagcagtttgtcgaacattgctgcatgaggtgttgcagtccctttacattcctggtcaacactaaaagacagtgtggcgattgcaaattcaatgtctgtaagagctgttgttcctatcagaagcatgagaaagcctgggtgtgttgtgtatgtcagcaggcaagattacttagggcccagagtcttgagtggttttataacaacgtgaagtcaaggttcaagagattcggctctgcaaaagttcttaaaaacttgtataggaaacacaggctggaaagcggagcctgtttcgacatcctgggaggcagcctgtttgagagcaatctcgaaaatgagggcagcatctcaggcagcgactctacgttctatcgacaaagcgagggtcactccgtcatggacaccctggccgttgcattgagggtggcggaagaagcaatagaggaggctatatctaaagctgaagcctacggtgacagtctcgacaagcaaaacgaagcaagttacttgagagaccacaaggaagagctgacagaggaactggccacaacgattctgcagaaaattattagaaagcagaaatccaaaagtgaacagcaggtggaggaggagcccggatggcctcaccctcagtcatgcagcactaaggttgccgatgagggaacgtctgcaagccccggtggatatcgcgcacccgctgctctgtggcgaagccagtctgccttttctatcacgggggaagaagctcttaaaacccccccagtcgaagcgccaagccgacagccgcgagatcagggacagcatccacgagctgaatcagctctgccctcttggaagagtgtcgatcggcttgatgaaacgaacctggctccagttcttcagtcgccagacggaaattgggttgccctgaaggatggcgctccgcctcccacacggcttttagccaaacccaagtcaggtaccttccaagctctagaggtggccagtagtgtagcctccgcctatgatgagatggggagtgattcagaggaagatttcgattggtctgaagcactgagcaagctgtgtccacggagtagggccctgcctcgcaacccccaacctcagcccacccaggcacagtcttccgaccaaggaccaatcgcggcatccccaagttctgcactttcacccaacccagaggccatgtgtagtgattctgaaactagttctgctggcagtagccgcgaagtaggacaccaggcaaggctgagttggttgcagcggaaagctccccgaaatcctgccgcagaaaagatgagactccatggggagcttgacgtgaattttaacccgcaacttgctagccgggaaacctctgatagctctgagcccgaggaggctccccacacaactgaccgccgtgccaggcgatggagacgggctcgcctgggttccgaagaaccgagcaaggagccatcaagtccttctgcccagctaagagatctggatacccaccaggtcagtgacgatctctcagaaaccgacatcagcaatgaagctcgggacccacaaactctgactgacactactgaggaaaagcgaagaaatcgcttgtacgagcttgctatgaagatgtcagagaaagagacctcttctggggaagatcaggaaagtgagcctaaaacagagagcgagaaccagaaagagtccttgtcgtccgaagacaattctcaatcggtgcaagaggaactcaagaagaagtttagtgccgtctccctgtgtaacattagtaccgaagtgttgaaagttatcaatgctacggaggagttgatcgccggaagcactgggccttgggaaagtccccaagtgcctcctgatagacagaaagggatgttccccaggggcactgatcaggtgagactggacgagcagcttacaagcctcgaagagaacgtgtacctggctgccggtactgtttacggcctcgaaacacagttgactgagctggaagatgccgctcgttgcatccattccgggaccgatgagacacatctggccgacctcgaagaccaggtcgcaactgcggcagctcaggtacaccatgctgagttacaaatcagtgacatcgaatccaggatttcagcattaactattgctggcctgaatattgccccttgtgtgcggtttacacgtcggagagatcaaaaacagcggactcaagtgcaaacaatcgatacctctcgccagcagagacggaagttgcccgcaccaccggtgaaagctgagaaaatcgaaacatcgagtgtgaccaccatcaaaacttttaaccacaatttcattttacaaggatcttctaccaatcggaccaaagaaagaaaagggaccacaaaagatcttatggagccagcccttgagtccgccgtaatgtactag

SEQ ID NO: 103942 - DNA, 2019 bp, Artificial Sequence
  derived and/or modified sequence
atggatacgttggccgttgccttgcgcgtggccgaagaagccatcgaggaggcaatcagcaaggccgaggcctacggagacagccttgataagcagaatgaggcttcctatctgcgagatcataaagaggaactcaccgaggaattggccaccactattctacagaagattatccgaaagcagaagagtaagtccgagcagcaggtagaggaggagcccggatggccccacccacaatcatgctcaacgaaagtggcggatgaaggaacaagcgctagcccaggcggatacagagctcctgctgctttgtggcgctcccagtccgcttttagcataacaggcgaagaagcattgaagacacctccagttgaggccccaagccggcagcctagggatcagggccagcaccctagagcagagtctgcattgccatcttggaaatcggtcgatcggcttgatgagacaaacctcgcacccgtattgcagagtcctgatggaaattgggtggcactaaaggacggtgctcccccaccaaccagactgttagccaaaccgaagtccggtactttccaggcattagaagtcgctagctccgtcgccagtgcttatgatgaaatgggttctgattccgaagaggacttcgactggagcgaggccctcagcaagttatgccctaggagcagagctctgccacgcaacccgcagccccaacccacacaggcccagtcttctgatcaggggcctatcgccgcaagccctagctctgctctgagcccaaatcccgaggctatgtgttccgactctgaaacttccagtgcagggagcagcagggaggtggggcatcaagccaggctgtcttggctgcagcggaaggcacctcgaaatcccgctgcagagaagatgcgactccacggtgagctggacgtgaacttcaatccgcaactcgcctctcgcgaaacatcggattcttcagagcccgaagaggcccctcacaccacagataggagagcacggaggtggagacgggctagactcggctctgaagagccctccaaagagccctcatccccctcagctcagctgagggatcttgacacacaccaagtctccgatgacctgtccgaaactgacattagcaacgaagccagggacccacagaccttgacagataccactgaggaaaagaggcggaatagactgtatgaactggcgatgaaaatgagcgagaaagagacgtcttctggggaagaccaggagagtgagcctaagacagaatcagagaatcaaaaagaaagcctctcttctgaggataatagccagtccgtgcaagaggagttaaagaagaaattctctgcagttagtctgtgcaacatcagtacggaggtcctcaaagtcatcaatgcaactgaggagctcatcgctggcagtacaggtccctgggaatctcctcaggtgccccctgaccgtcagaaggggatgttccctaggggcacggatcaggtgcgattagatgaacagcttactagcctcgaggagaacgtatatctggccgcaggtacagtgtatggtctggaaacacagttgacggagcttgaggatgctgcaagatgcatccatagcggcacagacgagacacacctagcagatcttgaggatcaggttgccactgctgcagcccaagtgcatcatgcagaactgcaaatctcggacattgagtctcgcatttcagctttgaccattgccggattgaacatcgccccttgcgttcgcttcacgcggagacgggaccagaagcagcgcactcaggttcagaccatagacacttctcgccagcagagaaggaagctccccgcaccgcctgttaaggctgaaaagattgaaacttctagtgtgacgacaatcaaaacgttcaaccataactttattttgcaaggttccagtaccaatcgaaccaaagaacgcaagggaaccacaaaggacttaatggaaccggcacttgagagcgccgtgatgtactag

SEQ ID NO: 103943 - DNA, 2580 bp, Artificial Sequence
  derived and/or modified sequence
atgggcagaaagctggacctgagcggcctgaccgacgacgagaccgagcacgtgctgcaggtggtgcagagagacttcaacctgagaaagaaggaggaggagagactgagcgagctgaagcagaagctggacgaggagggcagcaagtgcagcatcctgagcaagcaccagcagttcgtggagcactgctgcatgagatgctgcagccccttcaccttcctggtgaacaccaagagacagtgcggcgactgcaagttcaacgtgtgcaagagctgctgcagctaccagaagcacgagaaggcctgggtgtgctgcgtgtgccagcaggccagactgctgagagcccagagcctggagtggttctacaacaacgtgaagagcagattcaagagattcggcagcgccaaggtgctgaagaacctgtacagaaagcacagactggagagcggcgcctgcttcgacatcctgggcggcagcctgttcgagagcaacctggagaacgagggcagcatcagcggcagcgacagcaccttctacagacagagcgagggccacagcgtgatggacaccctggccgtggccctgagagtggccgaggaggccatcgaggaggccatcagcaaggccgaggcctacggcgacagcctggacaagcagaacgaggccagctacctgagagaccacaaggaggagctgaccgaggagctggccaccaccatcctgcagaagatcatcagaaagcagaagagcaagagcgagcagcaggtggaggaggagcccggctggccccacccccagagctgcagcaccaaggtggccgacgagggcaccagcgccagccccggcggctacagagcccccgccgccctgtggagaagccagagcgccttcagcatcaccggcgaggaggccctgaagaccccccccgtggaggcccccagcagacagcccagagaccagggccagcaccccagagccgagagcgccctgcccagctggaagagcgtggacagactggacgagaccaacctggcccccgtgctgcagagccccgacggcaactgggtggccctgaaggacggcgcccccccccccaccagactgctggccaagcccaagagcggcaccttccaggccctggaggtggccagcagcgtggccagcgcctacgacgagatgggcagcgacagcgaggaggacttcgactggagcgaggccctgagcaagctgtgccccagaagcagagccctgcccagaaacccccagccccagcccacccaggcccagagcagcgaccagggccccatcgccgccagccccagcagcgccctgagccccaaccccgaggccatgtgcagcgacagcgagaccagcagcgccggcagcagcagagaggtgggccaccaggccagactgagctggctgcagagaaaggcccccagaaaccccgccgccgagaagatgagactgcacggcgagctggacgtgaacttcaacccccagctggccagcagagagaccagcgacagcagcgagcccgaggaggccccccacaccaccgacagaagagccagaagatggagaagagccagactgggcagcgaggagcccagcaaggagcccagcagccccagcgcccagctgagagacctggacacccaccaggtgagcgacgacctgagcgagaccgacatcagcaacgaggccagagacccccagaccctgaccgacaccaccgaggagaagagaagaaacagactgtacgagctggccatgaagatgagcgagaaggagaccagcagcggcgaggaccaggagagcgagcccaagaccgagagcgagaaccagaaggagagcctgagcagcgaggacaacagccagagcgtgcaggaggagctgaagaagaagttcagcgccgtgagcctgtgcaacatcagcaccgaggtgctgaaggtgatcaacgccaccgaggagctgatcgccggcagcaccggcccctgggagagcccccaggtgccccccgacagacagaagggcatgttccccagaggcaccgaccaggtgagactggacgagcagctgaccagcctggaggagaacgtgtacctggccgccggcaccgtgtacggcctggagacccagctgaccgagctggaggacgccgccagatgcatccacagcggcaccgacgagacccacctggccgacctggaggaccaggtggccaccgccgccgcccaggtgcaccacgccgagctgcagatcagcgacatcgagagcagaatcagcgccctgaccatcgccggcctgaacatcgccccctgcgtgagattcaccagaagaagagaccagaagcagagaacccaggtgcagaccatcgacaccagcagacagcagagaagaaagctgcccgccccccccgtgaaggccgagaagatcgagaccagcagcgtgaccaccatcaagaccttcaaccacaacttcatcctgcagggcagcagcaccaacagaaccaaggagagaaagggcaccaccaaggacctgatggagcccgccctggagagcgccgtgatgtactag

SEQ ID NO: 103944 - DNA, 2019 bp, Artificial Sequence
  derived and/or modified sequence
atggacaccctggccgtggccctgagagtggccgaggaggccatcgaggaggccatcagcaaggccgaggcctacggcgacagcctggacaagcagaacgaggccagctacctgagagaccacaaggaggagctgaccgaggagctggccaccaccatcctgcagaagatcatcagaaagcagaagagcaagagcgagcagcaggtggaggaggagcccggctggccccacccccagagctgcagcaccaaggtggccgacgagggcaccagcgccagccccggcggctacagagcccccgccgccctgtggagaagccagagcgccttcagcatcaccggcgaggaggccctgaagaccccccccgtggaggcccccagcagacagcccagagaccagggccagcaccccagagccgagagcgccctgcccagctggaagagcgtggacagactggacgagaccaacctggcccccgtgctgcagagccccgacggcaactgggtggccctgaaggacggcgcccccccccccaccagactgctggccaagcccaagagcggcaccttccaggccctggaggtggccagcagcgtggccagcgcctacgacgagatgggcagcgacagcgaggaggacttcgactggagcgaggccctgagcaagctgtgccccagaagcagagccctgcccagaaacccccagccccagcccacccaggcccagagcagcgaccagggccccatcgccgccagccccagcagcgccctgagccccaaccccgaggccatgtgcagcgacagcgagaccagcagcgccggcagcagcagagaggtgggccaccaggccagactgagctggctgcagagaaaggcccccagaaaccccgccgccgagaagatgagactgcacggcgagctggacgtgaacttcaacccccagctggccagcagagagaccagcgacagcagcgagcccgaggaggccccccacaccaccgacagaagagccagaagatggagaagagccagactgggcagcgaggagcccagcaaggagcccagcagccccagcgcccagctgagagacctggacacccaccaggtgagcgacgacctgagcgagaccgacatcagcaacgaggccagagacccccagaccctgaccgacaccaccgaggagaagagaagaaacagactgtacgagctggccatgaagatgagcgagaaggagaccagcagcggcgaggaccaggagagcgagcccaagaccgagagcgagaaccagaaggagagcctgagcagcgaggacaacagccagagcgtgcaggaggagctgaagaagaagttcagcgccgtgagcctgtgcaacatcagcaccgaggtgctgaaggtgatcaacgccaccgaggagctgatcgccggcagcaccggcccctgggagagcccccaggtgccccccgacagacagaagggcatgttccccagaggcaccgaccaggtgagactggacgagcagctgaccagcctggaggagaacgtgtacctggccgccggcaccgtgtacggcctggagacccagctgaccgagctggaggacgccgccagatgcatccacagcggcaccgacgagacccacctggccgacctggaggaccaggtggccaccgccgccgcccaggtgcaccacgccgagctgcagatcagcgacatcgagagcagaatcagcgccctgaccatcgccggcctgaacatcgccccctgcgtgagattcaccagaagaagagaccagaagcagagaacccaggtgcagaccatcgacaccagcagacagcagagaagaaagctgcccgccccccccgtgaaggccgagaagatcgagaccagcagcgtgaccaccatcaagaccttcaaccacaacttcatcctgcagggcagcagcaccaacagaaccaaggagagaaagggcaccaccaaggacctgatggagcccgccctggagagcgccgtgatgtactag

SEQ ID NO: 103945 - protein, 770 aa, Artificial Sequence
  derived and/or modified sequence
MRKAASAASSRSTSSLWSTAACAAARPSPSSSTPSASVEIANSMSARAAAPTRSTKRPGSAASASKRGGSLFESNLENEGSISGSDSTFYRQSEGHSVMDTLAVALRVAEEAIEEAISKAEAYGDSLDKQNEASYLRDHKEELTEELATTILQKIIRKQKSKSEQQVEEEPGWPHPQSCSTKVADEGTSASPGGYRAPAALWRSQSAFSITGEEALKTPPVEAPSRQPRDQGQHPRAESALPSWKSVDRLDETNLAPVLQSPDGNWVALKDGAPPPTRLLAKPKSGTFQALEVASSVASAYDEMGSDSEEDFDWSEALSKLCPRSRALPRNPQPQPTQAQSSDQGPIAASPSSALSPNPEAMCSDSETSSAGSSREVGHQARLSWLQRKAPRNPAAEKMRLHGELDVNFNPQLASRETSDSSEPEEAPHTTDRRARRWRRARLGSEEPSKEPSSPSAQLRDLDTHQVSDDLSETDISNEARDPQTLTDTTEEKRRNRLYELAMKMSEKETSSGEDQESEPKTESENQKESLSSEDNSQSVQEELKKKFSAVSLCNISTEVLKVINATEELIAGSTGPWESPQVPPDRQKGMFPRGTDQVRLDEQLTSLEENVYLAAGTVYGLETQLTELEDAARCIHSGTDETHLADLEDQVATAAAQVHHAELQISDIESRISALTIAGLNIAPCVRFTRRRDQKQRTQVQTIDTSRQQRRKLPAPPVKAEKIETSSVTTIKTFNHNFILQGSSTNRTKERKGTTKDLMEPALESAVMY

SEQ ID NO: 103946 - protein, 672 aa, Artificial Sequence
  derived and/or modified sequence
MDTLAVALRVAEEAIEEAISKAEAYGDSLDKQNEASYLRDHKEELTEELATTILQKIIRKQKSKSEQQVEEEPGWPHPQSCSTKVADEGTSASPGGYRAPAALWRSQSAFSITGEEALKTPPVEAPSRQPRDQGQHPRAESALPSWKSVDRLDETNLAPVLQSPDGNWVALKDGAPPPTRLLAKPKSGTFQALEVASSVASAYDEMGSDSEEDFDWSEALSKLCPRSRALPRNPQPQPTQAQSSDQGPIAASPSSALSPNPEAMCSDSETSSAGSSREVGHQARLSWLQRKAPRNPAAEKMRLHGELDVNFNPQLASRETSDSSEPEEAPHTTDRRARRWRRARLGSEEPSKEPSSPSAQLRDLDTHQVSDDLSETDISNEARDPQTLTDTTEEKRRNRLYELAMKMSEKETSSGEDQESEPKTESENQKESLSSEDNSQSVQEELKKKFSAVSLCNISTEVLKVINATEELIAGSTGPWESPQVPPDRQKGMFPRGTDQVRLDEQLTSLEENVYLAAGTVYGLETQLTELEDAARCIHSGTDETHLADLEDQVATAAAQVHHAELQISDIESRISALTIAGLNIAPCVRFTRRRDQKQRTQVQTIDTSRQQRRKLPAPPVKAEKIETSSVTTIKTFNHNFILQGSSTNRTKERKGTTKDLMEPALESAVMY

SEQ ID NO: 103947 - DNA, 2313 bp, Artificial Sequence
  derived and/or modified sequence
atgcggaaagcggcgtccgccgctagcagccggagtacgtctagtctctggtccaccgctgcttgcgcggcagccagaccgtctccatctagtagtactcccagtgcctccgtcgagatagcgaacagcatgtcggcacgtgcagccgcccctacccggagtaccaaacggcccggatccgctgcttctgcttccaagagagggggcagtctgtttgagagtaacttggagaatgaaggatctatctccggcagtgattcgactttttaccggcaatcagagggtcatagcgtgatggacaccctcgccgtggcgctgagggtggctgaggaggctattgaggaagcaatctccaaagcagaagcttacggagactcactggataagcagaacgaggcctcatatctgcgggatcacaaagaagagctcaccgaggaactggcaacgaccatcctccaaaagattatcagaaagcaaaagtcaaagtctgagcaacaggtagaggaggaacccggatggccgcaccctcagagctgtagcactaaggtggccgatgagggcaccagtgcttccccggggggctatagagccccagcagcgttgtggcgcagccagtcagcattttccatcaccggggaggaggccctaaagacacctcccgtggaagccccttcccgccagcctcgggatcaaggacaacacccacgagccgaaagtgcactaccttcatggaaatcggtggacaggctcgacgagactaatctcgcacctgttctgcagtcccccgatgggaattgggtggcattgaaagatggtgctccacctccaacccggctgctggctaaacccaagtctggaacctttcaggctctggaggtggctagttccgtcgcctcagcgtacgacgaaatggggagtgacagtgaggaggatttcgattggagcgaagcactgagtaagctctgccccaggtctcgcgctttgccccgcaatcctcagccacagcccacccaggctcagagttccgaccagggacccatcgcagcctccccaagttcggcattgtccccgaatcctgaagctatgtgctccgatagtgagacgagctctgctgggtccagccgagaggtgggacaccaggctcggctttcctggctgcagagaaaagcacccaggaatcctgccgccgagaaaatgaggctccacggcgaacttgacgtgaactttaatcctcaactcgcctctagggagacctcagacagctcggagcctgaagaagccccgcatactaccgaccggcgggctagacgctggcggcgtgcacggcttggttctgaggagccttccaaggagccatcttcgccctccgcccaactgcgcgatctggatacacaccaagtgtcagacgatcttagtgaaacagacattagcaacgaggcccgagaccctcagacacttaccgacacaactgaggagaagcgtaggaatagactttacgaattggccatgaaaatgtctgaaaaagaaacttcctctggggaagaccaggaatccgagcctaagaccgaaagcgaaaaccagaaagagagccttagcagtgaggacaattcccagtcggtgcaggaggaactgaaaaaaaagttttccgcagtgtccctctgtaacatttcaacagaggtgctgaaagtcatcaacgcgactgaagagttaattgctgggtctaccggaccctgggaaagtccccaggtcccacctgatcgccagaaaggcatgtttcccagggggaccgaccaagttcgactggacgaacagctaacctctcttgaggaaaatgtgtacctcgccgcaggcacagtctatggacttgagactcagctgactgagcttgaggacgcagccagatgcatccactccggaactgacgagacccatttggctgatttggaagatcaggtagcaacagcagccgcacaagtgcaccacgctgaactgcaaattagcgacatcgagagccggatatctgcgttaacaatcgcgggcctcaatatagctccttgcgttaggtttacccgccgtagagaccagaagcagcgaacccaggttcagacaatcgacaccagcaggcagcagaggagaaaactaccagcccccccagtgaaggcggagaaaatcgaaacttccagcgtgactaccataaaaactttcaaccacaatttcatcctccagggatcaagcactaatcgtactaaggagcggaagggcaccacaaaggatctcatggagcctgccttggagtcagccgttatgtactag

SEQ ID NO: 103948 - DNA, 2313 bp, Artificial Sequence
  derived and/or modified sequence
atgaggaaggccgccagcgctgccagcagccgcagcaccagcagcctgtggagcacagctgcctgtgccgccgcccggcccagccccagcagcagcaccccatctgcctctgtggagatcgccaacagcatgtctgcccgggctgctgcccccaccaggagcaccaagaggcctggcagcgctgccagcgccagcaagaggggcggcagcctgtttgagagcaacctggagaatgaaggcagcatcagcggcagtgacagcaccttctaccggcagagcgagggccacagcgtgatggacaccctggccgtggccctgcgggtggccgaggaggccatcgaggaggccatcagcaaggccgaggcctatggagacagcctggacaagcagaatgaggccagctacctgcgggaccacaaggaggagctgacagaggagctggccaccaccatcctgcagaagatcatcaggaagcagaagagcaagtctgagcagcaggtggaggaggagcccggctggccccacccccagagctgcagcaccaaggtggctgatgagggcaccagcgccagccctgggggctaccgggccccagctgccctgtggaggagccagagcgccttcagcatcactggagaggaggccctgaagaccccacctgtggaggcccccagccggcagccccgggaccagggccagcaccccagggctgagagcgccctgcccagctggaagtctgtggaccggctggatgagaccaacctggcccctgtgctgcagagcccagatggcaactgggtggccctgaaggatggagcccccccacccacccggctgctggccaagcccaagagcggcaccttccaggccctggaggtggccagctctgtggccagcgcctatgatgagatgggcagtgacagcgaggaggactttgactggagcgaggccctgagcaagctgtgccccaggagccgggccctgcccaggaacccccagccccagcccacccaggcccagagcagtgaccagggccccatcgccgccagccccagcagcgccctgagccccaaccctgaggccatgtgcagcgacagcgagaccagcagcgctggcagcagccgggaggtgggccaccaggcccggctgtcctggctgcagaggaaggcccccaggaacccagctgctgagaagatgaggctgcacggggagctggatgtgaacttcaacccccagctggccagccgggagaccagtgacagcagcgagcctgaggaggccccccacaccacagacagaagagcccggcgctggaggcgggcccggctgggcagcgaggagcccagcaaggagcccagcagccccagcgcccagctgcgggacctggacacccaccaggtgtctgatgacctgtctgaaacagacatcagcaatgaggcccgggacccccagaccctgacagacaccacagaggagaagagaagaaaccggctgtatgagctggccatgaagatgtctgagaaggagaccagcagcggggaggaccaggagagcgagcccaagacagaaagtgagaaccagaaggagagcctgagcagcgaggacaacagccagagcgtgcaggaggagctgaagaagaagttctctgctgtgtccctgtgcaacatcagcacagaggtgctgaaggtgatcaatgccacagaggagctgattgctggcagcacaggcccctgggagagcccccaggtgcccccagaccggcagaagggcatgttcccccggggcacagaccaggtgcggctggatgagcagctgaccagcctggaggagaatgtgtacctggccgccggcaccgtgtatggcctggagacccagctgacagagctggaggatgctgcccgctgcatccacagcggcacagatgagacccacctggccgacctggaggaccaggtggccacagctgctgcccaggtgcaccacgccgagctgcagatcagtgacatcgagagccgcatcagcgccctgaccatcgccggcctgaacatcgccccctgtgtgcgcttcacccggcggcgggaccagaagcagaggacccaggtgcagaccatcgacaccagccggcagcagaggaggaagctgcctgcccctcctgtgaaggccgagaagattgagaccagctctgtgaccaccatcaagaccttcaaccacaacttcatcctgcagggcagcagcaccaacagaaccaaggagaggaagggcaccaccaaggacctgatggagcccgccctggagagcgctgtgatgtactag

SEQ ID NO: 103949 - DNA, 3144 bp, Artificial Sequence
  derived and/or modified sequence
cctgggcgtactgaggcgcggtggcctgagcccggccgccatcgatgaccccggtcgcggacttgcttcaggctggccaccccccgtcttgtttcatcatctgtgttgagtaaccatggggaggaagctggacctgtctggtttgactgatgatgaaacagagcatgttcttcaggtggttcaaagagacttcaatcttcgcaaaaaagaagaagaacgactaagtgagctgaagcagaagctggatgaggaaggcagcaagtgcagcatcctctcgaagcaccagcagtttgtggagcactgctgcatgcgctgctgctcgcccttcaccttcctcgtcaacaccaagcgccagtgtggagattgcaaattcaatgtctgcaagagctgctgctcctaccagaagcacgaaaaggcctgggtctgctgcgtctgccagcaagcgaggaggaagcctttttgagtcaaacctggagaatgaaggaagcatttctggcagtgattcaacattttataggcagtcagaaggacatagtgtgatggacaccttggctgtggccctacgggtggctgaagaggccattgaggaagcaatttccaaagcagaggcatatggggacagcctggacaagcaaaatgaggccagttacctgcgggaccacaaggaggagctaactgaggaactggccacgacaatcctgcagaagattatacgaaaacagaagagcaaaagtgagcagcaagtggaagaagagccaggatggccacatccccagagttgcagcacaaaggtggcagatgaggggacctcagcatcccctggaggctaccgtgctcccgctgccctctggaggtcccagtctgccttctcaatcactggagaagaagccctgaagacccctccagtggaggctccatcgaggcagccaagggaccaaggccaacacccgagagcagagtctgctctgcccagctggaagagtgtggacaggctggatgaaacaaacctggccccagttttgcagagccccgacgggaactgggtggccctgaaggatggcgctccaccccccacccgactactggccaaacctaagagcgggacgtttcaggccctggaggtggcctccagtgtggcatctgcctacgatgagatgggctccgatagcgaggaagactttgactggagtgaggccttgagcaagctgtgtcccaggtcccgggccctgcccaggaacccccagcctcagcccacacaggcccagagctctgaccaaggccccatagctgcctccccatcctctgcactctcccccaaccctgaggccatgtgctctgactcggagacctcctccgcaggctcttcccgagaagttgggcaccaggccagactgtcctggttgcagaggaaggcccccaggaaccctgcagctgagaagatgcgcttgcatggagagctggacgtgaacttcaacccccagttggccagcagggagacctcggacagcagcgagccggaggaggccccccacaccacagaccggcgggccaggaggtggagaagagcccgactgggctcagaagagccaagcaaagaaccatcttcccccagcgcccagctccgggatctagacacacatcaggtgtcggatgatttatcagagacagacatcagcaatgaggctcgggatccccagactctcacagacaccacagaggagaaacggagaaacaggctgtacgagttagcaatgaaaatgagtgaaaaggagacttcttcaggggaggatcaggagtctgagcccaagacagaatctgagaaccagaaggaaagtctgtcctctgaagacaacagccagagtgtccaggaagagctgaagaagaagttttctgctgtttctctctgcaacatctccacagaagtcctgaaagtcatcaatgccacagaggagttgatagcaggatctacagggccctgggagtccccacaagtccctcctgacagacagaaggggatgtttcctcgtgggacagaccaagtgagactggatgagcagctgacttccctggaagaaaatgtatacctggcagcaggcactgtgtatggactggagacccagctgactgagctagaagatgccgcccgctgcatccacagtggcactgatgagacccatctggcggatctggaggaccaggtggccacggctgcagcccaagtccaccatgctgaactccagatttcagatattgagagccggatttcagccctgaccattgcaggattaaacatagcaccatgtgtgcgcttcacaagaagacgggatcagaagcaaaggacccaggtacaaaccatagatacatcaaggcagcaaaggaggaaactgcctgctccaccggtgaaagctgaaaaaattgagacatcttcagtgactaccattaaaacatttaaccacaacttcattctccaaggctcctcaacaaacaggactaaggaaaggaaaggcaccaccaaggatttgatggagcctgctctggagtcagctgtgatgtactgacaccatggaattccactgccagtgacccactgcctccggccgtacacgacagtgccttgacccaacagccatcgagtactgtatgtatttccacctgaggagaaggcctggggaggccacagtgcaccattgcacagggctgtcctgatacctcatccagaaagccgtctcagacttcagcactgcggtcttgcccactctctgccttaggctcccaggggaatccaagacagaaaatgaagacactggcttccaacagcagcgctccatgtttaagatacatattttccctgtttgctttgctactgtatgttgactttaagatctttttttaaatacatttgattcagctagtattccatgtcaacaatttgtccaaaggaaaactgctggagggaggtggagggaggaaggtgggaattattatttaatacatcattaatgcttattaatctctcacaagcatctttgtcttgcaaatcctaagggaaaagcaagtccctgcagtgagcactagggacagtctaatttggggattgctcaaccatcaagactgcaggtctcccttcagccacctccttcctgc

SEQ ID NO: 103950 - DNA, 2313 bp, Artificial Sequence
  derived and/or modified sequence
atgcggaaggccgccagcgccgccagcagccggagcaccagcagcctatggagcaccgccgcttgtgctgcggcaaggccatcacccagttcttcaacccccagtgccagcgtcgaaatagcaaattcgatgtccgccagggccgccgcccctaccaggagtacaaagcggccaggaagcgctgcctcagcgagcaagcggggaggctctttattcgaatccaacctcgagaacgaggggtctatttccggctcagactcaaccttctatcgccagagcgaaggccattccgttatggataccttggctgtcgccctgagagtcgccgaggaggctattgaggaggccatcagcaaagccgaggcctacggggactccctggataaacagaacgaagcatcctatctccgcgatcacaaggaggagcttactgaggagctggccactacaatactccagaaaatcattcggaagcagaaatccaagagtgagcagcaggttgaggaggaacctggttggcctcacccccagtcttgcagcacgaaggtggctgatgagggtacttccgcatcccctggcggttacagggcaccagcagctttgtggcgcagtcagagtgcattctcaataacaggggaggaggcactcaagacaccgccggtggaggccccatcccggcagcccagggatcagggacagcatcctcgcgctgagagcgccttgccaagttggaaatctgtggaccgcctggatgagacaaacctagccccagttctgcaatcgccagatggtaactgggtcgctctgaaggacggtgctccaccccctacgcgacttttagctaagccaaaaagcggcacatttcaggcactggaggttgccagttccgtggccagtgcgtacgatgaaatggggagcgatagcgaggaggacttcgattggtccgaggcattgtcaaagctgtgccctcggagccgggcgctgcctcgcaacccgcagccacagcccacccaggcccagagctccgaccagggccccatcgccgcctcaccatcctctgcgctaagccctaatcccgaggccatgtgtagtgactcagagaccagttcagctggatcttctcgggaagttgggcatcaggcacgtctctcttggctgcagaggaaggcccctcgaaacccagcagccgagaagatgcggctccatggtgaactcgacgttaattttaaccctcaactggcttctcgtgaaacctccgatagttctgagcccgaagaagcaccccacacgacagaccgcagggctaggaggtggcgccgggcgagacttgggagcgaggaacctagcaaggaaccaagttctccctctgcgcagttacgggatctcgacacgcatcaggtcagtgacgatctgtcagagacggacatttcaaatgaggcccgcgatccccagacactgacggataccacggaggaaaaacgcaggaatcgactgtacgaactggccatgaaaatgtccgaaaaagaaacctcctctggagaagatcaggaatctgagccaaaaacggaatccgagaatcaaaaagaatcactatcgtccgaagacaactcccagtctgtgcaggaggaacttaagaagaagttctccgccgtgtcactgtgcaatatctcgacggaggtgttaaaggtgattaatgcaacggaagaattgattgctggaagcaccggtccatgggagtctccccaggttccccctgaccggcagaaaggaatgtttcctcgggggaccgaccaggtacgactggacgagcagttgactagtctagaggaaaacgtgtatttggctgctggcacggtttatggactagaaacccagctgaccgaattggaagacgccgcccgctgtatccatagtgggactgatgaaacccatctggctgaccttgaggatcaggtggctacggccgctgcacaggtccaccatgccgaactccagatcagcgatatcgaaagccgcatttctgctttaactatagctggactcaacatagctccatgtgtccgcttcacccggcggagggaccagaaacagaggactcaggtccagacgattgacacgagtcggcagcagaggaggaagctgcctgcaccccctgtaaaggcggagaagatcgaaacctcttctgtgacaaccatcaagacattcaaccataattttattctacagggctcttcaacgaatcggacaaaagagcggaaagggacaaccaaggacctgatggagcccgcgctagaaagcgccgtcatgtactag

SEQ ID NO: 103951 - DNA, 2313 bp, Artificial Sequence
  derived and/or modified sequence
atgcggaaggcagcaagtgcggctagttcccgtagcaccagctccctctggtctactgctgcttgcgccgctgcaagaccctccccctcttcctccactccatcggcttctgttgagatcgcaaatagtatgagcgccagagccgctgcccctacacgatccaccaagcggccaggcagcgccgcttccgcatcaaagaggggcggtagcctcttcgagtcaaatctggagaatgaggggagcatctcaggaagcgactccacattttatcggcagtccgaaggccactccgtgatggatacgctggccgtggcactacgggtggccgaggaggcaattgaggaggccattagtaaggccgaggcatacggtgacagtctggataaacagaatgaggcatcctaccttagagaccataaggaggaactaaccgaggagctggctacgacgattctccagaagattattcggaaacaaaagtcaaagtccgagcagcaggtggaggaggaacctggatggccacaccctcaaagctgttccaccaaagtggccgacgagggaacaagcgcgtctcctggagggtacagggctccagcagcactgtggaggagccagagtgcattttccattactggggaggaggccctgaaaactccaccagtggaggcccctagccgacaacctagagatcaaggccaacacccccgagctgagagcgccttgcccagctggaaatcggtagatcgacttgatgagaccaacctcgcaccagtcttacaatcgcccgacggaaattgggtggctttgaaagatggggctccaccccctacacgtctactagccaaacccaagagcggaacttttcaagcacttgaagtggcttcaagcgtcgcttctgcctatgatgaaatggggtctgactccgaagaggacttcgattggtcagaggcattgtctaaactgtgtcctcgatctagagcgctcccccgtaatccacaaccacagcctactcaggcccagtcatcagatcaaggacccattgcagccagcccgagcagcgcactcagcccaaaccccgaggccatgtgtagtgactcagagacttccagtgccggaagctctcgcgaggtgggacaccaggccaggttgagttggctgcaacggaaggcgccaaggaacccagcagcagagaagatgcggcttcacggagagctcgatgttaatttcaaccctcagctggcatctagagaaacgagtgacagttctgaacctgaggaagctccgcacactacagaccgtcgggctcgaagatggaggcgcgctaggttaggatctgaagagccttccaaggagccatccagtccaagcgcccaactgcgcgatctcgacacgcatcaagtttccgatgatttgtccgaaaccgacatctccaatgaagcacgcgacccccagactctaacggacaccacagaagagaagaggaggaatcgtctttacgagctggcaatgaaaatgagtgaaaaagaaacctcatcgggcgaagaccaggaaagcgagccaaagactgaatctgagaatcaaaaagaaagcctatcttctgaggacaacagtcaatctgtgcaggaagagctcaaaaagaaattctcagccgtaagcttgtgcaatatctccacagaggtactgaaagtgattaacgccacagaggagctgatcgcgggttccactggcccatgggaatcccctcaagtgccacccgaccgccaaaaagggatgtttccacgcggaaccgaccaggtgaggttagacgaacagcttactagcctagaagaaaatgtctatctggccgcagggacagtgtacggcctcgagactcaactgactgaactggaggatgctgcacgctgtatacatagtggaaccgacgaaactcatcttgccgatctcgaggaccaagtagccacagcagcagctcaagtgcaccacgctgagctgcaaatcagcgatatagaatctcgcatatctgccttgacaatcgccggactgaacattgccccttgcgtgaggtttaccaggagaagagaccaaaagcaacggacccaggttcaaaccatcgacacctctagacagcagcggagaaagcttcccgctccgcctgtcaaggcagagaagattgagaccagcagcgtaaccactatcaagacttttaatcataattttatcctgcaaggttcaagtactaacaggactaaggaaagaaaggggacaaccaaggacttgatggagccagccctggagagcgcggtaatgtattag

SEQ ID NO: 103952 - DNA, 2313 bp, Artificial Sequence
  derived and/or modified sequence
atgagaaaggccgccagcgccgccagcagcagaagcaccagcagcctgtggagcaccgccgcctgcgccgccgccagacccagccccagcagcagcacccccagcgccagcgtggagatcgccaacagcatgagcgccagagccgccgcccccaccagaagcaccaagagacccggcagcgccgccagcgccagcaagagaggcggcagcctgttcgagagcaacctggagaacgagggcagcatcagcggcagcgacagcaccttctacagacagagcgagggccacagcgtgatggacaccctggccgtggccctgagagtggccgaggaggccatcgaggaggccatcagcaaggccgaggcctacggcgacagcctggacaagcagaacgaggccagctacctgagagaccacaaggaggagctgaccgaggagctggccaccaccatcctgcagaagatcatcagaaagcagaagagcaagagcgagcagcaggtggaggaggagcccggctggccccacccccagagctgcagcaccaaggtggccgacgagggcaccagcgccagccccggcggctacagagcccccgccgccctgtggagaagccagagcgccttcagcatcaccggcgaggaggccctgaagaccccccccgtggaggcccccagcagacagcccagagaccagggccagcaccccagagccgagagcgccctgcccagctggaagagcgtggacagactggacgagaccaacctggcccccgtgctgcagagccccgacggcaactgggtggccctgaaggacggcgcccccccccccaccagactgctggccaagcccaagagcggcaccttccaggccctggaggtggccagcagcgtggccagcgcctacgacgagatgggcagcgacagcgaggaggacttcgactggagcgaggccctgagcaagctgtgccccagaagcagagccctgcccagaaacccccagccccagcccacccaggcccagagcagcgaccagggccccatcgccgccagccccagcagcgccctgagccccaaccccgaggccatgtgcagcgacagcgagaccagcagcgccggcagcagcagagaggtgggccaccaggccagactgagctggctgcagagaaaggcccccagaaaccccgccgccgagaagatgagactgcacggcgagctggacgtgaacttcaacccccagctggccagcagagagaccagcgacagcagcgagcccgaggaggccccccacaccaccgacagaagagccagaagatggagaagagccagactgggcagcgaggagcccagcaaggagcccagcagccccagcgcccagctgagagacctggacacccaccaggtgagcgacgacctgagcgagaccgacatcagcaacgaggccagagacccccagaccctgaccgacaccaccgaggagaagagaagaaacagactgtacgagctggccatgaagatgagcgagaaggagaccagcagcggcgaggaccaggagagcgagcccaagaccgagagcgagaaccagaaggagagcctgagcagcgaggacaacagccagagcgtgcaggaggagctgaagaagaagttcagcgccgtgagcctgtgcaacatcagcaccgaggtgctgaaggtgatcaacgccaccgaggagctgatcgccggcagcaccggcccctgggagagcccccaggtgccccccgacagacagaagggcatgttccccagaggcaccgaccaggtgagactggacgagcagctgaccagcctggaggagaacgtgtacctggccgccggcaccgtgtacggcctggagacccagctgaccgagctggaggacgccgccagatgcatccacagcggcaccgacgagacccacctggccgacctggaggaccaggtggccaccgccgccgcccaggtgcaccacgccgagctgcagatcagcgacatcgagagcagaatcagcgccctgaccatcgccggcctgaacatcgccccctgcgtgagattcaccagaagaagagaccagaagcagagaacccaggtgcagaccatcgacaccagcagacagcagagaagaaagctgcccgccccccccgtgaaggccgagaagatcgagaccagcagcgtgaccaccatcaagaccttcaaccacaacttcatcctgcagggcagcagcaccaacagaaccaaggagagaaagggcaccaccaaggacctgatggagcccgccctggagagcgccgtgatgtactag

SEQ ID NO: 103953 - protein, 432 aa, Artificial Sequence
  derived and/or modified sequence
MTYGSPQANASPSDAVALDHGEVSRRQQQELPNMFGDLRSTFIALMIGSYASSAVTFPGIKLIYDAGVSFIVVLVVWAGCSGLVFLNCFFNWPLEPFPGPEDMDYSVKIKFSWLGFDHKITGKQFYKQVTTVGRRLSVGSSMRSAKEQVALQEGHKLCLSTVDLEVKCQPDAAVAPSFMHSVFSPILLLSLVTMCVTQLRLIFYMGAMNNILKFLVSGDQKTVGLYTSIFGVLQLLCLLTAPVIGYIMDWRLKECEDASEEPEEKDANQGEKKKKKRDRQIQKITNAMRAFAFTNLLLVGFGVTCLIPNLPLQILSFILHTIVRGFIHSAVGGLYAAVYPSTQFGSLTGLQSLISALFALLQQPLFLAMMGPLQGDPLWVNVGLLLLSLLGFCLPLYLICYRRQLERQLQQRQEDDKLFLKINGSSNQEAFV

SEQ ID NO: 103954 - DNA, 1299 bp, Artificial Sequence
  derived and/or modified sequence
atgacctacggcagcccccaggccaacgccagccccagcgacgccgtggccctggaccacggcgaggtgagcagaagacagcagcaggagctgcccaacatgttcggcgacctgagaagcaccttcatcgccctgatgatcggcagctacgccagcagcgccgtgaccttccccggcatcaagctgatctacgacgccggcgtgagcttcatcgtggtgctggtggtgtgggccggctgcagcggcctggtgttcctgaactgcttcttcaactggcccctggagcccttccccggccccgaggacatggactacagcgtgaagatcaagttcagctggctgggcttcgaccacaagatcaccggcaagcagttctacaagcaggtgaccaccgtgggcagaagactgagcgtgggcagcagcatgagaagcgccaaggagcaggtggccctgcaggagggccacaagctgtgcctgagcaccgtggacctggaggtgaagtgccagcccgacgccgccgtggcccccagcttcatgcacagcgtgttcagccccatcctgctgctgagcctggtgaccatgtgcgtgacccagctgagactgatcttctacatgggcgccatgaacaacatcctgaagttcctggtgagcggcgaccagaagaccgtgggcctgtacaccagcatcttcggcgtgctgcagctgctgtgcctgctgaccgcccccgtgatcggctacatcatggactggagactgaaggagtgcgaggacgccagcgaggagcccgaggagaaggacgccaaccagggcgagaagaagaagaagaagagagacagacagatccagaagatcaccaacgccatgagagccttcgccttcaccaacctgctgctggtgggcttcggcgtgacctgcctgatccccaacctgcccctgcagatcctgagcttcatcctgcacaccatcgtgagaggcttcatccacagcgccgtgggcggcctgtacgccgccgtgtaccccagcacccagttcggcagcctgaccggcctgcagagcctgatcagcgccctgttcgccctgctgcagcagcccctgttcctggccatgatgggccccctgcagggcgaccccctgtgggtgaacgtgggcctgctgctgctgagcctgctgggcttctgcctgcccctgtacctgatctgctacagaagacagctggagagacagctgcagcagagacaggaggacgacaagctgttcctgaagatcaacggcagcagcaaccaggaggccttcgtgtag

SEQ ID NO: 103955 - DNA, 1299 bp, Artificial Sequence
  derived and/or modified sequence
atgacctatggctctccacaggccaatgcttctccctcggacgctgtagccttggatcacggggaggtatctcgcaggcagcagcaagaactgccgaatatgttcggtgacttgaggtctacctttattgccctaatgattggctcctacgccagttctgcagttacctttcccggtatcaagctgatatatgatgccggcgtgagcttcatcgtagtcctcgttgtgtgggccggatgctcaggccttgtgtttctgaactgttttttcaattggccgctagaacctttccctggcccagaagatatggactactcggtcaaaataaaatttagttggctcggctttgaccataagatcaccgggaagcagttctacaagcaggttacgaccgtgggccggcggctgtcggttggatcttccatgcgaagtgctaaagagcaggttgcccttcaagaagggcataaactttgtctctccactgttgacctggaagttaaatgccaacctgacgccgcagtggcccctagtttcatgcatagcgtgttctctcctatcctcctgttgagcctcgtgaccatgtgtgtgacgcagcttaggcttatcttttacatgggagccatgaataatattttaaaatttctcgtgagcggggatcagaagactgtggggctctacacctcaattttcggagttctgcagctgctgtgcctcctcactgctccagtcattggatatattatggattggcgactgaaagagtgcgaagacgcctcagaggaacctgaggagaaagacgcgaatcagggtgagaagaagaagaagaagagagatcgacaaatacagaaaattaccaacgctatgcgggcctttgccttcaccaacctgttactggtcggatttggtgtgacctgcctgattcctaatctccccctgcagatcctgtcattcattttgcataccattgtgcgcggctttatccattccgccgttggtggactctacgctgcagtctacccctcaactcagttcgggtcactgaccggcttgcagagtttaatcagcgcattatttgccctgcttcaacagccacttttcctcgctatgatgggccctttgcagggagatccactttgggtaaacgtggggttactgctgctatccctgctgggattctgcctccctctctaccttatctgctatcgtcgccagctagaaagacagctgcagcagcgtcaagaagatgacaagctgtttttaaagatcaacggcagctctaaccaagaagcctttgtatag

SEQ ID NO: 103956 - DNA, 1299 bp, Artificial Sequence
  derived and/or modified sequence
atgacctacggcagcccccaggccaatgccagccccagtgatgctgtggccctggaccacggggaggtgtcccggcggcagcagcaggagctgcccaacatgtttggagacctgcggagcaccttcatcgccctgatgattggcagctatgccagcagcgctgtgaccttccctggcatcaagctgatctatgatgctggggtgtccttcatcgtggtgctggtggtgtgggccggctgcagcggcctggtgttcctgaactgcttcttcaactggcccctggagcccttccctggccctgaggacatggactacagcgtgaagatcaagttctcctggctgggctttgaccacaagatcaccgggaagcagttctacaagcaggtgaccaccgtgggccggcggctgtctgtgggcagctccatgaggtctgccaaggagcaggtggccctgcaggagggccacaagctgtgcctgagcacagtggacctggaggtgaagtgccagccagatgctgctgtggcccccagcttcatgcacagcgtcttcagccccatcctgctgctgagcctggtgaccatgtgtgtgacccagctgcggctcatcttctacatgggcgccatgaacaacatcctgaagttcctggtgtctggggaccagaagacagtgggcctgtacaccagcatcttcggcgtgctgcagctgctgtgcctgctgacagcccctgtgattggctacatcatggactggaggctgaaggaatgtgaagatgccagcgaggagcctgaggagaaggatgccaaccagggcgagaagaagaagaagaagagggaccggcagatccagaagatcaccaatgccatgagggcctttgccttcaccaacctgctgctggtgggctttggagtgacctgcctgatccccaacctgcccctgcagatcctgtccttcatcctgcacaccatcgtgcggggcttcatccacagcgctgtgggcggcctgtatgctgctgtgtaccccagcacccagtttggcagcctgaccggcctgcagagcctcatcagcgccctgtttgccctgctgcagcagcccctcttcctggccatgatgggccccctgcagggcgaccccctgtgggtgaatgtgggcctgctgctgctgagcctgctgggcttctgcctgcccctgtacctgatctgctaccgccggcagctggagcggcagctgcagcagaggcaggaggatgacaagctgttcctgaagatcaatggcagcagcaaccaggaggcctttgtgtag

SEQ ID NO: 103957 - DNA, 1299 bp, Artificial Sequence
  derived and/or modified sequence
atgacctacggcagcccccaggccaacgccagccccagcgacgccgtcgccctcgatcatggcgaagtgtctcgccgccaacaacaggaactgcccaatatgtttggcgaccttcgtagcactttcattgcgctcatgatcggatcatatgcctcttccgccgtgaccttcccagggattaagctgatatacgacgcaggagtatcatttatagtggtgcttgttgtctgggccggctgctccggcctcgtgttcctgaattgtttcttcaactggcctctggagccctttcccgggccggaagacatggactattctgtgaagataaagttctcgtggttaggatttgaccacaagattactggcaagcagttctataaacaggtcacgacggtcggacggaggctaagtgtgggcagcagcatgcgtagcgccaaggagcaagtcgccctacaagagggacataagctgtgcctctccactgtggatctggaggttaagtgtcagccagatgccgcggtcgcgccaagttttatgcacagtgtcttcagccctatcctgctgctcagtcttgtgacaatgtgcgtgactcaactgagactgatcttttacatgggcgccatgaataacatccttaagttcctcgtgtcgggcgatcaaaagactgtggggctgtacacttctatctttggcgtactccagctactctgccttctcaccgctcccgtcatcggctacatcatggattggagactcaaggagtgcgaagatgcgtctgaagagcccgaggagaaggacgcaaaccagggggaaaagaagaaaaagaaaagagatcgacagatccagaagatcaccaatgcaatgagggccttcgcgttcaccaatctactgctggtcgggtttggagttacctgcctgatccccaatctccccttgcaaatcctgagcttcatcctgcacaccatagtgagggggttcattcacagcgcagttggtggattatacgccgcggtttatccttcaacccagtttggttcccttactgggctccaaagcctgattagcgcactgttcgctctgctgcaacagccgttattcctggcgatgatgggaccccttcagggtgatccgctgtgggttaatgttggcctgcttttgttgtctctgcttggcttctgcctccccctgtacctgatctgttaccgccgacagctggagcgacagctccagcagagacaggaggacgacaagcttttccttaagatcaatggcagctcaaatcaagaggcctttgtctag

SEQ ID NO: 103958 - DNA, 1299 bp, Artificial Sequence
  derived and/or modified sequence
atgacatatggttcaccccaagctaacgctagtccttccgacgcagtggctttggatcatggggaggtttctaggagacagcagcaggagctgcccaatatgttcggcgatctgagatcaacattcattgcgttgatgatcgggagctacgcctcttccgctgtcacctttccgggaataaagttaatctacgacgcaggagtgtcgttcattgtagtgctcgtggtctgggccggatgttcaggcttagtgtttctcaactgttttttcaattggcctctcgagccctttcccggtccggaagacatggactatagcgtgaaaattaagttcagttggctgggttttgatcataagatcactgggaagcagttttataagcaagttaccacagtgggacgtcgactttcggtgggatcctctatgcgcagtgccaaggaacaagtggcgctgcaggagggtcataagctctgtctgagcacggtcgacctggaagtgaaatgtcagccagatgcagccgtggctccttcatttatgcatagtgttttttcccccatactattgctgtccctggtgaccatgtgcgtcacacagcttcggctgatattctatatgggcgctatgaataatattttaaagttcctggtgtctggagatcaaaagacagttggattgtacacttcaatattcggtgttcttcagttattgtgtctcctcaccgcccctgtgataggttatatcatggattggcggttaaaagagtgcgaagacgcaagcgaggaaccagaagagaaggatgctaaccagggtgaaaagaagaagaagaaaagggatcggcagatccaaaagatcaccaatgccatgcgcgctttcgcatttaccaacttgctactcgtagggtttggtgtgacgtgcctgattcccaacctgcctctacaaatcttgtcttttatcctgcacaccatcgtgcgaggcttcattcattcagctgtcggagggctctacgcagctgtataccccagcacgcagtttggaagcctgacaggtctacagtccctgatctccgctctcttcgcattgcttcagcaaccattgttcctggccatgatggggcctctgcagggcgatccattgtgggtgaacgtaggcctgttgctgttgtccctgctgggcttctgtctccctctgtacctgatttgctataggcggcaactcgagcggcagcttcagcaacggcaggaggacgacaagctgttcttgaagataaacggcagctccaatcaagaggctttcgtctag

SEQ ID NO: 103959 - DNA, 1490 bp, Artificial Sequence
  derived and/or modified sequence
attatgcgcagctgagaccggtggaggcagggaagctggggacggagtgagcgagagggggaatgtggggagtgacccagatgtcaggatgacctacgggagtccacaggcaaatgcaagcccatccgatgctgtggcgctggaccatggggaggtcagccgaaggcaacagcaggagctgcccaacatgttcggcgaccttcggtccacgtttattgccttgatgattgggtcctacgcctcctcggcagtcacctttccaggaatcaagctcatctatgatgctggtgtctccttcatcgtcgtcctcgtggtctgggccggctgctccgggctggttttcctcaactgcttctttaactggccccttgagcccttcccggggccggaggacatggactactcggtgaagatcaagttcagctggctgggctttgaccacaagatcacagggaagcagttctacaagcaggtgaccacggtgggccggcgcctgagtgtgggcagctccatgaggagtgccaaggagcaggtggcgctgcaggagggccacaagctgtgcctgtccaccgtcgacctggaggtgaagtgccagccggatgccgcagtggccccctccttcatgcacagcgtgttcagccccatcctgctgctcagcctggtcaccatgtgcgtcacgcagctgcggctcatcttctacatgggggctatgaacaacatcctcaagttcctggtcagcggcgaccagaagacagttggcctctacacctccatcttcggcgtgctccagctgctgtgcctgctgacggcccccgtcattggctacatcatggactggaggctgaaggagtgtgaagacgcctccgaggagcccgaggagaaagacgccaaccaaggcgagaagaaaaagaagaagcgggaccggcagatccagaagatcactaatgccatgcgggccttcgccttcaccaacctgctgctcgtgggctttggggtgacctgcctcattcccaacctgcctctccagatcctctccttcatcctgcacacaatcgtgcgaggattcatccactccgctgtcgggggcctgtacgctgccgtgtacccctccacccagttcggcagcctcacgggactgcagtctctgatcagcgcgctcttcgcccttctgcagcagccgctgtttctggccatgatgggtcctctccagggagaccctctgtgggtgaacgtggggctgctccttctcagcctgctgggcttctgcctcccgctctacctgatctgctaccggcgccagctggagcggcagctgcagcagaggcaggaggatgacaaactcttcctcaaaatcaacggctcgtccaaccaggaggccttcgtgtagtggctgccgcctcggaactgcggtctcctgcctgtgcttcagtgactgacccctgtcctgcccctccagagtaccccacgcacccccaggaccttcgccgtct

SEQ ID NO: 103960 - protein, 525 aa, Artificial Sequence
  derived and/or modified sequence
MASALSYVSKFKSFVILFVTPLLLLPLVILMPAKVCVQYMKDTNMLFLGGLIVAVAVERWNLHKRIALRTLLWVGAKPARLMLGFMGVTALLSMWISNTATTAMMVPIVEAILQQMEATSAATEAGLELVDKGKAKELPGSQVIFEGPTLGQQEDQERKRLCKAMTLCICYAASIGGTATLTGTGPNVVLLGQMNELFPDSKDLVNFASWFAFAFPNMLVMLLFAWLWLQFVYMRFNFKKSWGCGLESKKNEKAALKVLQEEYRKLGPLSFAEINVLICFFLLVILWFSRDPGFMPGWLTVAWVEGETKYVSDATVAIFVATLLFIVPSQKPKFNFRSQTEEERKTPFYPPPLLDWKVTQEKVPWGIVLLLGGGFALAKGSEASGLSVWMGKQMEPLHAVPPAAITLILSLLVAVFTECTSNVATTTLFLPIFASMSRSIGLNPLYIMLPCTLSASFAFMLPVATPPNAIVFTYGHLKVADMVKTGVIMNIIGVFCVFLAVNTWGRAIFDLDHFPDWANVTHIET

SEQ ID NO: 103961 - DNA, 1578 bp, Artificial Sequence
  derived and/or modified sequence
atggcatccgcactgagttatgtctccaaatttaagagctttgtcattctgttcgttacacctctcctgctgttgccccttgtcattctgatgcccgccaaagtttgcgttcagtatatgaaggatactaacatgctgttccttggggggcttattgtagccgtagcagtcgagagatggaacctgcacaagcgaatcgcacttagaactctgctgtgggtgggagcaaaacccgctaggcttatgctgggtttcatgggggtaacagcactcctgtcaatgtggatctccaacacagccactactgcgatgatggtccccatagtggaagctattctgcaacagatggaggccacttcagctgccaccgaagccggcctggagctcgtggataagggaaaagccaaagaactgcccgggagccaagtgattttcgaggggcctaccctcggccagcaggaggaccaggaaaggaagcggctgtgcaaagcaatgaccctgtgtatatgttacgccgctagcattggagggaccgccaccctgactggaaccgggccaaacgtcgtcctgttagggcagatgaacgaattgttccctgatagcaaggaccttgtgaacttcgcaagttggtttgcattcgcttttccaaacatgctggtaatgctgctctttgcgtggttgtggttgcagttcgtatatatgaggtttaattttaagaaatcctgggggtgcggcttggagagtaaaaagaacgagaaagcagcactcaaagttctgcaggaggaatacagaaaattggggccactaagtttcgctgagattaatgttctgatttgttttttcctgctcgtgatcttgtggtttagccgagatcccgggtttatgcccggttggctgacagtcgcctgggtggagggagagacaaagtatgtctctgacgccacagtggctatattcgtagctacgctactgtttattgttcccagtcagaagcccaagtttaactttagaagccaaacagaagaagagagaaagactcctttttatcctccacccctgctcgattggaaggttacccaagagaaagtgccttggggaatagtgcttttactaggaggaggttttgcactggccaagggctctgaagcatctggcctctcggtgtggatgggcaagcaaatggaacctttgcatgctgttccccctgctgcaatcactttgatacttagcttgctcgtcgcagtctttaccgagtgtacctccaatgtggctactaccacgctgttcctgcctatattcgctagcatgtctcggtctatcggactgaatcctttgtatatcatgctgccatgtactctctctgcatcgttcgcctttatgctcccagtggccactccaccaaacgccatcgttttcacctatggccacctcaaagttgccgatatggttaaaactggtgttataatgaacatcattggtgtgttttgtgtgtttctagctgtgaacacttggggacgggctattttcgatttggatcactttcccgattgggccaacgttacccacattgaaacatag

SEQ ID NO: 103962 - DNA, 1578 bp, Artificial Sequence
  derived and/or modified sequence
atggccagcgccctgtcctatgtgtccaagttcaagagctttgtgatcctgtttgtgacccccctgctgctgctgcccctggtgatcctgatgcctgccaaggtgtgtgtgcagtacatgaaggacaccaacatgctgttcctgggcggcctcatcgtggccgtggccgtggagcgctggaacctgcacaagagaattgccctgcggaccctgctgtgggtgggcgccaagccagcccggctgatgctgggcttcatgggcgtgacagccctgctgtccatgtggatcagcaacacagccaccacagccatgatggtgcccatcgtggaggccatcctgcagcagatggaggccaccagcgctgccacagaagctggcctggagctggtggacaagggcaaggccaaggagctgcccggcagccaggtgatctttgagggccccaccctgggccagcaggaggaccaggagaggaagaggctgtgcaaggccatgaccctgtgcatctgctacgccgccagcattggaggaacagccaccctgaccggcaccggccccaacgtggtgctgctgggccagatgaatgaactcttcccagacagcaaggacctggtgaactttgcctcctggtttgcctttgccttccccaacatgctggtgatgctgctgtttgcctggctgtggctgcagtttgtgtacatgaggttcaacttcaagaagtcctggggctgcggcctggagagcaagaagaatgagaaggccgccctgaaggtgctgcaggaggagtacaggaagctgggccccctgagctttgctgagatcaacgtgctgatctgcttcttcctgctggtgatcctgtggttcagccgggaccccggcttcatgcctggctggctgactgtggcctgggtggagggggagaccaagtatgtgtctgatgccaccgtggccatctttgtggccaccctgctcttcatcgtgcccagccagaagcccaagttcaacttccgcagccagacagaggaggagaggaagacccccttctaccccccacccctgctggactggaaggtgacccaggagaaggtgccctggggcatcgtgctgctgctgggcggcggctttgccctggccaagggcagcgaggccagcggcctgtctgtgtggatgggcaagcagatggagcccctgcatgctgtgcccccagctgccatcaccctcatcctgagcctgctggtggccgtgttcacagagtgcaccagcaatgtggccaccaccaccctcttcctgcccatctttgcctccatgagccgcagcatcggcctgaaccccctgtacatcatgctgccctgcaccctgagcgccagctttgccttcatgctgcctgtggccaccccaccaaatgccatcgtgttcacctacggccacctgaaggtggccgacatggtgaagacaggagtcatcatgaacatcatcggggtcttctgtgtgttcctggccgtgaacacctggggccgggccatctttgacctggaccacttcccagactgggccaacgtgacccacatcgagacctag

SEQ ID NO: 103963 - DNA, 1578 bp, Artificial Sequence
  derived and/or modified sequence
atggccagcgccctgagctacgtgagcaagttcaagagcttcgtgattttgtttgtcacaccattgctgctcctacctcttgtgatactgatgccagctaaagtgtgcgtacaatacatgaaagatacgaacatgttatttctggggggcctcatcgtagcagtggctgtggagcgatggaatctgcacaaacgcattgcgcttcgcaccttgctgtgggtgggcgctaaaccagcaagactgatgttagggttcatgggagtcaccgccctgctcagcatgtggatcagcaacaccgccacaaccgcaatgatggttccaatcgttgaagctatcctgcaacagatggaggctacttctgcggcgactgaagccggcttagagttggtggacaaaggaaaagctaaagagctgcccgggtcccaggtgatctttgagggcccgacccttgggcagcaggaggaccaggaaagaaagcgcctttgcaaagccatgacactctgcatttgttacgctgccagcattggtggcacagccaccctgacaggcaccggcccaaacgtcgtactgctgggtcagatgaatgaactatttccagacagtaaagacttggtcaactttgcatcttggttcgcgtttgccttcccgaatatgctggtcatgttattgttcgcatggctctggcttcagttcgtatacatgcgatttaatttcaaaaagtcatggggttgcgggttagaatctaaaaagaatgaaaaggccgccctcaaggtcttgcaagaagagtacaggaagctgggcccactgtcatttgcagaaattaacgtgctgatctgtttcttcttactggtgatcctctggttttcccgggaccctgggtttatgcctggctggctgaccgtcgcttgggttgagggagagacaaagtacgtcagcgacgcaaccgtagccattttcgtagctacactgttgttcatcgtacccagtcagaaaccaaagtttaacttcaggtctcaaaccgaagaggagaggaagacgccattctatccacctcccctgttggactggaaggtcacacaagaaaaggttccatggggcattgtcctgctcctcggtggcggcttcgctctcgccaaagggtccgaagcaagtgggttatccgtctggatggggaagcagatggaaccactccacgctgtgccccctgctgcaattaccctgattctgtccctgctggtcgccgtgtttacagagtgtacatctaacgtggccactaccacactgtttctgccaatatttgcttccatgagtcgcagcatcgggctgaatcccctctatatcatgctaccatgtacacttagcgccagctttgccttcatgcttcctgtggcaactcccccaaacgcaatcgtcttcacatatggccatctgaaggtagcggatatggttaagactggcgttatcatgaatatcattggagttttttgtgtgtttctggccgtcaatacctggggtagggctatattcgacttggaccactttccagattgggcaaacgtcacccatatcgagacttag

SEQ ID NO: 103964 - DNA, 1578 bp, Artificial Sequence
  derived and/or modified sequence
atggcctctgccctctcgtacgtgtcgaagttcaagagcttcgtcattctgttcgtgacacctctgttgttgctgcccctggtcatattgatgccggctaaagtgtgcgttcaatacatgaaggacaccaatatgctctttctgggcggactcatcgtggcagtggctgtagaacgctggaacctgcacaaacggattgcactaagaacactgctttgggtgggtgccaaacctgcacggctgatgttgggtttcatgggcgttactgcactgctgtccatgtggatctccaatacagccaccactgccatgatggtaccaattgtcgaagctatactgcagcagatggaagccacatcagccgctaccgaagccggactcgagttagtcgataagggtaaagccaaagaattgcccggaagccaggtgatcttcgaggggcctacactggggcaacaggaggatcaagaacgcaagagactgtgcaaggccatgactttgtgcatctgctatgctgctagtattgggggaactgctacacttaccggcactggccctaatgtcgtcctgctgggccagatgaatgagctttttcccgattcaaaggacttggtgaattttgcatcttggtttgcgtttgcgttccccaacatgctggtgatgttgctttttgcttggctgtggctgcagttcgtgtacatgaggtttaactttaagaagagttggggatgtggccttgagtctaagaagaacgagaaggcggcactgaaggtgctgcaggaggagtacagaaagctgggtccactcagtttcgccgagatcaacgtgctgatctgttttttcctactggtgattctctggttttccagggatccaggatttatgcccggatggctcacagtggcttgggtggagggagagaccaaatacgtgtccgacgccaccgtggccatctttgtcgctacactgctctttatcgtcccttcccagaagcctaaattcaacttccggtctcagacagaggaggagcgaaagacaccattctatccacctccactgctggattggaaggtaacacaggagaaagtcccatggggtattgtactcctgctggggggaggattcgcattggccaagggtagtgaggcctcaggcctcagcgtgtggatgggcaagcagatggagcccctccatgcagtcccccctgcagctatcacacttattctatcccttttagtggcggtattcaccgaatgtacttcgaacgtcgccacgacaactctcttcttaccgattttcgcaagcatgagcaggtccataggtcttaatcccctctatatcatgctcccttgtaccttgagcgcctcattcgcatttatgctgccagtagccacacccccaaacgccattgtgttcacctacggtcatctgaaagtcgcagacatggttaaaacaggcgtcatcatgaacattattggggtgttttgtgtcttcctggccgttaacacctggggtagagcgatattcgaccttgatcactttcctgactgggctaacgtgacacacatagagacatag

SEQ ID NO: 103965 - DNA, 1738 bp, Artificial Sequence
  derived and/or modified sequence
actcgtctcgcccgccagtctccctcccgcgcgatggcctcggcgctgagctatgtctccaagttcaagtccttcgtgatcttgttcgtcaccccgctcctgctgctgccactcgtcattctgatgcccgccaaggtgtgtgtccagtacatgaaggacaccaacatgctgttcctgggcggcctcatcgtggccgtggctgtggagcgctggaacctgcacaagaggatcgccctgcgcacgctcctctgggtgggggccaagcctgcacggctgatgctgggcttcatgggcgtcacagccctcctgtccatgtggatcagtaacacggcaaccacggccatgatggtgcccatcgtggaggccatattgcagcagatggaagccacaagcgcagccaccgaggccggcctggagctggtggacaagggcaaggccaaggagctgccagggagtcaagtgatttttgaaggccccactctggggcagcaggaagaccaagagcggaagaggttgtgtaaggccatgaccctgtgcatctgctacgcggccagcatcgggggcaccgccaccctgaccgggacgggacccaacgtggtgctcctgggccagatgaacgagttgtttcctgacagcaaggacctcgtgaactttgcttcctggtttgcatttgcctttcccaacatgctggtgatgctgctgttcgcctggctgtggctccagtttgtttacatgagattcaattttaaaaagtcctggggctgcgggctagagagcaagaaaaacgagaaggctgccctcaaggtgctgcaggaggagtaccggaagctggggcccttgtccttcgcggagatcaacgtgctgatctgcttcttcctgctggtcatcctgtggttctcccgagaccccggcttcatgcccggctggctgactgttgcctgggtggagggtgagacaaagtatgtctccgatgccactgtggccatctttgtggccaccctgctattcattgtgccttcacagaagcccaagtttaacttccgcagccagactgaggaagaaaggaaaactccattttatccccctcccctgctggattggaaggtaacccaggagaaagtgccctggggcatcgtgctgctactagggggcggatttgctctggctaaaggatccgaggcctcggggctgtccgtgtggatggggaagcagatggagcccttgcacgcagtgcccccggcagccatcaccttgatcttgtccttgctcgttgccgtgttcactgagtgcacaagcaacgtggccaccaccaccttgttcctgcccatctttgcctccatgtctcgctccatcggcctcaatccgctgtacatcatgctgccctgtaccctgagtgcctcctttgccttcatgttgcctgtggccacccctccaaatgccatcgtgttcacctatgggcacctcaaggttgctgacatggtgaaaacaggagtcataatgaacataattggagtcttctgtgtgtttttggctgtcaacacctggggacgggccatatttgacttggatcatttccctgactgggctaatgtgacacatattgagacttaggaagagccacaagaccacacacacagcccttaccctcctcaggactaccgaaccttctggcacaccttgtacagagttttggggttcacaccccaaaatgacccaacgatgtccacacaccaccaaa

SEQ ID NO: 103966 - DNA, 1578 bp, Artificial Sequence
  derived and/or modified sequence
atggccagcgccctgagctacgtgagcaagttcaagagcttcgtgatcctgttcgtgacccccctgctgctgctgcccctggtgatcctgatgcccgccaaggtgtgcgtgcagtacatgaaggacaccaacatgctgttcctgggcggcctgatcgtggccgtggccgtggagagatggaacctgcacaagagaatcgccctgagaaccctgctgtgggtgggcgccaagcccgccagactgatgctgggcttcatgggcgtgaccgccctgctgagcatgtggatcagcaacaccgccaccaccgccatgatggtgcccatcgtggaggccatcctgcagcagatggaggccaccagcgccgccaccgaggccggcctggagctggtggacaagggcaaggccaaggagctgcccggcagccaggtgatcttcgagggccccaccctgggccagcaggaggaccaggagagaaagagactgtgcaaggccatgaccctgtgcatctgctacgccgccagcatcggcggcaccgccaccctgaccggcaccggccccaacgtggtgctgctgggccagatgaacgagctgttccccgacagcaaggacctggtgaacttcgccagctggttcgccttcgccttccccaacatgctggtgatgctgctgttcgcctggctgtggctgcagttcgtgtacatgagattcaacttcaagaagagctggggctgcggcctggagagcaagaagaacgagaaggccgccctgaaggtgctgcaggaggagtacagaaagctgggccccctgagcttcgccgagatcaacgtgctgatctgcttcttcctgctggtgatcctgtggttcagcagagaccccggcttcatgcccggctggctgaccgtggcctgggtggagggcgagaccaagtacgtgagcgacgccaccgtggccatcttcgtggccaccctgctgttcatcgtgcccagccagaagcccaagttcaacttcagaagccagaccgaggaggagagaaagacccccttctaccccccccccctgctggactggaaggtgacccaggagaaggtgccctggggcatcgtgctgctgctgggcggcggcttcgccctggccaagggcagcgaggccagcggcctgagcgtgtggatgggcaagcagatggagcccctgcacgccgtgccccccgccgccatcaccctgatcctgagcctgctggtggccgtgttcaccgagtgcaccagcaacgtggccaccaccaccctgttcctgcccatcttcgccagcatgagcagaagcatcggcctgaaccccctgtacatcatgctgccctgcaccctgagcgccagcttcgccttcatgctgcccgtggccaccccccccaacgccatcgtgttcacctacggccacctgaaggtggccgacatggtgaagaccggcgtgatcatgaacatcatcggcgtgttctgcgtgttcctggccgtgaacacctggggcagagccatcttcgacctggaccacttccccgactgggccaacgtgacccacatcgagacctag

SEQ ID NO: 103967 - protein, 399 aa, Artificial Sequence
  derived and/or modified sequence
MPGDCRRDPPPTLKPETQPPEKRRRTIEDFNKFCSFVLAYAGYIPPSKEESDWPASGSSSPLRGESAADSDGWDSAPSDLRTIQTFVKKAKSSKRRAAQAGPTQPGPPRSTFSRLQAPDSATLLEKMKLKDSLFDLDGPKVASPLSPTSLTHTSRPPAALTPVPLSQGDLSHPPRKKDRKNRKLGPGAGAGFGVLRRPRPTPGDGEKRSRIKKSKKRKLKKAERGDRLPPPGPPQAPPSDTDSEEEEEEEEEEEEEEMATVVGGEAPVPVLPTPPEAPRPPATVHPEGVPPADSESKEVGSTETSQDGDASSSEGEMRVMDEDIMVESGDDSWDLITCYCRKPFAGRPMIECSLCGTWIHLSCAKIKKTNVPDFFYCQKCKELRPEARRLGGPPKSGEP

SEQ ID NO: 103968 - DNA, 1200 bp, Artificial Sequence
  derived and/or modified sequence
atgcctggggactgtcgccgtgatccaccacctaccctcaaaccagagacgcagccccctgagaaacgaaggaggactatagaagacttcaataaattttgcagcttcgtcctggcttatgcaggctacattcctccctccaaagaggagagcgattggcctgcatctggcagctctagcccacttcgcggagaatccgctgccgactccgatggttgggactcagcgccgtcggaccttcgaacgattcaaaccttcgtgaaaaaggctaaatcttccaaacgccgagctgcgcaggcggggcccactcagcctgggcctccgaggtctacatttagccgtttgcaggccccggattccgccacgttgttggagaagatgaagctcaaggattccctgttcgatctagatgggccgaaggtcgcctcccctttgtcacccacttcacttacccatacttccaggccccctgccgccctcacacctgtgcctctatcccagggagatctctcacaccctcctaggaagaaagatagaaaaaacagaaagctgggtccaggtgccggagcaggctttggagtgctgaggcgaccgcgcccgacaccgggggatggggagaaaagatctagaatcaaaaagagtaagaaaagaaagcttaagaaagcagaaaggggtgacagactgccccctccaggcccgcctcaggcccctccaagtgatacagattctgaggaagaggaggaggaagaggaagaagaggaagaggaagagatggccacagtcgtaggcggcgaggcaccagttcctgttctcccaacccctcctgaggcacctcgacccccagcaacggttcaccccgaaggagtccctccggctgattccgagtctaaggaggtggggtccaccgaaaccagccaggacggagacgcttcaagttccgagggggaaatgagggtcatggatgaggatatcatggtggagtcaggtgacgatagttgggacctcattacgtgttactgtcgcaagccctttgcgggccggcctatgattgagtgttcattgtgtggcacatggatccacctgtcctgcgctaagattaagaagaccaatgtgcctgactttttctactgtcagaagtgtaaagagctgcggcccgaagcccggagactcgggggccccccaaagagtggggagccttag

SEQ ID NO: 103969 - DNA, 1200 bp, Artificial Sequence
  derived and/or modified sequence
atgcctggggactgccggcgggaccccccacccaccctgaagccagagacccagcccccagagaagagaagaaggaccatcgaggacttcaacaagttctgcagctttgtgctggcctatgccggctacatcccccccagcaaggaggagagtgactggccagccagcggcagcagcagccccctgcggggggagagcgctgctgacagtgatggctgggacagcgcccccagcgacctgcggaccatccagacctttgtgaagaaggccaagagcagcaagagaagagctgcccaggccggccccacccagcccggccccccaagaagcaccttcagccggctgcaggccccagacagcgccaccctgctggagaagatgaagctgaaggacagcctgtttgacctggatggccccaaggtggccagccccctgagccccaccagcctgacccacaccagccggcccccagctgccctgacccctgtgcccctgagccagggcgacctgagccacccccccaggaagaaggacaggaagaacaggaagctgggccctggggccggggccggcttcggcgtgctgcggcggccccggcccaccccaggagatggagagaagaggagccgcatcaagaagagcaagaagaggaagctgaagaaggccgagcggggggaccggctgcccccacctggccccccccaggcccccccaagtgacacagattctgaggaggaggaggaggaggaggaggaggaggaggaggaggagatggccaccgtggtgggcggggaggcccctgtgcctgtgctgcccaccccacctgaggccccccggcccccagccaccgtgcaccctgagggcgtgcccccagctgacagcgagagcaaggaggtgggcagcacagagaccagccaggatggagatgccagcagcagcgagggggagatgagggtgatggatgaggacatcatggtggagagcggagatgacagctgggacctgatcacctgctactgcaggaagccctttgctggccggcccatgattgaatgttccctgtgtggcacctggatccacctgagctgtgccaagatcaagaagaccaacgtgcctgacttcttctactgccagaagtgcaaggagctgcggcctgaggcccggcggctgggcggcccccccaagagcggggagccctag

SEQ ID NO: 103970 - DNA, 1200 bp, Artificial Sequence
  derived and/or modified sequence
atgcccggcgactgccggcgggaccccccccccaccctgaagcccgagactcagcctcctgagaagcgccgcaggacaatcgaggattttaacaagttctgtagctttgtactggcgtacgccgggtacattccccccagcaaggaggagtccgactggcccgccagcgggagctcatcgcctctccgaggcgagagcgctgctgacagtgacggctgggatagcgccccctctgacctgagaaccattcaaacatttgtgaaaaaggctaagtcctccaagcgcagggctgcgcaggctgggcctactcagcctggacccccaagatctacctttagccggctccaagccccagactcggccacccttctcgagaaaatgaaactgaaggacagtttattcgatctggatggtcccaaagtggcaagtcccctgtcccccacgtcccttacacacaccagcagacctcctgcagcccttacacctgtccccctgagccagggtgacttatcccatccgccccggaaaaaagataggaagaatcgaaaactgggcccaggggccggcgctggctttggagtcctgaggcgacccaggcccaccccgggggatggcgagaagcgcagcagaatcaagaagtccaagaaacggaagttgaaaaaggcagagcgcggcgatagactgcccccacctgggccaccccaggccccgccttccgacacagattccgaggaggaggaggaagaggaggaagaggaggaggaagaggaaatggctacagtggtcgggggcgaggcccccgtgcctgtcctcccaacaccccccgaagctccaagaccccccgccacggttcaccccgagggcgtgcctcccgccgatagcgagtccaaagaggtaggcagcactgagacgtcacaggatggcgatgcgtcatcctcagagggggaaatgcgcgtgatggatgaagacatcatggtcgaatcaggggacgactcttgggatttgattacatgctactgccggaagccttttgcgggccggccaatgattgagtgcagtctgtgtgggacctggattcacctttcatgtgctaagattaagaagaccaacgtaccagacttcttttattgccagaaatgcaaggagctgcgaccagaagcccgcagactgggcggaccaccaaaatcgggagaaccttag

SEQ ID NO: 103971 - DNA, 1662 bp, Artificial Sequence
  derived and/or modified sequence
agtggccggagagttgctcaggagggaggacgtagaagaggctgagtgaggggcccggtagttcgccgaggtggggtagtttgtggcggtggtaccggagctccgagtagttgccgccggagaatgcccggtgattgtcggagagatccacctccgacccttaagccagagactcagccaccagagaaacggcggagaacaattgaggatttcaacaaattctgcagttttgttttggcatatgctggttacattccccctagcaaagaggaaagtgactggccagcctctggctccagctctccattgcgaggagagagtgcggccgacagtgatggctgggactcggccccctcagatcttcgaaccatccagacttttgttaagaaagcaaagtcatccaagagaagggcagctcaagcaggtcccacccagccaggacccccaaggtccactttctctcgtctgcaggcccccgacagtgctaccttgcttgagaagatgaagctcaaggactctctctttgatctggatgggcccaaagtggcatctcctttgtcccccacatccctgacacatacctcccggccccctgctgctcttacccccgtgcccctttcccagggggacctctcccatcctcctcgaaagaaggaccgaaagaaccgaaagttggggccaggagctggggctggctttggggtgcttcggaggcctcggccaactcctggggatggggaaaagagatctcgaatcaagaagagcaagaagcggaagttaaaaaaggcagaacggggggatagactcccacctcctgggcctccccaggcaccccccagtgatacagactctgaagaggaggaggaagaggaggaagaggaagaagaagaagagatggcaacagtggtagggggtgaagccccagtccctgtgctgccaacaccccctgaggctcctaggccccctgccacagtgcaccctgaaggagtccctcctgctgacagtgaaagcaaggaggtgggcagcactgaaacaagccaagatggagatgccagctccagtgaaggcgagatgcgggtcatggacgaggacatcatggtagaatcaggtgatgactcatgggatctgatcacatgttactgtcgaaagccctttgcagggcggcccatgattgagtgcagcctgtgtgggacgtggatccacctctcctgtgctaagattaagaagaccaacgtccccgacttcttttattgccagaaatgcaaggaactgaggccagaggcccggcggttaggggggcctcccaaatctggagagccctgatggcaccaactttagcctggaacttccaaatgacaacatgatttgggaactgagcctcagggtcctcagcctatcccctggagcttggatactgtctgcacttcaaggcaggaattctcaagggagacttgtttgaaaatgagtgtctcactttcccaccctatccttcctccccactctgtggacttgaaattgaatccattacggttggggatgggaggctgtctgtgtcccgacacataatctctgtctcttggacctgccaccatcactttctgggtcaggattggaattgggatggaatgggacagttgtctataaaactctagtgtaaatatt

SEQ ID NO: 103972 - DNA, 1200 bp, Artificial Sequence
  derived and/or modified sequence
atgccgggtgactgccggagggacccgcctcccactctgaaacccgaaacgcagccaccagagaagcgaaggagaaccatcgaggactttaataaattttgttccttcgtccttgcttatgccggatatatacctcctagtaaagaggagtcagattggcccgcttctggatccagtagccccctcaggggggagtcggccgctgactcggacgggtgggactccgctcccagcgacttgcggaccatccaaacattcgttaagaaggctaagtcttcaaaacgtcgcgcagcccaggcaggcccaactcagcccggacccccacggagcaccttcagccgacttcaagcccctgacagcgccactctgctggagaaaatgaaactcaaggactccctgttcgatctcgacgggccaaaagttgcatcgcctctttcacctacctcactgactcacacctctagacctccagcggctctgactccagtgcccctctctcagggtgatctgtcccaccccccacgaaagaaagacaggaaaaaccggaagttaggtccaggcgcaggcgctggctttggcgtgctccgaagacctagaccaacccctggcgacggagagaaaagatctcgcatcaagaagagtaagaagaggaaactaaaaaaggccgaaagaggagacaggctccccccaccaggccctcctcaggctcccccttcggataccgactccgaagaggaggaagaagaggaagaggaggaggaagaggaagagatggcaacagtggtaggaggcgaggccccagtgccagtccttccgacccctcccgaagcaccacgtcctcccgcaaccgtgcatccggaaggcgtaccgccagccgatagcgagagcaaagaagtggggtctactgagacttcccaggacggggacgctagcagcagcgagggagagatgcgggttatggatgaggatataatggtggagtcgggtgacgactcctgggatctcattacttgttactgtaggaagcctttcgctggaagaccaatgatcgagtgttcactgtgtggcacctggatccatctgtcttgcgctaagatcaagaagactaatgtaccggactttttctactgccagaagtgtaaagaacttcgacccgaggcacgcaggctgggcggtcccccaaaaagtggcgagccatag

SEQ ID NO: 103973 - DNA, 1200 bp, Artificial Sequence
  derived and/or modified sequence
atgcccggcgactgcagaagagaccccccccccaccctgaagcccgagacccagccccccgagaagagaagaagaaccatcgaggacttcaacaagttctgcagcttcgtgctggcctacgccggctacatcccccccagcaaggaggagagcgactggcccgccagcggcagcagcagccccctgagaggcgagagcgccgccgacagcgacggctgggacagcgcccccagcgacctgagaaccatccagaccttcgtgaagaaggccaagagcagcaagagaagagccgcccaggccggccccacccagcccggcccccccagaagcaccttcagcagactgcaggcccccgacagcgccaccctgctggagaagatgaagctgaaggacagcctgttcgacctggacggccccaaggtggccagccccctgagccccaccagcctgacccacaccagcagaccccccgccgccctgacccccgtgcccctgagccagggcgacctgagccacccccccagaaagaaggacagaaagaacagaaagctgggccccggcgccggcgccggcttcggcgtgctgagaagacccagacccacccccggcgacggcgagaagagaagcagaatcaagaagagcaagaagagaaagctgaagaaggccgagagaggcgacagactgcccccccccggccccccccaggccccccccagcgacaccgacagcgaggaggaggaggaggaggaggaggaggaggaggaggaggagatggccaccgtggtgggcggcgaggcccccgtgcccgtgctgcccaccccccccgaggcccccagaccccccgccaccgtgcaccccgagggcgtgccccccgccgacagcgagagcaaggaggtgggcagcaccgagaccagccaggacggcgacgccagcagcagcgagggcgagatgagagtgatggacgaggacatcatggtggagagcggcgacgacagctgggacctgatcacctgctactgcagaaagcccttcgccggcagacccatgatcgagtgcagcctgtgcggcacctggatccacctgagctgcgccaagatcaagaagaccaacgtgcccgacttcttctactgccagaagtgcaaggagctgagacccgaggccagaagactgggcggcccccccaagagcggcgagccctag

SEQ ID NO: 103974 - protein, 142 aa, Artificial Sequence
  derived and/or modified sequence
MAQKENSYPWPYGRQTAPSGLSTLPQRVLRKEPVTPSALVLMSRSNVQPTAAPGQKVMENSSGTPDILTRRHFTIDDFEIGRPLGKGKFGNVYLAREKKSHFIVALKVLFKSQIEKEGVEHQLRREIEIQAHLQSWRSWQML

SEQ ID NO: 103975 - DNA, 429 bp, Artificial Sequence
  derived and/or modified sequence
atggcccagaaggagaacagctacccctggccctacggcagacagaccgcccccagcggcctgagcaccctgccccagagagtgctgagaaaggagcccgtgacccccagcgccctggtgctgatgagcagaagcaacgtgcagcccaccgccgcccccggccagaaggtgatggagaacagcagcggcacccccgacatcctgaccagaagacacttcaccatcgacgacttcgagatcggcagacccctgggcaagggcaagttcggcaacgtgtacctggccagagagaagaagagccacttcatcgtggccctgaaggtgctgttcaagagccagatcgagaaggagggcgtggagcaccagctgagaagagagatcgagatccaggcccacctgcagagctggagaagctggcagatgctgtag

SEQ ID NO: 103976 - DNA, 429 bp, Artificial Sequence
  derived and/or modified sequence
atggcccagaaggaaaattcatatccctggccttatggtcggcagaccgcgccctcgggcttgtctaccctgccccagagggttcttcgcaaagaacctgttacaccgtccgccttagtgctgatgagtagatccaatgtgcagcccacagcagcgcctggccagaaggtaatggaaaacagtagcgggacaccagatattctgacacgaaggcattttacgatcgatgacttcgagattggacgacctctggggaagggcaagttcggcaacgtctaccttgcaagggaaaaaaaaagtcacttcattgtggccctgaaggttctctttaaaagtcaaatcgagaaggaaggcgttgaacatcagttgcgcagagagatcgagattcaggcgcacctgcaatcgtggaggagctggcagatgctgtag

SEQ ID NO: 103977 - DNA, 429 bp, Artificial Sequence
  derived and/or modified sequence
atggcccagaaggaaaattcctacccctggccctacggccggcagacagcccccagcggcctgagcaccctgccccagagggtgctgaggaaggagcctgtgaccccatctgccctggtgctgatgagccgcagcaatgtgcagcccacagctgcccctggccagaaggtgatggagaacagcagcggcaccccagacatcctgacccggcggcacttcaccattgatgactttgagatcggccggcccctgggcaagggcaagtttggaaatgtgtacctggcccgggagaagaagagccacttcatcgtggccctgaaggtgctcttcaagagccagatcgagaaggagggcgtggagcaccagctgcggcgggagattgagatccaggcccacctgcagagctggaggtcctggcagatgctgtag

SEQ ID NO: 103978 - DNA, 429 bp, Artificial Sequence
  derived and/or modified sequence
atggcccagaaggagaacagctacccctggccctacggccggcagaccgcgccgtccggattgagcaccctccctcagcgtgtgctcaggaaagagcccgtgacacccagcgcattggtattaatgagccgctctaacgtgcagcctactgctgctcccgggcagaaagtgatggagaattcgagtggcaccccggacattttgactcggaggcacttcacaatcgacgatttcgagatagggcggcctctgggcaagggaaaattcggaaatgtttatctagcacgggagaagaaatcccacttcatagtcgccctgaaggtgctcttcaaatcgcagatagaaaaggagggcgtggaacaccagctgcgccgggaaattgaaattcaggcccatttacaatcttggagaagttggcagatgctgtag

SEQ ID NO: 103979 - DNA, 429 bp, Artificial Sequence
  derived and/or modified sequence
atggctcagaaagagaactcctatccatggccttacgggaggcagacagctccaagtggtctgagtaccctcccacagagagtcctgagaaaagaacccgtgacccccagcgcactggtcttgatgtctcgtagcaacgtacagcccacagccgctcctgggcagaaagttatggaaaattccagcggtacacctgacatcctgacgcggagacacttcacaatcgatgatttcgaaattggacggccacttgggaaagggaaatttgggaatgtctacctggccagggagaagaaaagccacttcattgtggccctgaaagtgctgtttaaatctcagatagaaaaggagggagtggagcaccagttgaggagagagattgaaatacaggcacaccttcaaagttggagaagctggcagatgctgtag

SEQ ID NO: 103980 - DNA, 1227 bp, Artificial Sequence
  derived and/or modified sequence
atggccgagggcctgtgggagcagggcttcctgagaacccccgagcagtgcagaaccaagttcaagagcctgcagctgagctacagaaaggtgagaagaggcagagtgcccgagccctgcatcttctacgaggagatgaacgccctgagcggcagctgggccagcgccccccccatggccagcgacgccgtgcccggccaggagggcagcgacatcgaggccggcgagctgaaccaccagaacggcgagcccaccgaggtggaggacggcaccgtggacggcgccgacagagacgagaaggacttcagaaaccccggccaggaggtgagaaagctggacctgcccgtgctgttccccaacagactgggcttcgagttcaagaacgagatcaagaaggagaacctgaagtgggacgacagcgaggaggtggagatcaacaaggccctgcagagaaagagcagaggcgtgtactggcacagcgagctgcagaagggcctggagagcgagcccaccagcagaagacagtgcagaaacagccccggcgagagcgaggagaagacccccagccaggagaagatgagccaccagagcttctgcgccagagacaaggcctgcacccacatcctgtgcggcaagaactgcagccagagcgtgcacagcccccacaagcccgccctgaagctggagaaggtgagccagtgccccgagtgcggcaagaccttcagcagaagcagctacctggtgagacaccagagaatccacaccggcgagaagccccacaagtgcagcgagtgcggcaagggcttcagcgagagaagcaacctgaccgcccacctgagaacccacaccggcgagagaccctaccagtgcggccagtgcggcaagagcttcaaccagagcagcagcctgatcgtgcaccagagaacccacaccggcgagaagccctaccagtgcatcgtgtgcggcaagagattcaacaacagcagccagttcagcgcccacagaagaatccacaccggcgagagcccctacaagtgcgccgtgtgcggcaagatcttcaacaacagcagccacttcagcgcccacagaaagacccacaccggcgagaagccctacagatgcagccactgcgagagaggcttcaccaagaacagcgccctgaccagacaccagaccgtgcacatgaaggccgtgctgagcagccaggagggcagagacgccctgtag

SEQ ID NO: 103981 - DNA, 1227 bp, Artificial Sequence
  derived and/or modified sequence
atggcggagggtctttgggaacagggctttctgaggactccagagcagtgtcggaccaagttcaagtccctgcagttgtcatataggaaggtgagacgcggacgtgtgccagagccatgcattttctatgaagaaatgaacgccttaagcggttcttgggcaagcgcgccgcctatggcctccgatgccgtccccggacaggaaggctctgacattgaagcaggcgagctgaatcatcagaatggagagccaacagaggttgaagacgggaccgtcgacggcgccgatagggacgagaaagactttaggaatcccggccaagaagtgcggaagctagacctcccagtcctttttccgaaccggctgggtttcgaattcaaaaatgaaatcaaaaaagagaacttgaaatgggatgactccgaagaggttgaaattaacaaggcccttcaaaggaaaagtcgaggcgtctattggcatagtgagctgcaaaagggcctcgaatctgagcccacaagtcgaagacagtgcagaaacagccccggtgaaagtgaggagaagacaccatcccaggaaaagatgtcccaccagagtttctgtgcccgtgacaaagcatgcacccatatcctgtgcggtaaaaactgtagccagagcgtgcatagcccacacaagcccgccctgaagctagagaaggtgtctcagtgtcccgagtgcgggaagacattttctcgatcgtcctacctggttcgccaccagagaatccatacaggtgaaaaaccacacaaatgctccgaatgcggcaagggattctcggaaagatcaaacttaactgcccatctgagaacccatactggagagaggccctaccaatgtggccaatgtggtaagtcattcaaccagtcttcctcccttatcgtacaccagagaacccacactggcgagaaaccctaccaatgcattgtgtgtgggaaaagattcaacaactctagtcagttttccgcccaccggagaattcacacaggcgaatctccttacaagtgcgctgtatgtggaaaaatttttaacaacagcagccacttcagtgctcataggaagacacatacaggggagaaaccttaccggtgtagtcactgtgaaagagggttcacgaagaatagcgccctgacaagacatcaaacagttcacatgaaggccgtgctttcgtctcaagagggcagggacgctctgtag

SEQ ID NO: 103982 - DNA, 1227 bp, Artificial Sequence
  derived and/or modified sequence
atggccgagggcctgtgggagcagggcttcctgcggaccccagagcagtgcaggaccaagttcaagagcctgcagctgagctacaggaaggtgcggcggggccgggtgcctgagccctgcatcttctatgaggagatgaatgccctgagcggctcctgggccagcgccccacccatggccagtgatgctgtgcccggccaggagggcagtgacatcgaggccggggagctgaaccaccagaatggagagcccacagaggtggaggatggcaccgtggatggagctgacagagatgagaaggacttcagaaatcctggccaggaggtgaggaagctggacctgcctgtgctcttccccaaccggctgggctttgagttcaagaatgagatcaagaaggagaacctgaagtgggatgacagcgaggaggtggagatcaacaaggccctgcagaggaagagcagaggagtgtactggcacagcgagctgcagaagggcctggagagcgagcccaccagccggcggcagtgcaggaacagccctggagagagcgaggagaagacccccagccaggagaagatgagccaccagagcttctgtgcccgggacaaggcctgcacccacatcctgtgtgggaagaactgcagccagagcgtgcacagcccccacaagccagccctgaagctggagaaggtgtcccagtgcccagaatgtgggaagaccttcagccgcagcagctacctggtgcgccaccagaggatccacactggagagaagccccacaagtgcagtgaatgtgggaagggcttcagcgagaggagcaacctgacagcccacctgcggacccacactggagagcggccctaccagtgtggccagtgtgggaagagcttcaaccagagcagcagcctcatcgtgcaccagaggacccacactggagagaagccctaccagtgcatcgtgtgtgggaagcgcttcaacaacagcagccagttcagcgcccaccggcgcatccacactggagagagcccctacaagtgtgctgtgtgtgggaagatcttcaacaacagcagccacttcagcgcccacaggaagacccacactggagagaagccctaccgctgcagccactgtgagcggggcttcaccaagaacagcgccctgaccaggcaccagacagtgcacatgaaggctgtgctgagcagccaggagggcagagatgccctgtag

SEQ ID NO: 103983 - DNA, 1227 bp, Artificial Sequence
  derived and/or modified sequence
atggccgagggcctgtgggagcagggcttcctgcggacccccgagcagtgcaggacaaaattcaagtcacttcagctgagctatagaaaagttcgcagaggccgcgttccggaaccctgtatcttctacgaagaaatgaatgctctctctggctcttgggccagcgctcctcctatggcttcggatgcagttcccggccaggaggggtccgacatcgaagccggagagctcaatcatcagaatggagaacccaccgaagtagaagatggaacggtggacggcgcagacagggacgaaaaagatttccggaatcctggacaggaggttcgcaagctggacctgcccgtgctgtttcctaatcgactgggcttcgagtttaagaacgaaataaagaaggaaaacctcaaatgggacgattctgaagaggttgagattaacaaagcactccagcggaagagcagaggagtctactggcattccgagttacagaaggggctggagtcagaacccacgagcagacgacagtgtagaaattctcctggcgagtccgaagaaaaaactccttctcaggagaaaatgtcccaccaaagcttctgtgctcgcgataaagcctgtacgcatattctgtgcggtaagaactgttcgcaatctgtccatagcccacataaaccggccctgaagctggaaaaagtgtcgcaatgtcctgaatgtggcaaaacattctcccgatcctcatatctcgtgcgccatcagcgaattcataccggcgagaaaccccataaatgcagtgaatgcggtaaggggttcagtgagaggtcaaatctcactgcccatctgcgaacacacacaggagaaagaccatatcagtgcggacagtgtgggaagagctttaatcaaagcagcagcctgatcgtgcaccagaggacccatacaggcgagaaaccctatcaatgcatagtgtgcggtaaaagattcaacaactccagccagtttagcgcacatagacgcattcacactggggagagtccttacaaatgtgccgtgtgcggaaaaattttcaataacagcagccatttctcagcccatcgcaagacgcatacgggggagaaaccctataggtgcagccattgcgaaagaggattcaccaaaaattcagcactcacaaggcatcagacagtccacatgaaagcagtcctctctagccaggaaggtagggatgctctatag

SEQ ID NO: 103984 - DNA, 1227 bp, Artificial Sequence
  derived and/or modified sequence
atggcagagggactgtgggagcagggcttcctccgaacacctgaacaatgcaggaccaagtttaaaagcttacagttgtcctatcggaaagtgcggcgtggccgagtgccagagccatgcatattctacgaggaaatgaacgctcttagcggatcttgggcctcagctcctcctatggctagcgacgccgttcctggacaggaagggagcgatatcgaggcaggtgagctgaatcatcaaaatggcgagccaaccgaggttgaggacggtacagtggacggagccgatagagacgaaaaggattttcgcaatccaggtcaggaagtgcggaaacttgatctcccagtcctgtttcctaatcgattgggttttgagttcaaaaatgagattaaaaaagagaatctcaaatgggacgactctgaggaagttgagatcaataaggccctgcagcgtaaatcaagaggcgtctactggcatagcgaactccagaaggggctggaatcggaaccaacaagccgacgccagtgccggaatagccctggcgaatcagaggagaagactcctagccaggaaaaaatgtctcatcaaagcttttgtgcgagagacaaagcatgtacacatatactgtgtgggaagaattgtagtcagagtgtgcacagcccacacaaacccgctcttaaactcgaaaaagtgagccagtgtcctgaatgcggcaagactttcagccgcagtagctatctggtccgccatcagcggatccacactggcgagaaaccccataagtgcagcgagtgtggtaaaggtttttccgagaggagcaatctcacggcccatctgagaacacatacaggcgagagaccttatcaatgcggacagtgtggtaagagtttcaaccagagctccagtctcattgtacatcagaggacccatacaggcgaaaagccttaccaatgtattgtgtgcggcaagagattcaataatagctctcagttttcagcgcacagacggatccacactggggagagcccttataaatgcgcagtgtgtggaaaaatttttaataacagtagtcacttctctgcccaccgaaagactcatacaggagaaaagccataccggtgcagtcactgcgagagagggtttactaaaaattcagccctgactagacaccaaacagttcacatgaaagccgtgctgagcagtcaggaaggcagagacgccttgtag

SEQ ID NO: 103985 - DNA, 2270 bp, Artificial Sequence
  derived and/or modified sequence
ccccctgcgctctcgccatcgccccgcatttactcgctggaggagggggtcacctcattcctagggaggaggaaacagacattgagcggcgacgtgactcagtgttcataaataggacgacgtccctgcattcccaatctgcactattggaagaaaagccaatgtttgggccaaatttgagtccctctttaggacgtatgacaaggacatcacctttcagtattttaagagcttcaaacgagtcagaataaacttcagcaaccccttctccgcagcagatgccaggctccagctgcataagactgagtttctgggaaaggaaatgaagttatattttgctcagaccttacacataggaagctcacacctggctccgccaaatccagacaagcagtttctgatctcccctcccgcctctccgccagtgggatggaaacaagtggaagatgcgaccccagtcataaactatgatctcttatatgccatctccaagctggggccaggggaaaagtatgaattgcacgcagcgactgacaccactcccagcgtggtggtccatgtatgtgagagtgatcaagagaaggaggaagaagaggaaatggaaagaatgaggagacctaagccaaaaattatccagaccaggaggccggagtacacgccgatccacctcagctgaactggcacgcgacgaggacgcattccaaatcatactcacgggaggaatcttttactgtggaggtggctggtcacgacttcttcggaggtggcagccgagatcggggtggcagaaatcccagttcatgttgctcagaagagaatcaaggccgtgtccccttgttctaatgctgcacaccagttactgttcatggcacccgggaatgacttgggccaatcactgagtttgtggtgatcgcacaaggacatttgggactgtcttgagaaaacagataatgatagtgttttgtacttgttcttttctggtaggttctgtctgtgccaagggcaggttgatcagtgagctcaggagagagcttcctgtttctaagtggcctgcaggggccactctctactggtaggaagaggtaccacaggaagccgcctagtgcagagaggttgtgaaaacagcagcaatgcaatgtggaaattgtagcgtttcctttcttccctcatgttctcatgtttgtgcatgtatattactgatttacaagactaacctttgttcgtatataaagttacaccgttgttgttttacatcttttgggaagccaggaaagcgtttggaaaacgtatcacctttcccagattctcggattctcgactctttgcaacagcacttgcttgcggaactcttcctggaatgcattcactcagcatccccaaccgtgcaacgtgtaacttgtgcttttgcaaaagaagttgatctgaaattcctctgtagaatttagcttatacaattcagagaatagcagtttcactgccaacttttagtgggtgagaaattttagtttaggtgtttgggatcggacctcagtttctgttgtttcttttatgtggtggtttctatacatgaatcatagccaaaaacttttttggaaactgttggttgagatagttggttcttttaccccacgaagacatcaagatacacttgtaaataaagctgatagcatatattcatacctgttgtacacttgggtgaaaagtatggcagtgggagactaagatgtattaacctacctgtgaatcatatgttgtaggaaaagctgttcccatgtctaacaggacttgaattcaaagcatgtcaagtggatagtagatctgtggcgatatgagagggatgcagtgcctttccccattcattcctgatggaattgttatactaggttaacatttgtaatttttttctagttgtaatgtgtatgtctggtaaataggtattatattttggccttacaataccgtaacaatgtttgtcattttgaaatacttaatgccaagtaacaatgcatgctttggaaatttggaagatggttttattctttgagaagcaaatatgtttgcattaaatgctttgattgttcatatcaagaaattgattgaacgttctcaaaccctgtttacggtacttggtaagagggagccggtttgggagagaccattgcatcgctgtccaagtgtttcttgttaagtgcttttaaactggagaggctaacctcaaaatattttttttaactgcattctataataaatgggcacagtatgctccttac

SEQ ID NO: 103986 - DNA, 2686 bp, Artificial Sequence
  derived and/or modified sequence
tttgttaccgtaagtagtgtctatgtattggcaactgttctgctgattcgatgaatgtaataaatcataccttcttaccttcttgtaaaatcacctgcattgggactaaaggccatagtcccctaagaggggaaaggcttttctctaagaaagaagttaggagttcttgaaaggattgatgatccacttcctcagtaaaaaatgtattgaggaggccaggcacggtggctcatgcctgtaatcccagcactttgggaggccgagggatcacctgaggacaggagcttgagaccagccttgccaacatggcaaagccccgtctctactaaaaatacaaaaattagccaggtgtgctggcaggcacctgtaaccccagctactcgggaggctgaggcaggagaatcacttgaacctgggaggtggaggttgcagtgagccaaaactgcaccactgcactccagcctgggtgacagagcaagactctgtctcgaagaaaaaaaaaaaagtaatgacatcatctagtcaagggtcatatgcaggtaaatttcaactccttttatttttattgttatttttcaggccaaatttgagtccctctttaggacgtatgacaaggacatcacctttcagtattttaagagcttcaaacgagtcagaataaacttcagcaaccccttctccgcagcagatgccaggctccagctgcataagactgagtttctgggaaaggaaatgaagttatattttgctcagaccttacacataggaagctcacacctggctccgccaaatccagacaagcagtttctgatctcccctcccgcctctccgccagtgggatggaaacaagtggaagatgcgaccccagtcataaactatgatctcttatatgccatctccaagctggggccaggggaaaagtatgaattgcacgcagcgactgacaccactcccagcgtggtggtccatgtatgtgagagtgatcaagagaaggaggaagaagaggaaatggaaagaatgaggagacctaagccaaaaattatccagaccaggaggccggagtacacgccgatccacctcagctgaactggcacgcgacgaggacgcattccaaatcatactcacgggaggaatcttttactgtggaggtggctggtcacgacttcttcggaggtggcagccgagatcggggtggcagaaatcccagttcatgttgctcagaagagaatcaaggccgtgtccccttgttctaatgctgcacaccagttactgttcatggcacccgggaatgacttgggccaatcactgagtttgtggtgatcgcacaaggacatttgggactgtcttgagaaaacagataatgatagtgttttgtacttgttcttttctggtaggttctgtctgtgccaagggcaggttgatcagtgagctcaggagagagcttcctgtttctaagtggcctgcaggggccactctctactggtaggaagaggtaccacaggaagccgcctagtgcagagaggttgtgaaaacagcagcaatgcaatgtggaaattgtagcgtttcctttcttccctcatgttctcatgtttgtgcatgtatattactgatttacaagactaacctttgttcgtatataaagttacaccgttgttgttttacatcttttgggaagccaggaaagcgtttggaaaacgtatcacctttcccagattctcggattctcgactctttgcaacagcacttgcttgcggaactcttcctggaatgcattcactcagcatccccaaccgtgcaacgtgtaacttgtgcttttgcaaaagaagttgatctgaaattcctctgtagaatttagcttatacaattcagagaatagcagtttcactgccaacttttagtgggtgagaaattttagtttaggtgtttgggatcggacctcagtttctgttgtttcttttatgtggtggtttctatacatgaatcatagccaaaaacttttttggaaactgttggttgagatagttggttcttttaccccacgaagacatcaagatacacttgtaaataaagctgatagcatatattcatacctgttgtacacttgggtgaaaagtatggcagtgggagactaagatgtattaacctacctgtgaatcatatgttgtaggaaaagctgttcccatgtctaacaggacttgaattcaaagcatgtcaagtggatagtagatctgtggcgatatgagagggatgcagtgcctttccccattcattcctgatggaattgttatactaggttaacatttgtaatttttttctagttgtaatgtgtatgtctggtaaataggtattatattttggccttacaataccgtaacaatgtttgtcattttgaaatacttaatgccaagtaacaatgcatgctttggaaatttggaagatggttttattctttgagaagcaaatatgtttgcattaaatgctttgattgttcatatcaagaaattgattgaacgttctcaaaccctgtttacggtacttggtaagagggagccggtttgggagagaccattgcatcgctgtccaagtgtttcttgttaagtgcttttaaactggagaggctaacctcaaaatattttttttaactgcattctataataaatgggcacagtatgctccttacagaaaa

SEQ ID NO: 103987 - DNA, 2520 bp, Artificial Sequence
  derived and/or modified sequence
atgatttgtgcatcctcttttgctcgcttaggcaaattctggatttgtgttagagtggtcagaaatgccaagaacctgacttcttagattaaaagacaaaattgttggggggagaaaggttttttaatggtctgaacattttctcagttcagagcctgagatctgcatgagctcaccattgctctcgttaagtaatgttcactggctcaccgtggaaacttgaaggcatgtcagtgtacctgaaccgtgcctttttcaggactaactcaaagaccttcaggaagaaatatttgggtacagccatccgggaccacagaatcacagggcaggaatgtgaatgttgatgctggcgattgtgagctgcctgaccttaggcaagtagtctcaattcaccaagcctcctttcttcaaaggccaaatttgagtccctctttaggacgtatgacaaggacatcacctttcagtattttaagagcttcaaacgagtcagaataaacttcagcaaccccttctccgcagcagatgccaggctccagctgcataagactgagtttctgggaaaggaaatgaagttatattttgctcagaccttacacataggaagctcacacctggctccgccaaatccagacaagcagtttctgatctcccctcccgcctctccgccagtgggatggaaacaagtggaagatgcgaccccagtcataaactatgatctcttatatgccatctccaagctggggccaggggaaaagtatgaattgcacgcagcgactgacaccactcccagcgtggtggtccatgtatgtgagagtgatcaagagaaggaggaagaagaggaaatggaaagaatgaggagacctaagccaaaaattatccagaccaggaggccggagtacacgccgatccacctcagctgaactggcacgcgacgaggacgcattccaaatcatactcacgggaggaatcttttactgtggaggtggctggtcacgacttcttcggaggtggcagccgagatcggggtggcagaaatcccagttcatgttgctcagaagagaatcaaggccgtgtccccttgttctaatgctgcacaccagttactgttcatggcacccgggaatgacttgggccaatcactgagtttgtggtgatcgcacaaggacatttgggactgtcttgagaaaacagataatgatagtgttttgtacttgttcttttctggtaggttctgtctgtgccaagggcaggttgatcagtgagctcaggagagagcttcctgtttctaagtggcctgcaggggccactctctactggtaggaagaggtaccacaggaagccgcctagtgcagagaggttgtgaaaacagcagcaatgcaatgtggaaattgtagcgtttcctttcttccctcatgttctcatgtttgtgcatgtatattactgatttacaagactaacctttgttcgtatataaagttacaccgttgttgttttacatcttttgggaagccaggaaagcgtttggaaaacgtatcacctttcccagattctcggattctcgactctttgcaacagcacttgcttgcggaactcttcctggaatgcattcactcagcatccccaaccgtgcaacgtgtaacttgtgcttttgcaaaagaagttgatctgaaattcctctgtagaatttagcttatacaattcagagaatagcagtttcactgccaacttttagtgggtgagaaattttagtttaggtgtttgggatcggacctcagtttctgttgtttcttttatgtggtggtttctatacatgaatcatagccaaaaacttttttggaaactgttggttgagatagttggttcttttaccccacgaagacatcaagatacacttgtaaataaagctgatagcatatattcatacctgttgtacacttgggtgaaaagtatggcagtgggagactaagatgtattaacctacctgtgaatcatatgttgtaggaaaagctgttcccatgtctaacaggacttgaattcaaagcatgtcaagtggatagtagatctgtggcgatatgagagggatgcagtgcctttccccattcattcctgatggaattgttatactaggttaacatttgtaatttttttctagttgtaatgtgtatgtctggtaaataggtattatattttggccttacaataccgtaacaatgtttgtcattttgaaatacttaatgccaagtaacaatgcatgctttggaaatttggaagatggttttattctttgagaagcaaatatgtttgcattaaatgctttgattgttcatatcaagaaattgattgaacgttctcaaaccctgtttacggtacttggtaagagggagccggtttgggagagaccattgcatcgctgtccaagtgtttcttgttaagtgcttttaaactggagaggctaacctcaaaatattttttttaactgcattctataataaatgggcacagtatgctccttacagaaaa

SEQ ID NO: 103988 - protein, 242 aa, Artificial Sequence
  derived and/or modified sequence
MQGEQGRRLFRLLLNDLPGRDRLPCSYPQPHVEQASTSASPRLLAVNIPEDTLLSYPESSLPLQRHCAFHRFSKAKFESLFRTYDKDITFQYFKSFKRVRINFSNPFSAADARLQLHKTEFLGKEMKLYFAQTLHIGSSHLAPPNPDKQFLISPPASPPVGWKQVEDATPVINYDLLYAISKLGPGEKYELHAATDTTPSVVVHVCESDQEKEEEEEMERMRRPKPKIIQTRRPEYTPIHLS

SEQ ID NO: 103989 - DNA, 729 bp, Artificial Sequence
  derived and/or modified sequence
atgcagggcgagcagggtcggcgtctctttagactgctgctgaacgacctgcctggcagggatcggcttccgtgttcatatccacaaccacacgtagagcaggcttctacctcagcgtctcccaggctgctagcggtcaacatacctgaggatacactcctgtcctatcctgagtcttcactgcccctgcaacggcattgtgccttccacaggttctccaaggccaaattcgaatcacttttccggacttatgacaaagacatcaccttccaatactttaagtctttcaagcgagtgcgcattaacttttctaatccgttttcagcagctgacgctagattacagcttcataaaaccgaattcctgggaaaagagatgaaactgtacttcgcgcagacccttcacataggctcgagtcatttggcacccccaaatcccgacaagcaattcttgatatctcccccggccagcccccccgtgggttggaaacaagtggaagacgccacccccgtaattaactatgatcttctctatgccatctctaagttaggcccaggggagaaatatgagctccacgccgctaccgacacgacacccagtgtagttgttcacgtatgcgaaagtgatcaggaaaaggaagaggaagaagaaatggagcggatgcgaagaccaaaaccgaaaatcatccagaccaggaggcctgaatatactcctattcacctgtcgtag

SEQ ID NO: 103990 - DNA, 729 bp, Artificial Sequence
  derived and/or modified sequence
atgcagggcgagcagggcagaagactcttccggctgctgctgaatgacctgcccggccgggaccggctgccctgcagctacccccagccccacgtggagcaggccagcaccagcgccagcccccggctgctggccgtgaacatccctgaggacaccctgctgagctacccagagagcagcctgcccctgcagaggcactgtgccttccaccgcttcagcaaggccaagtttgagagcctcttccgcacctatgacaaggacatcaccttccagtacttcaagagcttcaagagggtgcgcatcaacttcagcaaccccttctctgctgctgatgcccggctgcagctgcacaagacagagttcctgggcaaggagatgaagctgtactttgcccagaccctgcacatcggcagcagccacctggccccacccaacccagacaagcagttcctgatcagccccccagccagcccccctgtgggctggaagcaggtggaggatgccacccctgtgatcaactatgacctgctgtatgccatcagcaagctgggccctggagagaagtatgagctgcatgctgccacagacaccacccccagcgtggtggtgcacgtgtgtgagagtgaccaggagaaggaggaggaggaggagatggagaggatgaggcggcccaagcccaagatcatccagacccggcggcctgagtacacccccatccacctgtcctag

SEQ ID NO: 103991 - DNA, 729 bp, Artificial Sequence
  derived and/or modified sequence
atgcagggcgagcagggccggcggctgttccggctgctgctgaacgatctgcccggccgagacaggctgccatgctcataccctcagccgcatgtggaacaggcatcaacctcggccagtccccgcttgttggctgtgaatatccccgaagacacactcttatcctatcccgagtctagtttgccactccagaggcactgtgcattccaccgctttagcaaggccaagttcgagtcgctatttagaacatatgataaagatattaccttccagtacttcaagtcttttaaaagagttcgcatcaacttttccaaccctttttccgccgccgacgctcggctacaacttcacaagacagagttcctgggaaaggaaatgaagctctattttgcgcagactctccacatcggctcgtcacacttagctccccctaatccagacaagcaatttctcatctctcctccagcttcaccccccgtgggctggaagcaggttgaggacgccacccctgtaatcaattacgacctgctgtatgccatcagtaagcttgggccaggggagaagtacgagctgcacgctgcaactgatactaccccaagtgtggtggttcacgtgtgcgagtccgatcaggagaaggaagaagaggaagagatggaacgaatgcggcggcctaagcctaaaattatccaaacaaggcggcccgaatataccccaatccatctgtcttag

SEQ ID NO: 103992 - DNA, 729 bp, Artificial Sequence
  derived and/or modified sequence
atgcagggagagcagggcagacggctgttcaggctgttgctgaatgacctccccggaagggaccggctgccttgcagctatcctcagcctcacgtggaacaggcatccactagcgcgtccccccgtctcctggctgtcaacatccccgaagatacactgctcagttacccggaatcgtccctccccctgcagaggcactgtgcattccatcgattctccaaagccaagtttgagtccttgttccgcacctatgacaaagatatcactttccagtacttcaagtcgttcaagcgggtgcgcatcaatttctcaaacccattctccgctgccgatgcccgtctgcagcttcacaaaaccgaatttcttggtaaggagatgaagctttacttcgcccagaccttacatatcggcagttctcacctggccccacctaacccagataagcaatttttgatttctccccctgcgagccctcccgtcgggtggaagcaagttgaggatgcgacgcccgtcatcaactatgaccttttgtatgccatttccaagctggggccaggtgaaaaatacgagttgcacgccgcaactgacactaccccgagcgtggttgtacatgtgtgtgaaagcgatcaggaaaaagaggaggaggaagaaatggaaagaatgaggcgacccaaaccaaagataattcagacgaggcggcctgagtatacgccaatccacctctcatag

SEQ ID NO: 103993 - DNA, 2404 bp, Artificial Sequence
  derived and/or modified sequence
cgttccttcgcacgtgcctctgcgggatccctcgtgggaaagtctcagaaatgtccctaaactgaagaaaagccggggaatgcaaggagagcaaggtcgtaggttgttccgactgctccttaacgacctgcctggcagggaccgactaccctgctcctacccgcagccccatgtggagcaggcatccaccagtgcctccccgcgcttgctagcagtgaacattcctgaagacactctcctctcttatcctgaatcctcgctcccactgcagagacactgcgccttccataggttctccaaggccaaatttgagtccctctttaggacgtatgacaaggacatcacctttcagtattttaagagcttcaaacgagtcagaataaacttcagcaaccccttctccgcagcagatgccaggctccagctgcataagactgagtttctgggaaaggaaatgaagttatattttgctcagaccttacacataggaagctcacacctggctccgccaaatccagacaagcagtttctgatctcccctcccgcctctccgccagtgggatggaaacaagtggaagatgcgaccccagtcataaactatgatctcttatatgccatctccaagctggggccaggggaaaagtatgaattgcacgcagcgactgacaccactcccagcgtggtggtccatgtatgtgagagtgatcaagagaaggaggaagaagaggaaatggaaagaatgaggagacctaagccaaaaattatccagaccaggaggccggagtacacgccgatccacctcagctgaactggcacgcgacgaggacgcattccaaatcatactcacgggaggaatcttttactgtggaggtggctggtcacgacttcttcggaggtggcagccgagatcggggtggcagaaatcccagttcatgttgctcagaagagaatcaaggccgtgtccccttgttctaatgctgcacaccagttactgttcatggcacccgggaatgacttgggccaatcactgagtttgtggtgatcgcacaaggacatttgggactgtcttgagaaaacagataatgatagtgttttgtacttgttcttttctggtaggttctgtctgtgccaagggcaggttgatcagtgagctcaggagagagcttcctgtttctaagtggcctgcaggggccactctctactggtaggaagaggtaccacaggaagccgcctagtgcagagaggttgtgaaaacagcagcaatgcaatgtggaaattgtagcgtttcctttcttccctcatgttctcatgtttgtgcatgtatattactgatttacaagactaacctttgttcgtatataaagttacaccgttgttgttttacatcttttgggaagccaggaaagcgtttggaaaacgtatcacctttcccagattctcggattctcgactctttgcaacagcacttgcttgcggaactcttcctggaatgcattcactcagcatccccaaccgtgcaacgtgtaacttgtgcttttgcaaaagaagttgatctgaaattcctctgtagaatttagcttatacaattcagagaatagcagtttcactgccaacttttagtgggtgagaaattttagtttaggtgtttgggatcggacctcagtttctgttgtttcttttatgtggtggtttctatacatgaatcatagccaaaaacttttttggaaactgttggttgagatagttggttcttttaccccacgaagacatcaagatacacttgtaaataaagctgatagcatatattcatacctgttgtacacttgggtgaaaagtatggcagtgggagactaagatgtattaacctacctgtgaatcatatgttgtaggaaaagctgttcccatgtctaacaggacttgaattcaaagcatgtcaagtggatagtagatctgtggcgatatgagagggatgcagtgcctttccccattcattcctgatggaattgttatactaggttaacatttgtaatttttttctagttgtaatgtgtatgtctggtaaataggtattatattttggccttacaataccgtaacaatgtttgtcattttgaaatacttaatgccaagtaacaatgcatgctttggaaatttggaagatggttttattctttgagaagcaaatatgtttgcattaaatgctttgattgttcatatcaagaaattgattgaacgttctcaaaccctgtttacggtacttggtaagagggagccggtttgggagagaccattgcatcgctgtccaagtgtttcttgttaagtgcttttaaactggagaggctaacctcaaaatattttttttaactgcattctataataaatgggcacagtatgctccttacag

SEQ ID NO: 103994 - DNA, 729 bp, Artificial Sequence
  derived and/or modified sequence
atgcagggcgagcagggcagaagactgttcagactgctgctgaacgacctgcccggcagagacagactgccctgcagctacccccagccccacgtggagcaggccagcaccagcgccagccccagactgctggccgtgaacatccccgaggacaccctgctgagctaccccgagagcagcctgcccctgcagagacactgcgccttccacagattcagcaaggccaagttcgagagcctgttcagaacctacgacaaggacatcaccttccagtacttcaagagcttcaagagagtgagaatcaacttcagcaaccccttcagcgccgccgacgccagactgcagctgcacaagaccgagttcctgggcaaggagatgaagctgtacttcgcccagaccctgcacatcggcagcagccacctggccccccccaaccccgacaagcagttcctgatcagcccccccgccagcccccccgtgggctggaagcaggtggaggacgccacccccgtgatcaactacgacctgctgtacgccatcagcaagctgggccccggcgagaagtacgagctgcacgccgccaccgacaccacccccagcgtggtggtgcacgtgtgcgagagcgaccaggagaaggaggaggaggaggagatggagagaatgagaagacccaagcccaagatcatccagaccagaagacccgagtacacccccatccacctgagctag

SEQ ID NO: 103995 - DNA, 354 bp, Artificial Sequence
  derived and/or modified sequence
atgaaactgtacttcgcccaaacactgcacattggaagctctcatctggcccctcctaacccggacaagcaattcctcatcagccctccggcctcccctccggttgggtggaagcaagtagaggatgccacaccggtgatcaattacgatctgctgtatgccatctcaaagctgggaccaggagagaagtatgagttgcatgctgccaccgacacaacgccaagtgtcgtcgtgcacgtctgtgagagtgatcaggagaaagaagaggaagaggagatggagcgcatgaggcggccaaaacctaagatcattcagacgcgccgccctgaatacacaccaatacacttatcttag

SEQ ID NO: 103996 - DNA, 354 bp, Artificial Sequence
  derived and/or modified sequence
atgaagctctacttcgctcagactctgcacataggctcttcccacctggcacctcccaaccccgataaacagtttcttatctcaccacccgcctccccccctgtgggctggaagcaggtcgaggatgctacgccggtgattaattacgacttactgtacgccatcagcaagctcgggccaggcgaaaaatatgaactacacgcagccaccgacactacccccagtgtggtggtccacgtttgtgaaagtgaccaagagaaagaagaggaggaggaaatggaacgtatgagaaggcctaagccaaagataatccaaacaagaaggcctgaatacactcccatccacctaagctag

SEQ ID NO: 103997 - DNA, 354 bp, Artificial Sequence
  derived and/or modified sequence
atgaaactgtactttgcacagaccctgcacattggatccagtcacttagcaccaccaaaccctgacaaacagtttcttatttcgccacccgccagtccaccagtcggatggaaacaagtggaagatgcaaccccagtaattaactacgatctgctctacgccattagcaagctgggtccaggagaaaagtatgagctccatgcagcgactgatacaacaccttccgtggtagtgcacgtgtgcgagtcagaccaggagaaagaggaggaagaagaaatggagagaatgaggcgccccaagccaaagattatacagacccgccgccccgagtacacgccaattcatctcagttag

SEQ ID NO: 103998 - DNA, 354 bp, Artificial Sequence
  derived and/or modified sequence
atgaagctgtactttgcccagaccctgcacatcggcagcagccacctggccccacccaacccagacaagcagttcctgatcagccccccagccagcccccctgtgggctggaagcaggtggaggatgccacccctgtgatcaactatgacctgctgtatgccatcagcaagctgggccctggagagaagtatgagctgcacgccgccacagacaccaccccatctgtggtggtgcacgtgtgtgagagtgaccaggagaaggaggaggaggaggagatggagaggatgagaagacccaagcccaagatcatccagaccaggaggcctgagtacacccccatccacctgtcctag

SEQ ID NO: 103999 - DNA, 354 bp, Artificial Sequence
  derived and/or modified sequence
atgaagctgtacttcgcccagaccctgcacatcggcagcagccacctggcccctccaaatcctgacaagcagtttctcatttccccaccagcctcaccccccgtcggctggaagcaggtggaagatgcaacccctgttattaactatgacttgttgtacgctatctctaagctgggacctggtgaaaagtacgaactgcacgctgcaaccgataccacgccatcggtcgtcgtgcatgtgtgtgaaagcgatcaagagaaagaggaagaggaagagatggagaggatgcgtagacctaagcctaaaatcattcagacgagacgccctgaatatactccaatacatttgagctag

SEQ ID NO: 104000 - DNA, 354 bp, Artificial Sequence
  derived and/or modified sequence
atgaagctgtacttcgcccagaccctgcacatcggcagcagccaccttgcaccccccaatcccgacaaacagttcctgatctctccgccggcttcgccccccgttggctggaaacaagtcgaagatgccaccccagtgataaactacgatttactgtatgcgatttcaaaactgggtcccggagaaaaatacgaattgcacgctgccaccgacaccacaccctcagtggtggtgcatgtgtgtgagtccgaccaggagaaggaagaagaggaagaaatggaaagaatgcggagacccaagccaaagataattcagacccgtcgccctgagtatacacccatccacttgtcctag

SEQ ID NO: 104001 - DNA, 354 bp, Artificial Sequence
  derived and/or modified sequence
atgaagctgtacttcgcccagaccctgcacatcggcagcagccacctagcgccacccaatcctgacaaacagttcctgatcagccccccagctagtccacccgttgggtggaaacaggtggaagacgccacccctgtcatcaattatgatctgctgtacgcaatctcaaagttgggtccaggggagaagtacgagcttcatgcagccactgatacaacaccaagcgtcgtcgttcacgtctgtgagagtgaccaggagaaggaggaggaagaagaaatggaaagaatgagacgccccaagccaaaaatcatccaaacacggcgcccagaatatactccgattcatctctcctag

SEQ ID NO: 104002 - DNA, 354 bp, Artificial Sequence
  derived and/or modified sequence
atgaagttgtatttcgctcagacattgcacattggctcctctcatctggcgcctccaaaccctgacaagcagtttctgatctccccccctgcttcacctccagtgggctggaaacaggtcgaggatgccacacccgtcattaactacgaccttctatatgccattagcaaactagggcctggtgagaagtatgagctgcacgccgctactgatacaactccatccgtagtggtccacgtgtgcgaatccgatcaagaaaaggaggaagaagaagagatggaaaggatgaggcggccaaagcccaaaataattcagacccgtagacccgagtacacccctatccatctgtcctag

SEQ ID NO: 104003 - DNA, 354 bp, Artificial Sequence
  derived and/or modified sequence
atgaaactctactttgcccaaacgctgcacataggaagttctcatctggccccacctaaccctgataaacagttcctaatatcaccaccagcaagccctccagtgggctggaaacaagtggaggatgctaccccagttatcaactatgacttgctttacgcgatatccaaactgggcccaggcgaaaagtatgaactgcatgccgcaactgacacgacaccatctgttgtcgtgcacgtgtgtgagtcagatcaggagaaagaggaagaggaggagatggagagaatgaggcggcctaagccaaaaattattcagacccgcagacctgaatacacccccattcacctgagctag

SEQ ID NO: 104004 - DNA, 354 bp, Artificial Sequence
  derived and/or modified sequence
atgaagctgtattttgcccaaactcttcacatcggcagctctcatcttgcgccaccgaaccctgacaaacagtttcttatttctccaccagccagtccccctgtaggctggaagcaagtggaagacgccacaccagtaatcaactatgacttgctgtatgccattagcaagctcggccctggagagaaatacgaactccacgctgctactgacacaacaccatcagtggtggttcacgtttgtgagagcgaccaggaaaaagaagaggaagaggaaatggaaagaatgagaagaccaaagcccaaaataatccaaactagaaggcctgagtatacacctatccacttgagctag

SEQ ID NO: 104005 - DNA, 354 bp, Artificial Sequence
  derived and/or modified sequence
atgaagctgtacttcgcccagaccctgcacatcggcagcagccacctggccccccccaaccccgacaagcagttcctgatcagcccccccgccagcccccccgtgggctggaagcaggtggaggacgccacccccgtgatcaactacgacctgctgtacgccatcagcaagctgggccccggcgagaagtacgagctgcacgccgccaccgacaccacccccagcgtggtggtgcacgtgtgcgagagcgaccaggagaaggaggaggaggaggagatggagagaatgagaagacccaagcccaagatcatccagaccagaagacccgagtacacccccatccacctgagctag

SEQ ID NO: 104006 - protein, 1732 aa, Artificial Sequence
  derived and/or modified sequence
MAAIGRGRSLKNLRVRGRNDSGEENVPLDLTREPSDNLREILQNVARLQGVSNMRKLGHLNNFTKLLCDIGHSEEKLGFHYEDIIICLRLALLNEAKEVRAAGLRALRYLIQDSSILQKVLKLKVDYLIARCIDIQQSNEVERTQALRLVRKMITVNASLFPSSVTNSLIAVGNDGLQERDRMVRACIAIICELALQNPEVVALRGGLNTILKNVIDCQLSRINEALITTILHLLNHPKTRQYVRADVELERILAPYTDFHYRHSPDTAEGQLKEDREARFLASKMGIIATFRSWAGIINLCKPGNSGIQSLIGVLCIPNMEIRRGLLEVLYDIFRLPLPVVTEEFIEALLSVDPGRFQDSWRLSDGFVAAEAKTILPHRARSRPDLMDNYLALILSAFIRNGLLEGLVEVITNSDDHISVRATILLGELLHMANTILPHSHSHHLHCLPTLMNMAASFDIPKEKRLRASAALNCLKRFHEMKKRGPKPYSLHLDHIIQKAIATHQKRDQYLRVQKDIFILKDTEEALLINLRDSQVLQHKENLEWNWNLIGTILKWPNVNLRNYKDEQLHRFVRRLLYFYKPSSKLYANLDLDFAKAKQLTVVGCQFTEFLLESEEDGQGYLEDLVKDIVQWLNASSGMKPERSLQNNGLLTTLSQHYFLFIGTLSCHPHGVKMLEKCSVFQCLLNLCSLKNQDHLLKLTVSSLDYSRDGLARVILSKILTAATDACRLYATKHLRVLLRANVEFFNNWGIELLVTQLHDKNKTISSEALDILDEACEDKANLHALIQMKPALSHLGDKGLLLLLRFLSIPKGFSYLNERGYVAKQLEKWHREYNSKYVDLIEEQLNEALTTYRKPVDGDNYVRRSNQRLQRPHVYLPIHLYGQLVHHKTGCHLLEVQNIITELCRNVRTPDLDKWEEIKKLKASLWALGNIGSSNWGLNLLQEENVIPDILKLAKQCEVLSIRGTCVYVLGLIAKTKQGCDILKCHNWDAVRHSRKHLWPVVPDDVEQLCNELSSIPSTLSLNSESTSSRHNSESESVPSSMFILEDDRFGSSSTSTFFLDINEDTEPTFYDRSGPIKDKNSFPFFASSKLVKNRILNSLTLPNKKHRSSSDPKGGKLSSESKTSNRRIRTLTEPSVDFNHSDDFTPISTVQKTLQLETSFMGNKHIEDTGSTPSIGENDLKFTKNFGTENHRENTSRERLVVESSTSSHMKIRSQSFNTDTTTSGISSMSSSPSRETVGVDATTMDTDCGSMSTVVSTKTIKTSHYLTPQSNHLSLSKSNSVSLVPPGSSHTLPRRAQSLKAPSIATIKSLADCNFSYTSSRDAFGYATLKRLQQQRMHPSLSHSEALASPAKDVLFTDTITMKANSFESRLTPSRIDFKKKHVGGIRSLRPTITNNLFRFMKALSYASLDKEDLLSPINQNTLQRSSSVRSMVSSATYGGSDDYIGLALPVDINDIFQVKDIPYFQTKNIPPHDDRGARAFAHDAGGLPSGTGGLVKNSFHLLRQQMSLTEIMNSIHSDASLFLESTEDTGLQEHTDDNCLYCVCIEILGFQPSNQLSAICSHSDFQDIPYSDWCEQTIHNPLEVVPSKFSGISGCSDGVSQEGSASSTKSTELLLGVKTIPDDTPMCRILLRKEVLRLVINLSSSVSTKCHETGLLTIKEKYPQTFDDICLYSEVSHLLSHCTFRLPCRRFIQELFQDVQFLQMHEEAEAVLATPPKQPIVDTSAES

SEQ ID NO: 104007 - DNA, 5199 bp, Artificial Sequence
  derived and/or modified sequence
atggccgccatcggtcgcggacggagtctcaaaaacctgcgggtccggggtcgtaatgatagcggcgaggaaaatgtgcccctggatctgactcgagagccatcagacaacctgagagagatcctccagaacgttgccagacttcaaggggtatcaaacatgaggaagctaggccatctcaacaatttcactaaactcttgtgcgacattggtcatagcgaggaaaagcttggttttcattacgaggatattattatctgtctgcgtctggctctactgaacgaggccaaggaagttcgcgctgctggccttagagcattgaggtacctcatccaagacagtagcatcttgcagaaggtcctgaaactgaaggtggactacctcatcgcaagatgcatagacatccaacagtctaacgaggtggaaagaacccaggcccttcgcctggtgaggaagatgatcacagtgaacgcctcccttttcccatccagcgtgacaaattcacttatcgctgtcgggaatgacggactccaggagcgtgacagaatggttagggcttgcatcgccattatttgtgagcttgcgttgcagaacccagaggttgtggccctgaggggcggtttgaacaccatattgaagaacgtgatcgattgccaacttagccggataaacgaggcgttgataaccaccatcctccacctgctgaaccatccaaagacccgacagtacgtgcgagctgacgtggagcttgaaagaatactggcaccttacacagacttccactaccggcactcacccgacacagcggaggggcagctgaaggaagatagggaggcccgctttctggcatctaaaatgggcattatcgccacattcaggtcctgggctggtattatcaacctctgtaagcccggcaattccggcattcagtctctgattggtgtgctttgcattccgaatatggaaattcgccggggactactggaggtgctatatgatattttcaggctccctctacctgtcgtaaccgaggagttcattgaagccctgctctcagtggatcccggaagatttcaggattcatggcgtctgagcgacggattcgtcgccgctgaggctaagaccattcttcctcaccgcgcccgctctaggccggatctaatggataattatctggcccttattcttagtgctttcatcaggaacggcctgctggaaggcctggttgaggtcataacaaacagtgacgatcatatatccgttcgggcaaccatcctattgggcgagctgttacatatggctaatacaatactcccacattctcattctcatcatttacactgccttcctacgttgatgaacatggctgcaagttttgatatcccaaaagaaaaacgtcttcgagcaagtgcggccctcaactgtctaaaacggttccacgaaatgaagaagcggggcccaaaaccgtatagccttcacctggatcacatcatccagaaggcaatagcgacacatcagaaaagagatcaatatctgcgggtgcagaaagacatcttcatactgaaggatacagaggaagccctcctcattaatttgcgcgattcccaggtgctccaacataaagagaatctagagtggaactggaatctcatcggcaccatactaaaatggccgaatgtaaacctgaggaattacaaggatgagcagctccataggtttgttaggcgtctgttgtacttttacaagcccagttccaaactgtacgcaaacctggacctggacttcgccaaggctaagcagctcacagtggtcgggtgccagtttacagaattccttctcgagtccgaggaggacggtcaaggttacctcgaagacttagtgaaggacattgtgcaatggctcaacgcatcctctggtatgaaaccggaacggtcactgcaaaataacggtctcttaaccaccctgagccagcattattttctatttatcggcactctttcctgccacccgcacggcgttaaaatgctggaaaaatgcagcgtcttccagtgtttactcaacttatgctcgctgaagaatcaagatcacctgctgaaactcaccgtgtctagcctggattactctcgggatggactggccagagtgatcttgagtaagatactcaccgctgctaccgatgcctgcaggttgtatgcgacaaagcacctgcgcgtgcttctgcgtgccaacgtggagttcttcaacaactggggcattgagctactggtcactcagctacatgacaaaaacaagaccatcagtagtgaggcacttgacattctggacgaagcgtgcgaggacaaggccaatctgcatgctcttatccagatgaagccagctctttcccatctgggggacaagggtttactgctcctgctgagattcctcagcattccaaaaggattctcatatttgaacgagcgtggatatgtggccaagcagttggagaaatggcacagggagtataacagcaagtatgtcgatctgatagaggagcaactgaacgaagcccttactacctacagaaaacccgttgatggcgacaactacgtgaggcggtccaaccaacggctgcagcgtcctcacgtttatctccccatccacctctatggccagctcgtccatcacaaaactggctgtcacctgcttgaagttcagaacattatcacggagctctgtcgcaatgtgaggactcctgacctggacaagtgggaggagatcaaaaaactgaaagcttccctctgggccctgggaaatatcggctccagcaactggggtttaaatctcctgcaagaagagaacgtcattcctgacattcttaaacttgcaaagcagtgcgaagttttatccatccgaggcacgtgcgtatatgtgctcggcctgatcgcaaagacaaagcaaggctgcgacatactcaaatgtcataactgggatgccgtgaggcacagtagaaagcatctctggccggtagtccctgacgacgtcgaacagctgtgcaatgaactgagctccatccccagcacactgagtttgaattctgaaagcactagtagccgccacaactccgagagcgagtccgtgccttccagcatgttcatcctggaagacgacaggtttggcagtagttctacttccacgttctttctggacataaacgaagacaccgagcctactttttatgaccggagcggcccaattaaagataaaaattccttcccattttttgccagttctaaactggtgaagaataggatcctcaacagcctgaccctgccgaataaaaagcacaggagctctagcgatccgaaagggggcaagctgtccagtgagtcgaaaacttccaatcgcagaatcagaacattgacagagcccagcgtggactttaaccatagcgacgacttcacccccatttcaaccgtccagaagactctccaacttgagacttccttcatggggaataagcacatcgaggacacaggcagtacaccgtctatcggagaaaacgatctgaagttcactaagaatttcggtacagagaaccatagagaaaacacctccagggaacggctggtcgtagaaagttctacctcttcccacatgaagatccgctcccagagcttcaacactgacactacgacaagcggtatttcctcgatgtcaagctcccctagccgggaaactgtaggagttgatgcaacaactatggatacagattgcggctcaatgtctacggtcgtctcaacaaaaaccatcaagacaagccactatctgaccccacagtcgaatcacctgtccctgtctaagtcaaactccgtgtccttggttccgccaggatcaagccacaccctcccccggcgtgcacagtctcttaaggctccctctattgctacgatcaaaagtctggctgattgtaacttttcttatacctcttcccgagacgctttcggatacgccactctgaagcgacttcagcagcaaaggatgcatccatcattgtcccacagtgaggcgcttgcctccccggccaaggacgtgttgttcaccgacacgatcacaatgaaagccaatagcttcgaaagtcgactgactcctagccggattgactttaaaaagaagcacgttggtggcattagatcactgcgcccgacaatcaccaacaacctgtttcggttcatgaaggccttgtcatacgctagcctcgataaggaggacctactttctccgattaaccagaacaccttgcagaggagttcctccgtcaggtcaatggtatcgagcgcaacatacgggggtagcgacgattacatcggcttggccctgcccgtggatataaacgatatattccaggtgaaagatatcccatatttccagacgaagaacatccccccccacgatgacaggggagcccgggcattcgcacatgatgctggcggcctgccctctggcaccggcggtctggtcaaaaactcattccacctgctgcgacagcagatgagtctgactgaaatcatgaattcaatccatagtgacgcgagcctgtttctcgagtctactgaagacacaggactacaggaacacaccgacgacaattgtctgtattgtgtctgcatcgagattctgggctttcagccttcaaatcagctaagtgctatctgctcacactccgacttccaggatatcccatattccgattggtgcgaacagactatccacaatcctctggaagtcgtgcccagcaagttctcaggaatatctgggtgcagcgatggcgtaagccaggagggatccgcctcctccacgaagagtacggagctgctgctgggagtgaagaccatccccgatgataccccaatgtgccggattctgctccgcaaggaagtccttcgcctggtgataaacctcagctctagcgtctctacaaagtgccatgaaacaggcctgttgacgattaaagagaaatacccccaaacctttgatgacatctgtctgtactccgaagtgagtcacctcttatctcattgcacctttcgcctgccatgccgcagattcatacaggagttgtttcaggacgtccaattcctgcagatgcacgaggaagctgaagcggttctagcgaccccgcccaagcagcccattgtcgacacatcggccgagtcctag

SEQ ID NO: 104008 - DNA, 5199 bp, Artificial Sequence
  derived and/or modified sequence
atggccgccatcggccggggccgcagcctgaagaacctgcgggtgcggggcagaaatgattctggagaggagaatgtgcccctggacctgacccgggagcccagcgacaacctgcgggagatcctgcagaatgtggcccggctgcagggcgtgagcaacatgaggaagctgggccacctgaacaacttcaccaagctgctgtgtgacatcggccacagcgaggagaagctgggcttccactatgaggacatcatcatctgcctgcggctggccctgctgaatgaggccaaggaggtgcgggccgccggcctgcgggccctgcgctacctgatccaggacagcagcatcctgcagaaggtgctgaagctgaaggtggactacctgattgcccgctgcatcgacatccagcagagcaatgaggtggagaggacccaggccctgcggctggtgaggaagatgatcaccgtgaatgccagcctcttccccagctctgtgaccaacagcctgattgctgtgggcaatgatggcctgcaggagcgggacaggatggtgcgggcctgcatcgccatcatctgtgagctggccctgcagaaccctgaggtggtggccctgcggggcggcctgaacaccatcctgaagaatgtcatcgactgccagctgagccgcatcaatgaggccctgatcaccaccatcctgcacctgctgaaccaccccaagacccggcagtatgtgcgggcagatgtggagctggagcgcatcctggccccctacacagacttccactaccgccacagcccagacacagctgagggccagctgaaggaggaccgggaggcccgcttcctggccagcaagatgggcatcatcgccaccttccgctcctgggccggcatcatcaacctgtgcaagccaggcaacagcggcatccagagcctgattggagtgctgtgcatccccaacatggagatccggcggggcctgctggaggtgctgtatgacatcttccggctgcccctgcctgtggtgacagaggagttcatcgaggccctgctgtctgtggaccccggccgcttccaggacagctggaggctgagtgatggctttgtggccgctgaggccaagaccatcctgccccaccgggcccggagcaggccagacctgatggacaactacctggccctgatcctgagcgccttcatcagaaatggcctgctggagggcctggtggaggtgatcaccaacagtgatgaccacatctctgtgcgggccaccatcctgctgggggagctgctgcacatggccaacaccatcctgccccacagccacagccaccacctgcactgcctgcccaccctgatgaacatggccgccagctttgacatccccaaggagaagaggctgcgggccagcgctgccctgaactgcctgaagcgcttccacgagatgaagaagaggggccccaagccctacagcctgcacctggaccacatcatccagaaggccatcgccacccaccagaagagggaccagtacctgcgggtgcagaaggacatcttcatcctgaaggacacagaggaggccctgctgatcaacctgcgggacagccaggtgctgcagcacaaggagaacctggagtggaactggaacctgattggcaccatcctgaagtggcccaacgtgaacctgaggaactacaaggatgagcagctgcacagatttgtgcggcggctgctgtacttctacaagcccagcagcaagctgtatgccaacctggacctggactttgccaaggccaagcagctgactgtggtgggctgccagttcacagagttcctgctggagagtgaagaagatggccagggctacctggaggacctggtgaaggacatcgtgcagtggctgaatgccagcagcggcatgaagccagagaggagcctgcagaacaacggcctgctgaccaccctgagccagcactacttcctgttcatcggcaccctgagctgccacccccatggagtgaagatgctggagaagtgcagcgtcttccagtgcctgctgaacctgtgcagcctgaagaaccaggaccacctgctgaagctgactgtgagcagcctggactacagcagagatggcctggcccgggtcatcctgagcaagatcctgacagctgccacagatgcctgccgcctgtatgccaccaagcacctgcgggtgctgctgcgggccaacgtggagttcttcaacaactggggcatcgagctgctggtgacccagctgcatgacaagaacaagaccatcagcagcgaggccctggacatcctggatgaggcctgtgaggacaaggccaacctgcacgccctgatccagatgaagccagccctgagccacctgggggacaagggcctgctgctgctgctgcgcttcctgagcatccccaagggcttctcctacctgaatgaaagaggctacgtggccaagcagctggagaagtggcaccgggagtacaacagcaaatatgtggacctgattgaggagcagctgaatgaggccctgaccacctacaggaagcctgtggatggagacaactacgtgagaagaagcaaccagaggctgcagaggcctcatgtgtacctgcccatccacctgtatggccagctggtgcaccacaagacaggctgccacctgctggaggtgcagaacatcatcacagagctgtgcagaaatgtgaggaccccagacctggacaagtgggaggagatcaagaagctgaaggccagcctgtgggccctgggcaacatcggcagcagcaactggggcctgaacctgctgcaggaggagaatgtcatcccagacatcctgaagctggccaagcagtgtgaggtgctgagcatccggggcacctgtgtgtatgtgctgggcctgattgccaagaccaagcagggctgtgacatcctgaagtgccacaactgggatgctgtgcgccacagcaggaagcacctgtggcctgtggtgcctgatgatgtggagcagctgtgcaatgagctgagcagcatccccagcaccctgagcctgaacagcgagagcaccagcagccgccacaacagcgagagcgagagcgtgcccagctccatgttcatcctggaggatgaccgcttcggcagcagcagcaccagcaccttcttcctggacatcaatgaagacacagagcccaccttctatgacaggagcggccccatcaaggacaagaacagcttccccttctttgccagcagcaagctggtgaagaaccgcatcctgaacagcctgaccctgcccaacaagaagcacaggagcagcagtgaccccaagggcggcaagctgagcagcgagagcaagaccagcaacagacgcatccgcaccctgacagagcccagcgtggacttcaaccacagtgatgacttcacccccatcagcacagtgcagaagaccctgcagctggagaccagcttcatgggcaacaagcacatcgaggacaccggcagcacccccagcatcggggagaatgacctgaagttcaccaagaactttggaacagagaaccaccgggagaacaccagccgggagcggctggtggtggagagcagcaccagcagccacatgaagatccgcagccagagcttcaacacagacaccaccaccagcggcatcagctccatgagcagcagccccagccgggagaccgtgggcgtggatgccaccaccatggacacagactgtggctccatgagcacagtggtgtccaccaagaccatcaagaccagccactacctgaccccccagagcaaccacctgagcctgagcaagagcaacagcgtgtccctggtgcccccaggcagcagccacaccctgccccggcgggcccagagcctgaaggcccccagcatcgccaccatcaagagcctggccgactgcaacttctcctacaccagcagcagagatgccttcggctacgccaccctgaagaggctgcagcagcagaggatgcaccccagcctgagccacagcgaggccctggccagccctgccaaggatgtgctcttcacagacaccatcaccatgaaggccaacagctttgagagccggctgacccccagcagaattgacttcaagaagaagcacgtgggcggcatccgcagcctgcggcccaccatcaccaacaacctcttccgcttcatgaaggccctgtcctatgccagcctggacaaggaggacctgctgagccccatcaaccagaacaccctgcagaggagcagctctgtgcgctccatggtgtcctctgccacctacggcggcagtgatgactacatcggcctggccctgcctgtggacatcaatgacatcttccaggtgaaggacatcccctacttccagaccaagaacatcccccctcatgatgacagaggagcccgggcctttgcccatgatgctgggggcctgcccagcggcaccggcggcctggtgaagaacagcttccacctgctgcggcagcagatgagcctgacagagatcatgaacagcatccacagtgatgccagcctcttcctggagagcacagaggacaccggcctgcaggagcacacagatgacaactgcctgtactgtgtgtgcatcgagatcctgggcttccagcccagcaaccagctgagcgccatctgcagccacagcgacttccaggacatcccctacagcgactggtgtgagcagaccatccacaaccccctggaggtggtgcccagcaagttcagcggcatcagcggctgcagtgatggagtgtcccaggagggcagcgccagcagcaccaagagcacagagctgctgctgggcgtgaagaccatcccagatgacacccccatgtgccgcatcctgctgaggaaggaggtgctgcggctggtgatcaacctgagcagctctgtgtccaccaagtgccacgagaccggcctgctgaccatcaaggagaagtacccccagacctttgatgacatctgcctgtacagcgaggtgagccacctgctgagccactgcaccttccggctgccctgccgccgcttcatccaggagctgttccaggatgtgcagttcctgcagatgcatgaggaggccgaggccgtgctggccaccccacccaagcagcccatcgtggacaccagcgctgagagctag

SEQ ID NO: 104009 - DNA, 5199 bp, Artificial Sequence
  derived and/or modified sequence
atggccgccatcggccggggccggagcctgaagaacctgcgggtgaggggtagaaatgactccggtgaggaaaatgttcctctggatctgacccgtgaacccagcgacaacctgagggaaatcctgcagaacgtagcccgactccagggtgtgagcaatatgcgcaaactcgggcacttgaacaatttcaccaagctgctgtgtgacatcgggcacagtgaagagaaacttgggtttcattatgaagacataattatttgcctgcgccttgctctcctcaatgaagccaaggaagtgcgggccgcaggactacgggccctgcggtatcttatccaggattctagcatcctgcaaaaagtgctgaagctgaaagtggactatctgatcgcccggtgcattgacattcagcaatccaacgaggttgaaaggactcaagcgctgcgcctcgtaagaaagatgattactgttaacgcctcacttttcccttcctcagtgacgaattccctaatcgccgtgggcaatgacggcctccaggaacgcgaccgcatggtcagggcttgtatcgccatcatttgcgagttagcactccagaatcctgaggtagtggcattaagggggggcctcaataccatccttaagaatgtcatcgattgccagctgagtaggattaacgaagccctaataactacaatcctccatctgctcaaccacccaaagactcggcaatatgtgagagccgatgtggaactcgagagaatcctggctccctacacagactttcactaccggcacagtccagacacggctgaaggacagttgaaggaggatcgcgaggctcgtttcctggcctcaaagatgggaatcattgctacattccgatcttgggcgggcatcattaatctttgtaaacccggcaacagcggcatacaaagcctgatcggcgttctttgcataccaaacatggaaattcgtagaggccttttagaggtcttgtatgacatcttcagactgcccttgcccgtcgttacagaggaattcattgaagcactgctgtctgtagatccaggcagatttcaagattcatggcgcctgtctgacggattcgttgctgcggaagcaaagacaattctgccccatcgcgcccgctctcgacctgatcttatggataactacctggcactaatcctttcagccttcatccgtaatggtctgctcgaggggctggttgaagtgatcacaaatagtgatgatcacataagcgtccgagcaacgatccttctgggtgaacttctacatatggctaacacaatcttgccgcactcccattcccaccacctccattgcctgccaacacttatgaatatggctgccagctttgacataccaaaagagaagcgtcttagggcatctgccgctcttaattgcctcaaacgattccacgaaatgaaaaagcgcggcccgaaaccttacagcctccatttggatcacataatacagaaggccatagctacacaccaaaaaagagatcagtatttgcgggtgcagaaagacatcttcatcctgaaggacactgaagaggcccttctgatcaatctccgggacagccaggtgctgcagcacaaagagaatcttgaatggaactggaatctcatcgggactatcctgaaatggcctaacgtgaacctgaggaactacaaggacgaacaactgcatcgctttgtgcgccgcctgctgtatttttacaagccaagctcgaaactgtatgcaaacctggatttggactttgctaaggcaaagcaactcactgtcgtaggttgtcagttcacagagttcctgctcgaatctgaggaggatggacagggttaccttgaggacttggtgaaagacatcgtccagtggctgaacgccagtagcgggatgaagcccgaacggtcattacagaacaacgggcttttgaccactttaagtcagcattacttcctcttcatcgggactctcagctgccatccccatggggtgaaaatgctggagaagtgttcagtttttcagtgtctcctgaatctatgtagcttgaagaatcaggatcacctgctgaagctgacggtcagcagcctagactactcaagggacggcctggcgcgtgtgatactgtcgaaaattttgacagccgccacggatgcatgcaggctgtacgctacaaaacacctacgagtactattgagggccaatgtggagttcttcaacaactggggtatcgaactcctggtaactcagttgcatgacaagaataaaaccatctcctccgaagcactggatatactggacgaggcctgtgaggacaaagctaaccttcatgcactcattcagatgaagcccgctctatcccatctgggtgacaagggattgcttctgctgctgagatttttgtccattcccaaaggcttcagctatctaaatgagcggggatacgtggcgaagcagctggagaagtggcatcgggaatataactctaagtacgtggacctgattgaagaacagcttaacgaagccttgactacttaccggaagcccgtggatggagataactatgtccggcgtagtaaccagcgtctgcagcgtccacatgtttacctgccgatacatctgtacggtcaactggtacatcacaaaacaggctgtcatctgctcgaggtacagaacatcataacagaactctgccggaatgtcaggaccccagatctcgacaaatgggaggagatcaaaaaactcaaagcatctctatgggccttaggaaatataggttcttctaactggggcctcaatttattgcaagaggagaacgtgattcccgacattttaaaattggccaaacagtgtgaggtcctgtccataaggggaacgtgcgtgtacgtgctcggtctgattgccaaaactaagcagggctgcgacattctgaagtgtcacaactgggatgccgtgcggcacagccggaagcatctatggccagtggtccccgatgatgtggagcagctctgtaacgagctctcctctataccctccacgctcagccttaatagtgagtccacgtcctctcgccacaattccgaaagcgaaagtgtgcctagttccatgtttattctggaagatgacagattcggcagcagctcaacatcaacattctttctggatatcaacgaagacactgagcccacattctacgatcggagcgggccaattaaggataagaatagctttcccttcttcgccagctccaaactggtgaaaaacagaatattgaattccctcacactcccgaacaagaagcacagatctagtagcgatcctaaaggagggaagctgtcgagtgaaagcaagacctctaataggagaatccgtactttaacagagccatcggtggacttcaaccactccgacgactttactcccatctctaccgttcagaagacactgcaacttgaaaccagtttcatgggcaacaaacatattgaggacactggatcgaccccctctataggcgagaacgacctgaaattcactaaaaacttcggaaccgaaaaccaccgtgagaatacttctcgcgaacgtttagtggttgagtcttcaacctcgagtcatatgaaaattcgatcccaatcattcaatactgacaccactacctcgggaatctcaagcatgtctagcagcccctctcgagagaccgtgggagtggatgcgaccaccatggacaccgactgcggatccatgagcaccgtcgtttctacaaagacaataaaaacctctcactatctgactccccagtccaaccacctgtccctgtcaaagtctaacagtgtgtccctggttccgccaggcagctcccacaccttaccgcgtcgtgcacagagcctgaaggctccttccatagccacaatcaagtccctagctgactgtaacttcagctacacctcctccagggacgctttcgggtacgccaccctaaaaagactgcagcagcagagaatgcacccttcactcagccactccgaagcattggctagccccgccaaagatgtgctctttaccgatactattactatgaaggcaaattcttttgagagccgcctcactccatctcgaatcgattttaagaaaaaacacgttggaggtatccgcagcctgcggccaactatcaccaacaatttatttcgttttatgaaggccctcagctacgccagtttggataaggaggatttattatcccccattaatcaaaacaccctgcagagatcttcctccgtccgttctatggttagcagcgcaacttacggaggatctgatgactacattggtttggctctgccagtcgatattaatgacatcttccaagttaaagacatcccatattttcagaccaaaaacatacccccgcacgatgatcgtggtgcgcgagccttcgcgcacgatgccgggggtttaccaagcggcacagggggactggttaagaacagctttcatttactgcggcaacagatgagtttgacagagattatgaattcaattcactcagacgcgagccttttcctcgagtccacagaagacaccggcttgcaggagcataccgatgacaactgtctttattgcgtgtgtatcgagatcctcggctttcagcctagcaatcagctgtcagctatttgtagtcactccgactttcaggacattccttactccgattggtgcgagcaaaccatccacaatcccctagaggtcgtaccatcaaagttttcgggtatatccggatgttctgacggcgtgtcccaggagggaagcgcctcctctactaaatcaacagagcttctacttggagtgaaaaccatcccagatgacactcctatgtgtcggatcttactgcgaaaggaggttctgcgcctagtgatcaatctcagcagttcagtttctacgaaatgtcatgagaccggcctgttaacgattaaggagaagtatccgcagacatttgatgatatttgcctgtattctgaagtttcgcatctgctatcccattgtacttttaggctgccatgccgacggttcattcaggagcttttccaggatgtgcagttcttacaaatgcatgaagaggctgaagccgttcttgcgaccccacccaaacagccaatcgtggatacctcagccgaatcttag

SEQ ID NO: 104010 - DNA, 5199 bp, Artificial Sequence
  derived and/or modified sequence
atggcagcgatcggcagaggaagaagtctcaaaaatttaagagtgagaggaaggaatgacagtggcgaggagaacgtgcccctagacttaaccagagaaccctctgacaacctcagagagatcctgcagaacgtggctagattgcagggcgtcagcaatatgaggaagctggggcatctaaataattttactaagctgctctgcgacattgggcattcagaagagaaattggggttccactacgaggacatcattatctgcctgcgcttggctttattaaacgaggctaaagaggttcgggcagccggtctccgagctttacgctacctgattcaggactctagtatactgcagaaagtcctgaaattaaaagtggattacttaatcgcccgttgtatcgacatccagcagtcaaacgaggtggagaggacccaagctctgagactggtgcgcaaaatgattacagtaaacgcgagcctcttcccgagtagcgtgacaaatagcctgatcgccgtgggaaacgatggccttcaagagcgcgatcgcatggtgcgagcctgcatagcaattatttgcgaactggccttgcaaaacccagaagtcgtggccttgagaggtggattgaacacaatccttaagaatgtaatcgattgccagctaagtcgcatcaacgaagcacttattacaacaattctacatctgctgaaccacccaaagacaaggcaatatgttcgggctgatgttgagcttgaacggatactggctccttataccgattttcactaccgccattcccccgacacagctgagggccagttaaaggaggacagagaagctaggtttctggccagcaaaatggggattattgccacatttcgctcttgggcaggcattattaatctgtgcaaacccggtaactcgggtatacagtctctcattggtgtgctttgtatccctaatatggaaatccgaagaggactgctggaagttctgtatgacatattcaggctgcccctcccagtcgtgacggaggaattcattgaggccctgctgagcgtggatcccggacgctttcaggacagttggcgcttatctgacggattcgtggcagcggaggctaagactattctgcctcaccgcgctcggagtcgccctgacttaatggataattatctggccctcattctttctgcgtttattcgtaacgggctgctggagggtctagtggaggttatcactaacagcgacgaccacatttcggtccgcgcaaccatcttgctgggggagctgcttcatatggctaacaccatcttgccccactcacatagtcatcatctccactgtctcccaacacttatgaatatggcggctagcttcgacatcccaaaggagaagagacttcgagcgtctgccgctctcaattgtctcaagcgcttccacgaaatgaaaaaacgcggtccaaagccttacagcttacaccttgaccacatcatacaaaaggccatagctactcaccagaaaagggaccagtatctgagagtccagaaagacattttcatcctgaaagataccgaggaggcgctgctgatcaatctgagggattctcaagtgttgcagcataaagaaaatttggagtggaactggaatctcataggcactatcctgaagtggccaaacgtgaatttgcgaaactacaaagatgaacaattgcacagatttgtgaggagacttctgtatttttacaaacctagtagtaaactgtacgctaatctggatttggactttgccaaggctaaacagttgaccgtggtgggatgtcagttcaccgagtttctcctcgaatcggaagaggacgggcagggatatttggaggatttggtcaaagacatagtacagtggctcaatgcgagctcaggaatgaagccagaaagaagcctgcaaaacaacgggctgttgactaccttgagccagcactactttctatttattggaactctgtcctgccacccccacggcgtgaagatgcttgaaaagtgttccgtgtttcaatgcctccttaacctgtgctctctgaagaaccaggaccacctgttgaaactaactgtctcttcgctcgattactctcgagatgggctcgcacgcgtgatcctgagtaagatcctcactgctgcaacagatgcatgccgcttgtacgccactaaacacttacgagtcctccttcgcgcaaatgttgaatttttcaataattggggcattgaactgttggtgactcaactgcatgacaagaacaaaacaattagctctgaggcccttgacattttggacgaagcatgcgaggacaaggcaaatctccacgccctgatccagatgaaaccggctctttctcacctcggagacaaagggttactgttgttactgcgtttcctttctatccccaaaggcttttcatacctgaatgaacgaggatacgtggccaagcagcttgagaagtggcaccgtgagtataattctaagtatgttgatctcatcgaagagcagctcaatgaggcccttactacctataggaaacctgtggacggcgataactacgttaggcgctccaaccagcgtttgcagaggccacatgtgtacctcccgattcatctgtatggccagctcgtccaccataaaacaggctgtcacctactggaggtccaaaacatcatcaccgagctatgcagaaacgttaggactccagatctcgacaagtgggaagaaatcaagaaactgaaggcctccctgtgggccctgggcaatattggctctagcaattggggcctgaacctcttgcaggaggagaatgtgataccggatatactcaagctggctaagcaatgtgaggtgctttccatccgcggaacatgtgtatacgtgctcgggctgatcgccaaaacgaagcagggctgcgatatcctcaaatgccataattgggatgcggtgcgccactcgaggaagcacctgtggccagtggtgccagatgatgtggaacaactttgtaacgaacttagttcaattccctctaccttgtctttaaactcagaaagcacatcttctcgacataattccgagtctgagtctgtgccttcttccatgttcatcctcgaggatgacaggttcggcagcagcagtactagcaccttttttttggacattaacgaagataccgaacccacattctacgaccggtcgggacccatcaaagacaagaactcattcccattctttgcgagcagcaagcttgtgaaaaataggatactgaactctctcaccctaccgaacaaaaaacacaggagttcctcagaccctaagggtggcaaactgtcttctgaatcaaaaacgtcaaaccgtagaattcggactctcacggagccttctgtggacttcaaccatagtgacgactttactccgatcagtaccgtgcagaaaactctgcagctcgaaacttcattcatgggtaataagcacattgaagacacgggcagcacgccttctatcggcgagaatgatctgaagttcactaaaaacttcggcaccgagaaccatcgcgaaaacacaagtcgggagcggctggtggtcgagtcatccactagctcacacatgaaaatccgatctcagtcatttaatacggacactaccacctcagggattagctcaatgtcctctagcccaagcagggaaacagtaggtgtcgatgcaacgaccatggacacagattgtgggtccatgtctactgtggtgtctaccaaaactatcaagacttctcactacctcaccccccagtctaaccatctatctctgagcaagtcgaacagcgtgtcactagtgcctcctggaagcagccataccctccccagacgcgctcagagtctgaaagccccttctatcgcaacgataaagagcctcgccgactgcaactttagctacacaagtagcagggatgcctttggatacgccaccctaaaaaggctgcagcagcagcgcatgcatccctccctgtcccacagcgaggccctagcttctcccgctaaagatgttttgtttacagacacaataacaatgaaggcgaactcctttgaatctaggctaacgccatctcgcatagacttcaaaaaaaagcacgttgggggaatccgctctctgagacccactataacgaacaacctgttcaggtttatgaaagcattaagttatgctagcctcgacaaggaagacttacttagccccatcaaccagaacaccctccagagaagctcttcggtgaggtcgatggtctcttccgccacctacggcggatcggacgactacatcgggcttgcattacctgtcgacattaatgacatcttccaggtcaaggatatcccttacttccagaccaagaatatccctccacatgatgataggggcgctcgagcttttgcccacgatgccggagggttgcccagcggaaccggcggactggttaaaaattcatttcatttgctgcgtcagcagatgtctttaactgagataatgaattctatccactcagacgccagcctgttcttggaatcaacagaagacaccgggctgcaggagcatacggacgacaattgtctttactgcgtgtgcattgaaatcctaggttttcagccttccaaccagttgagcgctatctgcagccattctgactttcaggatatcccctacagcgactggtgtgaacagacaatccataatccgctggaggtagttccgagcaaattttctggaatcagtggatgttccgatggtgtgtcacaggaggggagcgcttcaagtaccaagtccacagaactgctgctaggggtaaaaacaattcctgatgacacacccatgtgcaggattctgcttaggaaagaggtgctgcggcttgttataaatctctcttcgtctgtgtccaccaaatgtcatgagacggggctcctgacaatcaaggagaagtatccacagacatttgacgacatctgcctgtacagcgaggtgtcgcacctgctgagtcactgcaccttccgcctgccttgtcggagattcatccaggaattgttccaggatgttcagtttttgcagatgcatgaggaggcagaagcggtcctggctacccccccaaaacaaccaattgtggatactagtgccgaatcctaa

SEQ ID NO: 104011 - DNA, 7505 bp, Artificial Sequence
  derived and/or modified sequence
gttgtgactgaaacccgtcaatatggcggcgatcggccgcggccgctctctgaagaacctccgagtacgagggcggaatgacagcggcgaggagaacgtcccgctggatctgacccgagaaccttctgataacttaagagagattctccaaaatgtggccagattgcagggagtatcaaatatgagaaagctaggccatctgaataactttactaagcttctttgtgatattggccacagtgaagaaaaactgggctttcactatgaggatatcataatttgtttgcggttagctttattaaatgaagcaaaagaagtgcgagcagcagggctacgagcgcttcgatatctcatccaagactccagtattctccagaaggtgctaaaattgaaagtggactatttaatagctaggtgcattgacatacaacagagcaacgaggtagagaggacacaagcacttcgattagtcagaaagatgattactgtgaatgcttccttgtttcctagttctgtgaccaactcattaattgcagttggaaatgatggacttcaagaaagagacagaatggtccgagcatgcattgccattatctgtgaactagcacttcagaatccagaggtggtggcccttcgaggtggactaaacaccatcttgaaaaatgtgatcgattgccaattaagtcgaataaatgaggccctaattactacaattttgcaccttcttaatcatccaaagactcgacagtatgtgcgagctgatgtagaattagagagaattttagcaccctatactgattttcactacagacatagtccagatacagctgaaggacagctcaaagaagacagagaagcacgatttctagccagtaaaatgggaatcatagcaacattccgatcatgggcaggtattattaatttatgtaaacctggaaattctgggatccagtctctaataggagtactttgcataccaaatatggaaataaggcgaggtctacttgaagtgctttatgatatatttcgtcttcctctacctgttgtgactgaggagttcatagaagcactactcagtgtagatccagggaggttccaagacagttggaggctttcagatggctttgtggcagctgaggcaaaaactattcttcctcatcgtgccagatccaggccagacctcatggataattatttggcactgatactctctgcatttattcgtaatggacttttagagggtctagttgaagtgataacaaacagtgatgatcatatctcagttagagctaccatccttttaggagagcttttacatatggcaaacacaattcttcctcattcacatagccatcatttacactgcttgccaaccctaatgaatatggctgcatcctttgatatccccaaggaaaagagactgcgagccagtgcagccttgaactgtttaaaacgcttccatgaaatgaagaaacgaggacctaagccttatagtcttcatttagaccacattattcagaaagcaattgcaacacaccagaaacgggatcagtatctccgagttcagaaagatatatttatccttaaggatacagaggaagctcttttaattaaccttagagatagccaagtccttcaacataaagagaatcttgaatggaattggaatcttatagggaccattcttaagtggccaaatgtaaatctaagaaactataaagatgaacagttacacaggtttgtacgaagactactttatttttacaagcccagcagtaaattatatgccaacctggatctggattttgccaaggccaaacagctcacggttgtaggttgccagtttacagaatttcttcttgaatctgaagaggatgggcaaggctacttagaagatctagtaaaggatattgttcagtggctcaatgcttcatctggaatgaaacccgaaagaagtcttcaaaataatggtttattgaccacccttagtcaacactactttttatttattggaacactttcttgccaccctcatggagttaaaatgctggaaaaatgcagtgtatttcagtgtctccttaatctttgctccttgaaaaaccaagatcacttgctaaaacttactgtttctagcttggactatagcagagatggattggctagagtcatcctttccaaaattttaactgcagctactgatgcctgcagactctatgcaacaaaacatttaagggtattattgagagctaatgttgaattctttaataattggggaattgagttgttagtgacccagctacatgataaaaacaaaacgatttcctctgaagctcttgatatcctcgatgaagcatgtgaagacaaggccaatcttcatgctctcattcagatgaaaccagcgttatcccaccttggagacaagggtttgcttctcctgctgagatttctctccattccaaaaggattttcctatctgaatgaaagaggttatgtagcaaaacaattggaaaagtggcacagggaatacaactccaaatatgttgacttgattgaggaacaactcaatgaagcacttactacttaccggaagcctgttgatggtgataactatgttcgtcggagtaaccaaagattacagcgtcctcacgtctacctgcctatacacctttatggacaactagtacaccataaaacaggctgccatttgttggaagtacagaatattattacagaactctgtcgtaatgttcgtacaccagatttggataagtgggaagaaattaaaaaactgaaagcatctctttgggccttgggaaatatcggctcatcaaattggggtctcaatttgctacaggaagaaaacgtgattccagatatactaaaacttgcaaaacagtgtgaagttctttccatcagagggacctgtgtatatgtacttgggctcatagctaaaaccaaacaaggctgtgatattctaaaatgtcacaactgggatgctgtgaggcatagtcgcaaacatctgtggccagtggttccagatgatgtggaacaactctgtaatgaactttcatctatcccaagcactctaagtttgaactcggagtcaaccagctctagacataatagtgaaagtgaatctgtgccatcgagtatgttcatattggaggatgaccggtttggcagcagctctactagcacatttttccttgatatcaatgaagatacagagccaacattttatgaccgatctggacccataaaggataaaaattcattccctttctttgcttctagtaaacttgtgaagaatcgtatcttaaattcgcttactttgcctaacaaaaaacatcgtagtagcagtgatccaaaaggagggaaattatcatctgaaagtaagacaagcaacaggcgaatcagaacacttacggagcccagtgttgattttaatcatagtgatgattttacacccatatccactgtacagaaaacattacaattagagacttcatttatggggaataagcacattgaagacactggtagtacaccaagcattggagaaaatgacttaaaattcaccaagaattttggtacagagaatcacagagaaaatacaagccgagagaggttagtagtagaaagttcaacgagctcacatatgaagatacgtagccaaagtttcaatacagacactacaacaagtggcataagttcaatgagctcaagtccttcacgagagacagtaggtgtagatgctacaactatggacacagactgtggaagcatgagtactgtggtaagtactaaaactattaagacaagccactatttgacgccacagtctaaccatctgtctctctccaaatcaaattcggtgtccctggtgcctccaggttcttctcatacgcttcctagaagagcacagtcccttaaagcaccctctattgctacaattaaaagtctagcagattgtaactttagttacacaagttctagagatgcttttggctatgctacactgaaaagactacagcaacaaagaatgcatccatccttatctcactctgaagctttggcatctccagcaaaagatgtgctatttactgataccatcaccatgaaggccaacagttttgagtccagattaacaccaagcaggatcgattttaaaaagaagcatgtcgggggaatcaggagcttaagacctacaataacaaacaaccttttcaggttcatgaaagccttaagttatgcatcattagataaagaagatttattgagtcctattaatcaaaataccctgcaacgatcttcctcagtgcggtccatggtgtccagtgccacatatgggggttcagatgattacattggtcttgctctcccggtggatataaatgatatattccaggtaaaggatattccctattttcagacaaaaaacataccaccacatgatgatcgaggtgcaagagcatttgcccatgatgcaggaggtcttccatctggaactggaggtcttgtaaaaaattcttttcacttgctacgacagcagatgagtcttacggaaataatgaattcaatccattcagatgcctctctgtttttagaaagtacagaagacactggactacaggaacatacagatgataactgcctttattgtgtctgtattgaaattctgggtttccagcccagcaaccaactgagtgcaatatgtagtcattcagactttcaagatattccatattctgattggtgtgagcagactatccataatcctttagaagtggttccctctaagttttcggggatttctggatgcagtgatggggtgtctcaagaaggctcagctagcagcaccaaaagcacagaattgttactaggtgttaaaacaattccagatgatacaccaatgtgccgtatactccttcgcaaagaagttctaagattagtcattaatttgagtagttcagtttcaactaaatgtcatgagactgggcttttaacaattaaggagaagtatcctcaaacatttgatgacatatgcctttactctgaggtttcccatttgctgtcacactgcacattcagacttccgtgtcggaggttcatacaagaattatttcaagatgtacagtttctacaaatgcatgaagaagcagaggctgtgttggcaacaccaccaaagcaacctatagttgatacatctgctgaatcctgacctcatatttatgatggatatagatacatactatatatattcatatttgtggatttcctaaaagcctcagaaaatacgactgactaggcagcaaagacaggagtatcttctgtacactgttccgcagttactggtacatgaacagttggaactgctgactttcctaaccaaaacaacttccttctctcctttgttgagccttttgaggggttcatgattcattaccacagttttaagagtttcagttaccattgtatgcaagagccaagcactgaatacctacataggttttctattttctttcattttaaaagcataatgacagtggaacaataatgggatatgcagaagcacccttcacaagttatttctgaatgatttttagggtaaataatacagatgccttgtttgttaactaacttgtggaaagcaggaatcagtgtctctaaggctgcatcctattaccacaatggggtgtgctataactgctggtattagagagggaactttggccctttcacgtttttcttaatgtttgtaacactacttcagaggtttataacctcaaagcagaagaagagcctcaacaacccgggacttataagttatttttatgttactagacttgcataaagattcttgttttccaactcttcattttgttgcaatgtgttattacaggatatatgaaccaattaaggtttttcactacagttcttgaataaaatttaaaaatcattttttattttaattaaaaatatttcccatttatagaatgcatatatttgcaatggacttccactttcatcaactttccatctcatcgctttaaacaggaacttgaacaagcactgttagtttagacctaaaggataggaaagcattaaataatactttggatctcctgaggaaaagataagtttgcttgcaatttacacattccatggggaaagaagagccatatttccttaaaaaaaacattaataaagcttgttattgagaaaaattgtagtgaaaagccttaagtaccaaattttaaagcagcagtaacttaatttttatatcagtgtttttgttttgcacaaactaaatgcagtggtaggtgggtttatgagtatattaattgcctttatccatttgtgaagttaagttgatgagggcaaggtttttgtttgtttaatttgtatatgtctaaaggtatttggaactttttacaggaattaaacatatatgcaaatttgtatataaaaatagcatggccatcatttgaatgcttgtaaatgaaaggattatcttttttgagatctatatataaatagaaatagaaaatccagctggactgattaggattcttttttaattcatttgtgtataacatttttattacaattacacatcagttttgacacagtcatagcaacattaatattttcccatgatgcagatcctttttgtaatgggcttgttctttgagatctctgtaaagaaccctgtgaactagaaaacataactcacagagatacttttttaaaaaatttatttactggaactgaaagttccagttgggatgaagcatttcatctcacttcataacacctctttgactgcacttcagtgaattgttcttatgtgcactgtgtagcaacttacattataacaaagcagataagggctgtaagctgctgcttatgttgaaaagtggttcttcagattttctctcataaaatccagttgaagataaataatttttttatactttatcactgaacccaagtgtttatttaaatgtcaacagtacttctaagaacgttgcctgtcatcgtggtctttggtcttggataactaaactgcctttccagagaaccaaatgtcagagttactagaccaaatagtggttaaaacctccaaaggaagtaatgtaatcttattcataatgggattaacatattttagacattcattttaaacactacctcagttaatatagagtataaaaatctgtggtttaatccctcaaaagttaacagtaattttttttttgtcttacacacacacacaccccctcccccaccatcactatccctgtaccctcaccttggtcatctatcctgaaataaggcttagttagtattggcctgaatgttttgtgtttttttttttgttttttttttttactgttactttgaaaaatatgtatgtataccttatcatatctgcctatatcacttactttggggagatactcagagctttgtggttatcagtatactaaaaaaaaaaaaaa

SEQ ID NO: 104012 - DNA, 5199 bp, Artificial Sequence
  derived and/or modified sequence
atggccgccatcggcagaggcagaagcctgaagaacctgagagtgagaggcagaaacgacagcggcgaggagaacgtgcccctggacctgaccagagagcccagcgacaacctgagagagatcctgcagaacgtggccagactgcagggcgtgagcaacatgagaaagctgggccacctgaacaacttcaccaagctgctgtgcgacatcggccacagcgaggagaagctgggcttccactacgaggacatcatcatctgcctgagactggccctgctgaacgaggccaaggaggtgagagccgccggcctgagagccctgagatacctgatccaggacagcagcatcctgcagaaggtgctgaagctgaaggtggactacctgatcgccagatgcatcgacatccagcagagcaacgaggtggagagaacccaggccctgagactggtgagaaagatgatcaccgtgaacgccagcctgttccccagcagcgtgaccaacagcctgatcgccgtgggcaacgacggcctgcaggagagagacagaatggtgagagcctgcatcgccatcatctgcgagctggccctgcagaaccccgaggtggtggccctgagaggcggcctgaacaccatcctgaagaacgtgatcgactgccagctgagcagaatcaacgaggccctgatcaccaccatcctgcacctgctgaaccaccccaagaccagacagtacgtgagagccgacgtggagctggagagaatcctggccccctacaccgacttccactacagacacagccccgacaccgccgagggccagctgaaggaggacagagaggccagattcctggccagcaagatgggcatcatcgccaccttcagaagctgggccggcatcatcaacctgtgcaagcccggcaacagcggcatccagagcctgatcggcgtgctgtgcatccccaacatggagatcagaagaggcctgctggaggtgctgtacgacatcttcagactgcccctgcccgtggtgaccgaggagttcatcgaggccctgctgagcgtggaccccggcagattccaggacagctggagactgagcgacggcttcgtggccgccgaggccaagaccatcctgccccacagagccagaagcagacccgacctgatggacaactacctggccctgatcctgagcgccttcatcagaaacggcctgctggagggcctggtggaggtgatcaccaacagcgacgaccacatcagcgtgagagccaccatcctgctgggcgagctgctgcacatggccaacaccatcctgccccacagccacagccaccacctgcactgcctgcccaccctgatgaacatggccgccagcttcgacatccccaaggagaagagactgagagccagcgccgccctgaactgcctgaagagattccacgagatgaagaagagaggccccaagccctacagcctgcacctggaccacatcatccagaaggccatcgccacccaccagaagagagaccagtacctgagagtgcagaaggacatcttcatcctgaaggacaccgaggaggccctgctgatcaacctgagagacagccaggtgctgcagcacaaggagaacctggagtggaactggaacctgatcggcaccatcctgaagtggcccaacgtgaacctgagaaactacaaggacgagcagctgcacagattcgtgagaagactgctgtacttctacaagcccagcagcaagctgtacgccaacctggacctggacttcgccaaggccaagcagctgaccgtggtgggctgccagttcaccgagttcctgctggagagcgaggaggacggccagggctacctggaggacctggtgaaggacatcgtgcagtggctgaacgccagcagcggcatgaagcccgagagaagcctgcagaacaacggcctgctgaccaccctgagccagcactacttcctgttcatcggcaccctgagctgccacccccacggcgtgaagatgctggagaagtgcagcgtgttccagtgcctgctgaacctgtgcagcctgaagaaccaggaccacctgctgaagctgaccgtgagcagcctggactacagcagagacggcctggccagagtgatcctgagcaagatcctgaccgccgccaccgacgcctgcagactgtacgccaccaagcacctgagagtgctgctgagagccaacgtggagttcttcaacaactggggcatcgagctgctggtgacccagctgcacgacaagaacaagaccatcagcagcgaggccctggacatcctggacgaggcctgcgaggacaaggccaacctgcacgccctgatccagatgaagcccgccctgagccacctgggcgacaagggcctgctgctgctgctgagattcctgagcatccccaagggcttcagctacctgaacgagagaggctacgtggccaagcagctggagaagtggcacagagagtacaacagcaagtacgtggacctgatcgaggagcagctgaacgaggccctgaccacctacagaaagcccgtggacggcgacaactacgtgagaagaagcaaccagagactgcagagaccccacgtgtacctgcccatccacctgtacggccagctggtgcaccacaagaccggctgccacctgctggaggtgcagaacatcatcaccgagctgtgcagaaacgtgagaacccccgacctggacaagtgggaggagatcaagaagctgaaggccagcctgtgggccctgggcaacatcggcagcagcaactggggcctgaacctgctgcaggaggagaacgtgatccccgacatcctgaagctggccaagcagtgcgaggtgctgagcatcagaggcacctgcgtgtacgtgctgggcctgatcgccaagaccaagcagggctgcgacatcctgaagtgccacaactgggacgccgtgagacacagcagaaagcacctgtggcccgtggtgcccgacgacgtggagcagctgtgcaacgagctgagcagcatccccagcaccctgagcctgaacagcgagagcaccagcagcagacacaacagcgagagcgagagcgtgcccagcagcatgttcatcctggaggacgacagattcggcagcagcagcaccagcaccttcttcctggacatcaacgaggacaccgagcccaccttctacgacagaagcggccccatcaaggacaagaacagcttccccttcttcgccagcagcaagctggtgaagaacagaatcctgaacagcctgaccctgcccaacaagaagcacagaagcagcagcgaccccaagggcggcaagctgagcagcgagagcaagaccagcaacagaagaatcagaaccctgaccgagcccagcgtggacttcaaccacagcgacgacttcacccccatcagcaccgtgcagaagaccctgcagctggagaccagcttcatgggcaacaagcacatcgaggacaccggcagcacccccagcatcggcgagaacgacctgaagttcaccaagaacttcggcaccgagaaccacagagagaacaccagcagagagagactggtggtggagagcagcaccagcagccacatgaagatcagaagccagagcttcaacaccgacaccaccaccagcggcatcagcagcatgagcagcagccccagcagagagaccgtgggcgtggacgccaccaccatggacaccgactgcggcagcatgagcaccgtggtgagcaccaagaccatcaagaccagccactacctgaccccccagagcaaccacctgagcctgagcaagagcaacagcgtgagcctggtgccccccggcagcagccacaccctgcccagaagagcccagagcctgaaggcccccagcatcgccaccatcaagagcctggccgactgcaacttcagctacaccagcagcagagacgccttcggctacgccaccctgaagagactgcagcagcagagaatgcaccccagcctgagccacagcgaggccctggccagccccgccaaggacgtgctgttcaccgacaccatcaccatgaaggccaacagcttcgagagcagactgacccccagcagaatcgacttcaagaagaagcacgtgggcggcatcagaagcctgagacccaccatcaccaacaacctgttcagattcatgaaggccctgagctacgccagcctggacaaggaggacctgctgagccccatcaaccagaacaccctgcagagaagcagcagcgtgagaagcatggtgagcagcgccacctacggcggcagcgacgactacatcggcctggccctgcccgtggacatcaacgacatcttccaggtgaaggacatcccctacttccagaccaagaacatccccccccacgacgacagaggcgccagagccttcgcccacgacgccggcggcctgcccagcggcaccggcggcctggtgaagaacagcttccacctgctgagacagcagatgagcctgaccgagatcatgaacagcatccacagcgacgccagcctgttcctggagagcaccgaggacaccggcctgcaggagcacaccgacgacaactgcctgtactgcgtgtgcatcgagatcctgggcttccagcccagcaaccagctgagcgccatctgcagccacagcgacttccaggacatcccctacagcgactggtgcgagcagaccatccacaaccccctggaggtggtgcccagcaagttcagcggcatcagcggctgcagcgacggcgtgagccaggagggcagcgccagcagcaccaagagcaccgagctgctgctgggcgtgaagaccatccccgacgacacccccatgtgcagaatcctgctgagaaaggaggtgctgagactggtgatcaacctgagcagcagcgtgagcaccaagtgccacgagaccggcctgctgaccatcaaggagaagtacccccagaccttcgacgacatctgcctgtacagcgaggtgagccacctgctgagccactgcaccttcagactgccctgcagaagattcatccaggagctgttccaggacgtgcagttcctgcagatgcacgaggaggccgaggccgtgctggccaccccccccaagcagcccatcgtggacaccagcgccgagagctag

SEQ ID NO: 104013 - protein, 760 aa, Artificial Sequence
  derived and/or modified sequence
MDASLEKIADPTLAEMGKNLKEAVKMLEDSQRTEEENGKKLISGDIPGPLQGRIQNIGEQGHMALLGHSLGAYISTLDKEKLRKLTTRILSDTTLWLCRIFRYENGCAYFHEEEREGLAKICRLAIHSRYEDFVVDGFNVLYNKKPVIYLSAAARPGLGQYLCNQLGLPFPCLCRVPCNTVFGSQHQMDVAFLEKLIKDDIERGRLPLLLVANAGTAAVGHTDKIGRLKELCEQYGIWLHVEGVNLATLALGYVSSSVLAAAKCDSMTMTPGPWLGLPAVPAVTLYKHDDPALTLVAGLTSNKPTDKLRALPLWLSLQYLGLDGFVERIKHACQLSQRLQESLKKVNYIKILVEDELSSPVVVFRFFQELPGSDPVFKAVPVPNMTPSGVGRERHSCDALNRWLGEQLKQLVPASGLTVMDLEAEGTCLRFSPLMTAAVLGTRGEDVDQLVACIESKLPVLCCTLQLREEFKQEVEATAGLLYVDDPNWSGIGVVRYEHANDDKSSLKSDPEGENIHAGLLKKLNELESDLTFKIGPEYKSMKSCLYVGMASDNVDAAELVETIAATAREIEENSRLLENMTEVVRKGIQEAQVELQKASEERLLEEGVLRQIPVVGSVLNWFSPVQALQKGRTFNLTAGSLESTEPIYVYKAQGAGVTLPPTPSGSRTKQRLPGQKPFKRSLRGSDALSETSSVSHIEDLEKVERLSSGPEQITLEASSTEGHPGAPSPQHTDQTEAFQKGVPHPEDDHSQVEGPESLR

SEQ ID NO: 104014 - DNA, 2283 bp, Artificial Sequence
  derived and/or modified sequence
atggacgcaagcctggagaaaattgccgatcctactctggctgagatggggaaaaacctgaaggaggcagtgaagatgctggaagatagccagcgcaccgaagaggagaatggtaaaaaactgatctccggcgatatccccgggccgctccagggccgcattcagaatatcggcgaacaagggcacatggccctcctgggccacagtttgggcgcttacatatctaccctggataaagaaaaactccggaaattgaccacccggatcctgtccgacactaccctgtggctttgccgcattttccggtacgagaacgggtgcgcttactttcacgaagaggagagggaggggctcgcgaaaatctgtcggctggctattcactcgcgctacgaagatttcgtcgttgatgggtttaacgtcctctataacaagaaaccggtcatttacttgtcagccgcggcacgtccgggactcggacagtatctgtgcaaccaacttgggctgcctttcccgtgtctgtgccgggtgccttgtaacacagtatttgggtcccaacatcagatggacgtggcctttttggaaaaacttatcaaggacgacattgagcggggaaggctgccgctcctccttgttgcaaacgctgggacagcggcggtaggacatactgataaaatcggccgactgaaagaattatgtgagcagtacggaatttggttgcatgtcgagggtgtaaacttggctaccttagcattgggatacgtgtccagttctgtgctcgccgccgccaagtgcgactcaatgactatgacccctgggccttggttgggtctccccgccgttccagcagtcactctatataagcatgacgatccagcgttaacgctggttgccggacttaccagtaataagcccacagacaaactacgggctctgcctctttggttatcccttcaatacctgggcttggatggattcgttgagcgaattaagcacgcctgccagctctcccagcggttgcaggagagtctgaaaaaggtgaattacattaaaattcttgttgaagacgaactgagcagcccggtggttgtgttccggttctttcaggagcttcctggaagcgaccccgtgtttaaggcagtgcctgtacccaacatgacaccctccggggttggcagagagaggcactcatgcgacgcactgaatagatggttgggagaacagctcaagcagttggtgccagccagcggactcactgttatggatctagaagcagagggcacctgcctgcggtttagtcccctcatgacagcagctgtactgggcacgcggggcgaagacgtcgatcagttggtagcctgcatcgagagtaagctgccagtcttatgctgcacactccagctgcgtgaggaatttaagcaagaggtggaagccaccgccggtctgctgtatgtggatgaccccaattggtctggcataggagtcgtgcggtacgagcacgctaacgacgacaagagctcgctgaaaagcgaccctgagggagagaacatccacgctggtctacttaaaaagctgaatgaactagaatctgatttaaccttcaagattggccccgaatacaagagtatgaagtcatgtctttacgttggtatggctagtgacaatgtggacgctgccgagctcgtcgagacaatagcggccacagccagagaaattgaggaaaactccagactcttggaaaacatgacggaggtggtacggaaaggtatccaagaggcacaggtggagcttcagaaagcatcagaggagagattgctggaggagggcgtcctaagacaaatacctgtggtggggtcagttctgaactggttttctcccgttcaggctctgcagaaagggaggaccttcaatttgactgcgggatctttggaatcaaccgaacctatctatgtatataaggcacagggggccggggtgactcttccacccacccccagtgggagtagaacaaagcaacgcctaccgggacagaagccgttcaagcgatccctcagaggcagcgacgcactcagcgaaacttcctctgtgagtcatatagaggacctagaaaaagtggagaggttgagcagcggtcctgaacaaatcacgttagaggcatcttccaccgaaggccaccccggagcgccgtccccgcaacatacagatcagacggaagctttccagaaaggagttccccacccggaagacgaccacagtcaagtggaaggccccgagtctctcagatag

SEQ ID NO: 104015 - DNA, 2283 bp, Artificial Sequence
  derived and/or modified sequence
atggatgccagcctggagaagattgctgaccccaccctggccgagatgggcaagaacctgaaggaggccgtgaagatgctggaggacagccagaggacagaggaggagaatggcaagaagctgatcagcggggacatccctggccccctgcagggccgcatccagaacattggagagcagggccacatggccctgctgggccacagcctgggcgcctacatcagcaccctggacaaggagaagctgaggaagctgaccacccgcatcctgagtgacaccaccctgtggctgtgccgcatcttccgctatgaaaatggctgtgcctacttccacgaggaggagcgggagggcctggccaagatctgccgcctggccatccacagccgctatgaagattttgtggtggatggcttcaacgtgctgtacaacaagaagcctgtgatctacctgtctgctgctgcccggcccggcctgggccagtacctgtgcaaccagctgggcctgcccttcccctgcctgtgccgggtgccctgcaacacagtgtttggcagccagcaccagatggatgtggccttcctggagaagctgatcaaggatgacatcgagcggggccgcctgcccctgctgctggtggccaatgccggcacagctgctgtgggccacacagacaagattggccgcctgaaggagctgtgtgagcagtatggcatctggctgcacgtggagggcgtgaacctggccaccctggccctgggctacgtgagcagctctgtgctggccgccgccaagtgtgacagcatgaccatgaccccaggcccctggctgggcctgcctgctgtgcctgctgtgaccctgtacaagcatgatgatcctgccctgaccctggtggccggcctgaccagcaacaagcccacagacaagctgcgggccctgcccctgtggctgagcctgcagtacctgggcctggatggctttgtggagcgcatcaagcacgcctgccagctgagccagaggctgcaggagagcctgaagaaggtgaactacatcaagatcctggtggaggatgagctgagcagccctgtggtggtgttccgcttcttccaggagctgcccggcagtgaccctgtgttcaaggctgtgcctgtgcccaacatgacccccagcggcgtgggccgggagcggcacagctgtgatgccctgaaccgctggctgggggagcagctgaagcagctggtgcctgccagcggcctgactgtgatggacctggaggccgagggcacctgcctgcgcttcagccccctgatgacagctgctgtgctgggcaccagaggagaagatgtggaccagctggtggcctgcatcgagagcaagctgcctgtgctgtgctgcaccctgcagctgcgggaggagttcaagcaggaggtggaggccacagctggcctgctgtatgtggatgaccccaactggagcggcatcggcgtggtgcgctatgaacatgccaatgatgacaagagcagcctgaagagtgaccctgagggggagaacatccacgccggcctgctgaagaagctgaatgagctggagagtgacctgaccttcaagattggccctgagtacaagtccatgaagagctgcctgtatgtgggcatggccagtgacaacgtggatgctgctgagctggtggagaccatcgccgccacagcccgggagattgaggagaacagccggctgctggagaacatgacagaggtggtgaggaagggcatccaggaggcccaggtggagctgcagaaggccagcgaggagcggctgctggaggagggcgtgctgcggcagatccctgtggtgggctctgtgctgaactggttcagccctgtgcaggccctgcagaagggccgcaccttcaacctgacagctggcagcctggagagcacagagcccatctacgtgtacaaggcccagggcgctggggtgaccctgccccccaccccatctggcagcaggaccaagcagaggctgcccggccagaagcccttcaagaggagcctgcggggcagtgatgccctgtctgagaccagctctgtgagccacatcgaggacctggagaaggtggagcggctgagcagcggccctgagcagatcaccctggaggccagcagcacagagggccaccctggggcccccagcccccagcacacagaccagacagaggccttccagaagggcgtgccccacccagaagatgaccacagccaggtggagggccctgagagcctgaggtag

SEQ ID NO: 104016 - DNA, 2283 bp, Artificial Sequence
  derived and/or modified sequence
atggacgccagcctggagaagatcgccgaccccaccctggccgagatgggaaagaacctcaaagaagccgttaaaatgttagaggattcacagcggaccgaagaagaaaatggcaagaagctgatttctggagacatcccagggccacttcaaggccggattcagaatatcggcgagcaaggacacatggccctgttggggcacagcctgggggcatacataagcacactcgacaaggagaagctgcggaaattgacaacccggatattatctgacactactctttggctgtgcaggatcttcagatacgagaacggctgcgcctacttccacgaggaggaaagggaggggctcgccaaaatctgtcgcctcgcgatacatagccgttacgaagatttcgtcgtagacggttttaatgtgctgtataataagaagcctgtgatttacctgagcgcagccgctcgccccgggctgggtcaatacctttgtaatcaactcgggcttccattcccatgtttgtgcagagtgccctgcaacacagttttcgggtctcagcaccagatggacgttgcctttctggagaagcttataaaggacgacatcgagcgtggaaggctgcccctgctgttggtggctaacgccggaactgccgctgtgggccatacagacaagattggccgcctgaaagagctgtgtgaacagtatggcatttggctgcacgtggagggggtgaacctagcaacgctcgcgctggggtatgtcagtagctctgtgcttgcggctgcaaagtgcgactcaatgacaatgacaccggggccgtggctaggactgcctgcggtaccagccgtcacattgtacaagcacgatgatcctgctctgacgctggtcgccggactgacctcaaacaaaccaaccgataaactgagagcgctcccgctttggctgtctctgcagtacttaggcctggatgggttcgttgaaaggattaaacacgcctgtcagctttcccagcggctccaggagtcgttaaaaaaagtcaactatattaaaattctcgtggaggacgaactgtcaagtcccgttgtggtctttcgattcttccaggagcttccaggttcggaccctgtattcaaagccgtccccgtacctaacatgactccttcgggggtcggcagagagcgtcactcatgcgatgcattgaatagatggctgggagagcaactcaaacaactcgttcccgcctccggacttacggtcatggatctagaggcagaagggacttgtctgcgcttctcccctctgatgacagcggcggttctgggaacacgaggggaagacgtcgatcagctcgtcgcctgcattgagagtaagctgcccgttttgtgctgcaccttgcagctgcgcgaggagtttaaacaggaggtggaggctactgccggattgttgtacgttgacgatcctaattggagcggaattggagtggtccgttacgaacacgctaacgatgacaaaagttcactaaaaagtgaccccgaaggggagaacatccacgctggcctgttgaaaaagctcaatgagcttgagagcgatctaacctttaagattggacctgagtataaatcaatgaaaagttgcttatacgtgggcatggcttctgacaacgttgacgccgcggaactcgtggaaactatagccgcaactgcaagggaaatcgaggagaacagcagactgctggagaatatgacggaggtggttcgcaaaggcatccaggaggcccaggtggaactgcagaaagccagcgaggagagactccttgaggaaggcgtcctgagacagataccggtagtagggtcagttcttaattggttcagcccagtgcaggccttacaaaaaggacggaccttcaacctgaccgccggatctctggaatcaactgagccaatttatgtgtacaaagcgcaaggggccggagtgaccctgccgcctacgccttcaggttcaagaaccaagcagagactgccagggcagaagccatttaagcggtctttaagggggagcgacgccttgtcagagacatcctctgtttcccacattgaagacctggagaaggtggagaggctgtcatctgggcccgagcagatcactctggaggcatcctccaccgagggacaccccggggctccgagcccgcagcacactgaccagaccgaggcattccagaagggcgtcccacaccccgaagacgatcactcacaggttgaggggcccgagtcattgaggtag

SEQ ID NO: 104017 - DNA, 2283 bp, Artificial Sequence
  derived and/or modified sequence
atggatgctagcttagagaagatagccgaccctactctggctgaaatggggaagaaccttaaagaagccgtgaaaatgctcgaggattctcagcgaacagaggaggagaacggcaagaagctgataagtggggatattcccggacccctgcaggggaggattcaaaatataggcgaacagggccacatggcgttgctgggacactcattaggcgcatacatctctacattggataaggagaaactccgcaaattgaccacacgaatccttagcgacacaacattgtggctctgtcgtatctttcgatacgagaatggctgcgcttacttccatgaggaggagcgcgaggggcttgccaaaatctgccgcctagccattcacagccgatatgaggacttcgttgtagacgggttcaacgtgctctacaacaagaaacccgtaatatatttgagcgctgcggctcgtccgggtctgggacagtatctctgcaatcagctcgggcttccatttccctgtctctgcagggtcccttgcaacaccgttttcggctctcagcatcagatggatgtagcctttttagagaagttaatcaaggacgatatcgagagaggtcggttgccactgctactggttgcaaatgctggcactgctgctgtcggccacacagataagattggaaggctcaaggagttgtgcgaacagtatggaatctggctgcacgtagaaggcgtcaacctggctaccctggcgttgggctacgtgagctcctcagtgctagcggcagccaaatgtgattccatgactatgacacctgggccttggttgggcttgcctgcagtcccggcagttaccctttataagcatgacgaccccgcactcacgctggtggccggtctgaccagtaacaagccaactgacaagctgcgggctctcccattgtggctgagtctgcagtatttggggctcgacggattcgtagagcggatcaaacatgcttgccagctcagccagagattgcaggaatctcttaagaaggttaattacattaagatactcgtggaggacgagctctcttcaccagtggtcgtctttcgatttttccaggaactgccaggtagtgatcctgtctttaaggccgttcccgtacccaatatgacacctagtggagttggaagggagcgacatagttgcgacgccctgaacaggtggctgggggaacaactgaagcagctcgtgcctgcatccgggctgactgtgatggatctcgaagcagagggaacctgtctgagattttctcccctcatgaccgccgcagtgctggggacaagaggagaggatgtggaccagcttgtggcatgcatcgagtcaaagttacccgtgctctgctgtaccctccaattgcgggaagagttcaaacaggaggtagaggctaccgcaggccttctctatgtggatgaccccaactggtctggaatcggagtggttaggtatgaacacgccaatgatgacaagtcgtcattgaagtccgaccctgaaggtgagaatatacatgcaggactgctgaagaaactcaatgagctcgagagcgatctcacattcaagatagggccagagtacaaatcaatgaaaagctgcctctatgtggggatggcctcagataatgtagacgcagctgaactggtcgaaaccattgctgccactgctcgggagatcgaagagaatagccgcctgctggagaatatgaccgaggtagttcggaaaggtatccaagaggctcaggtggaattgcagaaggcctcggaagaaaggctcctggaagagggagtgctccgtcaaatccctgttgtaggctccgtgttaaactggttcagtcccgtccaagccctccaaaagggccgaacgtttaatctgactgctggatctctcgaaagcactgagcctatctacgtgtataaggcgcagggagcaggggtgaccctcccacctactcccagtgggagcaggacgaagcaaagactgcctgggcagaaacccttcaagcgctctctaaggggatctgatgctctatccgaaacatccagtgtgagccacattgaggacctggagaaggtggaaaggcttagctctggacctgagcagatcacacttgaagcttcaagtacagagggtcatccgggagcgccatctccacagcacactgatcaaactgaagccttccaaaagggcgtccctcaccccgaggatgaccattcccaggtggagggccctgagtcccttagatag

SEQ ID NO: 104018 - DNA, 2683 bp, Artificial Sequence
  derived and/or modified sequence
gaaggagctgcggggcgcgggaggaggaagtagagcccgggaccgccaggccaccaccggccgcctcagccatggacgcgtccctggagaagatagcagaccccacgttagctgaaatgggaaaaaacttgaaggaggcagtgaagatgctggaggacagtcagagaacagaagaggaaaatggaaagaagctcatatccggagatattccaggcccactccagggcagaatccaaaatattggagaacaaggtcatatggctttgttgggacatagtctgggagcttatatttcaactctggacaaagagaagctgagaaaacttacaactaggatactttcagataccaccttatggctatgcagaattttcagatatgaaaatgggtgtgcttatttccacgaagaggaaagagaaggacttgcaaagatatgtaggcttgccattcattctcgatatgaagacttcgtagtggatggcttcaatgtgttatataacaagaagcctgtcatatatcttagtgctgctgctagacctggcctgggccaatacctttgtaatcagctcggcttgcccttcccctgcttgtgccgtgtaccctgtaacactgtgtttggatcccagcatcagatggatgttgccttcctggagaaactgattaaagatgatatagagcgaggaagactgcccctgttgcttgtcgcaaatgcaggaacggcagcagtaggacacacagacaagattgggagattgaaagaactctgtgagcagtatggcatatggcttcatgtggagggtgtgaatctggcaacattggctctgggttatgtctcctcatcagtgctggctgcagccaaatgtgatagcatgacgatgactcctggcccgtggctgggtttgccagctgttcctgcggtgacactgtataaacacgatgaccctgccttgactttagttgctggtcttacatcaaataagcccacagacaaactccgtgccctgcctctgtggttatctttacaatacttgggacttgatgggtttgtggagaggatcaagcatgcctgtcaactgagtcaacggttgcaggaaagtttgaagaaagtgaattacatcaaaatcttggtggaagatgagctcagctccccagtggtggtgttcagatttttccaggaattaccaggctcagatccggtgtttaaagccgtcccagtgcccaacatgacaccttcaggagtcggccgggagaggcactcgtgtgacgcgctgaatcgctggctgggagaacagctgaagcagctggtgcctgcaagcggcctcacagtcatggatctggaagctgagggcacgtgtttgcggttcagccctttgatgaccgcagcagttttaggaactcggggagaggatgtggatcagctcgtagcctgcatagaaagcaaactgccagtgctgtgctgtacgctccagttgcgtgaagagttcaagcaggaagtggaagcaacagcaggtctcctatatgttgatgaccctaactggtctggaataggggttgtcaggtatgaacatgctaatgatgataagagcagtttgaaatcagatcccgaaggggaaaacatccatgctggactcctgaagaagttaaatgaactggaatctgacctaacctttaaaataggccctgagtataagagcatgaagagctgcctttatgtcggcatggcgagcgacaacgtcgatgctgctgagctcgtggagaccattgcggccacagcccgggagatagaggagaactcgaggcttctggaaaacatgacagaagtggttcggaaaggcattcaggaagctcaagtggagctgcagaaggcaagtgaagaacggcttctggaagagggggtgttgcggcagatccctgtagtgggctccgtgctgaattggttttctccggtccaggctttacagaagggaagaacttttaacttgacagcaggctctctggagtccacagaacccatatatgtctacaaagcacaaggtgcaggagtcacgctgcctccaacgccctcgggcagtcgcaccaagcagaggcttccaggccagaagccttttaaaaggtccctgcgaggttcagatgctttgagtgagaccagctcagtcagtcacattgaagacttagaaaaggtggagcgcctatccagtgggccggagcagatcaccctcgaggccagcagcactgagggacacccaggggctcccagccctcagcacaccgaccagaccgaggccttccagaaaggggtcccacacccagaagatgaccactcacaggtagaaggaccggagagcttaagatgagactcattgtgtggtttgagactgtactgagtattgtttcagggaagatgaagttctattggaaatgtgaactgtgccacatactaatataaattactgttgtttgtgcttcactgggattttggcacaaatatgtgcctgaaaggtaggctttctaggaggggagtcagcttgtctaacttcatgtacatgtagaaccacgtttgctgtcctactacgacttttccctaagttaccataaacacattttattcacaaaaaacacttcgaatttcaagtgtctaccagtagcacccttgctctttctaaacataagcctaagtatatga

SEQ ID NO: 104019 - DNA, 2283 bp, Artificial Sequence
  derived and/or modified sequence
atggacgccagcctggagaagatcgccgaccccaccctggccgagatgggcaagaacctgaaggaggccgtgaagatgctggaggacagccagagaaccgaggaggagaacggcaagaagctgatcagcggcgacatccccggccccctgcagggcagaatccagaacatcggcgagcagggccacatggccctgctgggccacagcctgggcgcctacatcagcaccctggacaaggagaagctgagaaagctgaccaccagaatcctgagcgacaccaccctgtggctgtgcagaatcttcagatacgagaacggctgcgcctacttccacgaggaggagagagagggcctggccaagatctgcagactggccatccacagcagatacgaggacttcgtggtggacggcttcaacgtgctgtacaacaagaagcccgtgatctacctgagcgccgccgccagacccggcctgggccagtacctgtgcaaccagctgggcctgcccttcccctgcctgtgcagagtgccctgcaacaccgtgttcggcagccagcaccagatggacgtggccttcctggagaagctgatcaaggacgacatcgagagaggcagactgcccctgctgctggtggccaacgccggcaccgccgccgtgggccacaccgacaagatcggcagactgaaggagctgtgcgagcagtacggcatctggctgcacgtggagggcgtgaacctggccaccctggccctgggctacgtgagcagcagcgtgctggccgccgccaagtgcgacagcatgaccatgacccccggcccctggctgggcctgcccgccgtgcccgccgtgaccctgtacaagcacgacgaccccgccctgaccctggtggccggcctgaccagcaacaagcccaccgacaagctgagagccctgcccctgtggctgagcctgcagtacctgggcctggacggcttcgtggagagaatcaagcacgcctgccagctgagccagagactgcaggagagcctgaagaaggtgaactacatcaagatcctggtggaggacgagctgagcagccccgtggtggtgttcagattcttccaggagctgcccggcagcgaccccgtgttcaaggccgtgcccgtgcccaacatgacccccagcggcgtgggcagagagagacacagctgcgacgccctgaacagatggctgggcgagcagctgaagcagctggtgcccgccagcggcctgaccgtgatggacctggaggccgagggcacctgcctgagattcagccccctgatgaccgccgccgtgctgggcaccagaggcgaggacgtggaccagctggtggcctgcatcgagagcaagctgcccgtgctgtgctgcaccctgcagctgagagaggagttcaagcaggaggtggaggccaccgccggcctgctgtacgtggacgaccccaactggagcggcatcggcgtggtgagatacgagcacgccaacgacgacaagagcagcctgaagagcgaccccgagggcgagaacatccacgccggcctgctgaagaagctgaacgagctggagagcgacctgaccttcaagatcggccccgagtacaagagcatgaagagctgcctgtacgtgggcatggccagcgacaacgtggacgccgccgagctggtggagaccatcgccgccaccgccagagagatcgaggagaacagcagactgctggagaacatgaccgaggtggtgagaaagggcatccaggaggcccaggtggagctgcagaaggccagcgaggagagactgctggaggagggcgtgctgagacagatccccgtggtgggcagcgtgctgaactggttcagccccgtgcaggccctgcagaagggcagaaccttcaacctgaccgccggcagcctggagagcaccgagcccatctacgtgtacaaggcccagggcgccggcgtgaccctgccccccacccccagcggcagcagaaccaagcagagactgcccggccagaagcccttcaagagaagcctgagaggcagcgacgccctgagcgagaccagcagcgtgagccacatcgaggacctggagaaggtggagagactgagcagcggccccgagcagatcaccctggaggccagcagcaccgagggccaccccggcgcccccagcccccagcacaccgaccagaccgaggccttccagaagggcgtgccccaccccgaggacgaccacagccaggtggagggccccgagagcctgagatag

SEQ ID NO: 104020 - DNA, 2322 bp, Artificial Sequence
  derived and/or modified sequence
atgggcaagaaccttaaagaagcggtcaaaatgttggaggattcccagcgcaggactgaggaggaaaatggtaagaaactaatttctggtgacatccctggacccctgcaggggtcaggccaagatatggtctcaatcctgcagctagtgcaaaacttgatgcacggcgatgaagatgaagagccccagagtccccggatccagaatatcggagaacaggggcacatggccctccttggtcactccctgggggcttacattagcacattggacaaggaaaagttgagaaaactcactacaaggatattatccgataccacgttatggctctgtcgcatcttcaggtatgagaacggttgcgcctatttccacgaggaggagagggaagggctcgctaagatttgtcggctggccatccactcccgctacgaggactttgtggtggacgggttcaatgtgctgtataacaaaaagccagtgatttatttatctgccgccgcacgccccggactgggccagtatctttgcaaccagctggggctgccattcccctgcctgtgccgggtgccctgcaacactgtgtttggcagccagcaccaaatggatgtggccttccttgagaaattgattaaggacgacattgaacgtgggcgcctgccactcctgctggtggccaatgctgggactgccgctgtgggacacacagacaagataggcagattaaaagagctgtgtgaacaatacggcatctggctgcatgtagagggagtcaatctggcaactctggccctcggatatgtttcaagcagtgtcctggctgcggcgaaatgtgatagtatgaccatgacacctgggccctggctgggactccccgctgttcctgcagtaaccctgtataaacacgacgatccagccctgactttagttgcagggctgacttcgaacaaacccactgataagctgagggccctgccactgtggctgtccttgcagtacctgggccttgatgggtttgtcgaaaggatcaagcacgcctgccagctgagtcagcgattgcaggaaagcctgaaaaaggttaattatattaaaattctagtcgaggatgaactgtctagcccagtcgtcgtgtttcgattttttcaggaactgcccggctcggacccagtgttcaaagcagtgcccgtccccaacatgactcccagcggggttggacgggagcgccattcatgcgatgcgctcaaccggtggctgggcgaacaactcaagcagttagttcctgctagtggtctaactgtaatggaccttgaggctgaggggacttgtctgcgttttagtccgctgatgacggccgcagttcttggaacccgtggcgaggatgtcgaccagctggtcgcctgcatcgagagtaagctgcccgtgctgtgttgcaccctacagctccgagaggaatttaagcaagaggtcgaagcaaccgcgggcctcctgtatgtcgacgatccaaactggtctggaatcggcgtggtgaggtatgagcatgcgaacgacgataagagcagcctgaagtccgacccggagggggagaacatccacgccgggctcttgaagaagctgaatgagcttgagtcagatttaaccttcaagatcggccctgagtataaaagcatgaaatcgtgcctttacgtgggtatggcatccgacaatgtggatgcagcggaacttgtagagaccatcgctgcaaccgcccgagagattgaagaaaattcgagattgttagagaatatgacggaggtggtaaggaaggggatccaagaagctcaggtggagcttcaaaaagctagtgaggaacgcctccttgaagagggagtactccggcagattccagtggtgggaagtgtgctgaactggttcagccctgtacaggcactgcaaaagggtaggactttcaatttgactgcagggagcctggaatctacagaacccatctacgtctataaagctcagggcgccggagtaaccttgccacccacccccagcgggtcccggaccaagcagcgcctgccaggccaaaaaccatttaagcgatccctgcgaggttctgatgccctgtctgagacctcatccgtttcccatattgaagacttggaaaaggtggagaggctgagtagtggacctgaacagattacactcgaggcctccagcacggaggggcatccaggagcaccttctccacagcacacagatcagacagaggcttttcagaagggcgtgcctcatcctgaagacgaccatagtcaagtcgaagggcccgaaagcctccgctag

SEQ ID NO: 104021 - DNA, 2322 bp, Artificial Sequence
  derived and/or modified sequence
atgggcaagaacctgaaggaggccgtgaagatgctggaggacagccagaggagaacagaggaggagaatggcaagaagctgatcagcggggacatccctggccccctgcagggcagcggccaggacatggtgtccatcctgcagctggtgcagaacctgatgcatggagatgaagatgaggagccccagagcccccgcatccagaacatcggggagcagggccacatggccctgctgggccacagcctgggcgcctacatcagcaccctggacaaggagaagctgaggaagctgaccacccgcatcctgagtgacaccaccctgtggctgtgccgcatcttccgctatgaaaatggctgtgcctacttccacgaggaggagcgggagggcctggccaagatctgccgcctggccatccacagccgctatgaggactttgtggtggatggcttcaacgtgctgtacaacaagaagcctgtgatctacctgtctgctgctgcccggcccggcctgggccagtacctgtgcaaccagctgggcctgcccttcccctgcctgtgccgggtgccctgcaacacagtgtttggcagccagcaccagatggatgtggccttcctggagaagctgatcaaggatgacatcgagcggggccgcctgcccctgctgctggtggccaatgccggcacagctgctgtgggccacacagacaagattggccgcctgaaggagctgtgtgagcagtatggcatctggctgcacgtggagggcgtgaacctggccaccctggccctgggctacgtgagcagctctgtgctggccgccgccaagtgtgacagcatgaccatgaccccaggcccctggctgggcctgcctgctgtgcctgctgtgaccctgtacaagcatgatgatcctgccctgaccctggtggccggcctgaccagcaacaagcccacagacaagctgcgggccctgcccctgtggctgagcctgcagtacctgggcctggatggctttgtggagcgcatcaagcacgcctgccagctgagccagaggctgcaggagagcctgaagaaggtgaactacatcaagatcctggtggaggatgagctgagcagccctgtggtggtgttccgcttcttccaggagctgcccggcagtgaccccgtcttcaaggctgtgcctgtgcccaacatgaccccatctggagtgggccgggagcggcacagctgtgatgccctgaaccgctggctgggggagcagctgaagcagctggtgcctgccagcggcctgactgtgatggacctggaggccgagggcacctgcctgcgcttcagccccctgatgacagctgctgtgctgggcaccagaggagaagatgtggaccagctggtggcctgcatcgagagcaagctgcctgtgctgtgctgcaccctgcagctgcgggaggagttcaagcaggaggtggaggccacagctggcctgctgtatgtggatgaccccaactggagcggcattggagtggtgcgctatgagcacgccaatgatgacaagagcagcctgaagagtgaccctgaaggagagaacatccatgctggcctgctgaagaagctgaatgagctggagagtgacctgaccttcaagattggccctgagtacaagtccatgaagagctgcctgtatgtgggcatggccagtgacaacgtggatgctgctgagctggtggagaccatcgccgccacagcccgggagattgaggagaacagccggctgctggagaacatgacagaggtggtgaggaagggcatccaggaggcccaggtggagctgcagaaggccagcgaggagcggctgctggaggagggcgtgctgcggcagatccctgtggtgggctctgtgctgaactggttcagccctgtgcaggccctgcagaagggccgcaccttcaacctgacagctggcagcctggagagcacagagcccatctacgtgtacaaggcccagggcgctggggtgaccctgccccccacccccagcggcagcaggaccaagcagaggctgcccggccagaagcccttcaagaggagcctgcggggcagtgatgccctgtctgagaccagctctgtgagccacatcgaggacctggagaaggtggagcggctgagcagcggccctgagcagatcaccctggaggccagcagcacagagggccaccctggggcccccagcccccagcacacagaccagacagaggccttccagaagggcgtgccccacccagaagatgaccacagccaggtggagggccctgagagcctgaggtag

SEQ ID NO: 104022 - DNA, 2322 bp, Artificial Sequence
  derived and/or modified sequence
atgggcaagaacctgaaggaggccgtgaagatgctggaggacagccagcgaaggacagaagaagagaacggtaagaagctgatctccggtgacattcctggccccctgcaaggaagcggccaggacatggttagtatcctccagttggttcagaacctgatgcatggagacgaagatgaggaaccccagtcaccacgcatccagaacattggcgagcaaggccacatggccttactgggccattctctgggggcctatatttctactctcgacaaagagaaattaagaaaactcaccacccgaatccttagtgatactaccctgtggctgtgcagaatcttccggtatgaaaacggctgcgcatattttcacgaggaggaacgcgagggcctagccaagatctgccggcttgctattcactctagatatgaagactttgtcgtggatgggttcaatgttctgtataacaagaagccagttatctatttatccgcagccgcgcgaccgggacttggccagtacctatgcaatcagttggggctgccatttccttgtctttgcagggttccctgcaataccgtatttgggagtcaacaccaaatggacgtggcttttctggagaaactaattaaagacgacatcgaacgcggtcggctccctctgttattggtggctaatgcgggcacggctgccgtgggccataccgacaagattgggcgcctgaaggaactctgcgaacagtacggcatatggttacacgtcgagggcgtcaatctggcaaccttggcgctcggttacgtgagctcatcagtgctcgccgctgctaagtgtgatagtatgaccatgactcctgggccatggctcgggctccccgctgttccagcagtcactctatacaagcacgacgatcctgctctcaccttagtagccgggctcacttctaacaagcccacggataagctacgggctctgcccctgtggctgagtctgcaatacctgggacttgacgggttcgttgagcgaataaagcatgcctgccagcttagtcagaggcttcaggagagcctcaaaaaagttaactatataaagatcctggtcgaggacgaactgtcttcccccgttgtagtcttcaggttcttccaggagctccccggcagtgatccagtgttcaaggcagttccggtgccaaatatgaccccatcaggggtggggagggaacgccatagttgcgacgccctaaaccggtggttgggcgagcaacttaagcaactcgtacctgcttcaggacttacagtgatggacctggaggccgaaggcacatgcctgagatttagcccactgatgacagcagcagtgctggggacaaggggcgaggacgtcgatcagctagtggcctgcatcgaatctaagctgcccgtgctgtgttgtacactccaactgcgggaggaattcaagcaggaagtcgaagccactgccggactgctgtatgtcgatgaccctaattggagcgggataggcgtagtcagatatgagcacgctaatgacgataaatcaagcctcaaaagcgatcctgaaggcgaaaacatccacgctggactactaaaaaaattgaacgagcttgaatcggatttgacattcaagattggcccagaatataagtcgatgaagtcctgcttatacgtggggatggccagcgataatgttgatgctgcagagctggttgaaactattgccgcaaccgctagggagatcgaggaaaacagccgccttttagagaatatgaccgaggttgtgagaaagggtatccaggaagctcaggtcgagctgcagaaagccagtgaagaaagattgcttgaggagggcgttctgaggcagatcccagtggttgggtctgtgctgaattggttctcccctgttcaggccctgcagaaagggcggacttttaacctgacagcaggaagcttagagtccactgagccaatctacgtctataaggcccagggagcaggtgtcaccttgcctcccacaccttctggtagcagaacgaaacagcggctgcctgggcagaagcccttcaagcggagcttgagagggagcgacgcactcagtgagactagcagcgtgtcccacatcgaggatctcgaaaaagtcgaacggctgtcgagcggtcccgaacaaattacactagaggccagcagtaccgagggtcaccctggtgccccatctccacagcacaccgaccagaccgaggcatttcaaaagggggtccctcatcctgaagatgaccactcccaagttgagggcccagaatccctgcgttag

SEQ ID NO: 104023 - DNA, 2322 bp, Artificial Sequence
  derived and/or modified sequence
atgggcaagaacctgaaggaggccgttaagatgctggaggacagtcagcggcgtacagaggaggagaacgggaagaagctgatctctggtgatattccaggacccctgcagggcagcggccaggacatggtgagtatcctccagctggtgcagaacctcatgcatggtgacgaagatgaagaaccgcaatccccacgcatacagaatattggcgaacagggacatatggcgttgttaggccattcactcggcgcttatatctcgactctcgacaaagaaaaattgaggaagttaacgacacggatcctgagtgataccacgctttggctttgtcgaatcttcaggtacgaaaatgggtgtgcctactttcatgaggaggagcgagaaggtctagcaaagatctgccgcctcgcaattcactctcgctacgaggacttcgtggtagacggcttcaacgttttgtataataagaagccagttatctacttgtccgccgctgcccgtcctggcctcgggcagtatctgtgtaatcagttgggactgccctttccttgtctttgccgggtgccgtgtaatacagtgtttggcagccaacaccagatggacgttgcttttctggaaaagcttataaaagatgatatcgagcgcggtcggctccccctgcttctagtggcaaatgccggaactgcagccgtgggccacacggacaaaatcgggagactgaaagagctgtgcgaacagtacgggatctggctccacgtggagggtgtgaacctcgcaacccttgctcttggctacgtgagttcttcggtgctcgcagctgctaagtgtgactccatgacaatgaccccaggaccatggctgggccttcccgctgtgcccgctgtcactctgtacaagcatgacgaccctgccctgactctggtcgcgggactgacatcaaacaaacccacagataagctgcgtgccttacctctgtggctctctcttcagtacctggggttggatggctttgtagagcgaattaaacatgcttgtcagctcagtcagaggctgcaagagagtctcaagaaagtgaattatataaagatcctcgtggaagatgagctctccagtccagtggtcgtgttcagattctttcaggaactgcccggttccgatcccgtttttaaagccgtgcctgtcccgaacatgacccccagcggggttgggagggagcgccactcatgtgatgcgctgaaccggtggctgggggaacagctcaaacagcttgtccctgcttctggcctgactgtcatggacttagaggctgaggggacatgtttgagatttagccccctgatgaccgcggcagtgctcggcacaaggggtgaggacgtcgatcagctggtggcttgtatagagtcaaagctcccggtcctctgttgtacattgcaactgcgggaggagttcaagcaagaggtggaagccaccgcaggactgctctacgtggatgacccaaattggagcggtatcggggtagtgaggtacgaacatgccaacgacgataaaagtagcctgaagtccgatcctgagggagaaaacattcacgcaggcttgctgaagaagcttaacgagctggaatcggaccttacgtttaaaatcggccctgaatataaaagtatgaagagttgtctttatgtggggatggccagtgataacgttgatgccgctgaattagtggaaacgatcgccgctactgctcgcgagatagaagaaaacagtagactgctggaaaacatgaccgaggtggtgcgcaagggaatccaggaggctcaggttgaactccagaaggcaagcgaggaaagactgctcgaggaaggggtgctgaggcagatcccagtggtgggcagcgtgctgaactggttcagcccagtacaggccctgcagaagggaaggacattcaacctcacagcaggtagcttggagtctaccgagccaatctacgtttacaaggcacagggagccggagtgacacttccacccacgccctcaggaagccgaaccaagcagcgactccctggccagaaaccctttaagcgcagccttcgtggaagcgacgctctcagtgagacatcttccgtatctcatattgaggatctggaaaaggttgagcgattgagcagcggccctgaacagattactttggaggccagctccaccgaaggccacccgggtgcgccatctccgcaacacaccgaccagacagaagcattccagaagggggtcccacatcccgaggacgatcacagccaggtcgagggccctgagagtttgagatag

SEQ ID NO: 104024 - DNA, 2322 bp, Artificial Sequence
  derived and/or modified sequence
atgggcaagaacctgaaggaggccgtgaagatgctggaggacagccagagaagaaccgaggaggagaacggcaagaagctgatcagcggcgacatccccggccccctgcagggcagcggccaggacatggtgagcatcctgcagctggtgcagaacctgatgcacggcgacgaggacgaggagccccagagccccagaatccagaacatcggcgagcagggccacatggccctgctgggccacagcctgggcgcctacatcagcaccctggacaaggagaagctgagaaagctgaccaccagaatcctgagcgacaccaccctgtggctgtgcagaatcttcagatacgagaacggctgcgcctacttccacgaggaggagagagagggcctggccaagatctgcagactggccatccacagcagatacgaggacttcgtggtggacggcttcaacgtgctgtacaacaagaagcccgtgatctacctgagcgccgccgccagacccggcctgggccagtacctgtgcaaccagctgggcctgcccttcccctgcctgtgcagagtgccctgcaacaccgtgttcggcagccagcaccagatggacgtggccttcctggagaagctgatcaaggacgacatcgagagaggcagactgcccctgctgctggtggccaacgccggcaccgccgccgtgggccacaccgacaagatcggcagactgaaggagctgtgcgagcagtacggcatctggctgcacgtggagggcgtgaacctggccaccctggccctgggctacgtgagcagcagcgtgctggccgccgccaagtgcgacagcatgaccatgacccccggcccctggctgggcctgcccgccgtgcccgccgtgaccctgtacaagcacgacgaccccgccctgaccctggtggccggcctgaccagcaacaagcccaccgacaagctgagagccctgcccctgtggctgagcctgcagtacctgggcctggacggcttcgtggagagaatcaagcacgcctgccagctgagccagagactgcaggagagcctgaagaaggtgaactacatcaagatcctggtggaggacgagctgagcagccccgtggtggtgttcagattcttccaggagctgcccggcagcgaccccgtgttcaaggccgtgcccgtgcccaacatgacccccagcggcgtgggcagagagagacacagctgcgacgccctgaacagatggctgggcgagcagctgaagcagctggtgcccgccagcggcctgaccgtgatggacctggaggccgagggcacctgcctgagattcagccccctgatgaccgccgccgtgctgggcaccagaggcgaggacgtggaccagctggtggcctgcatcgagagcaagctgcccgtgctgtgctgcaccctgcagctgagagaggagttcaagcaggaggtggaggccaccgccggcctgctgtacgtggacgaccccaactggagcggcatcggcgtggtgagatacgagcacgccaacgacgacaagagcagcctgaagagcgaccccgagggcgagaacatccacgccggcctgctgaagaagctgaacgagctggagagcgacctgaccttcaagatcggccccgagtacaagagcatgaagagctgcctgtacgtgggcatggccagcgacaacgtggacgccgccgagctggtggagaccatcgccgccaccgccagagagatcgaggagaacagcagactgctggagaacatgaccgaggtggtgagaaagggcatccaggaggcccaggtggagctgcagaaggccagcgaggagagactgctggaggagggcgtgctgagacagatccccgtggtgggcagcgtgctgaactggttcagccccgtgcaggccctgcagaagggcagaaccttcaacctgaccgccggcagcctggagagcaccgagcccatctacgtgtacaaggcccagggcgccggcgtgaccctgccccccacccccagcggcagcagaaccaagcagagactgcccggccagaagcccttcaagagaagcctgagaggcagcgacgccctgagcgagaccagcagcgtgagccacatcgaggacctggagaaggtggagagactgagcagcggccccgagcagatcaccctggaggccagcagcaccgagggccaccccggcgcccccagcccccagcacaccgaccagaccgaggccttccagaagggcgtgccccaccccgaggacgaccacagccaggtggagggccccgagagcctgagatag

SEQ ID NO: 104025 - protein, 697 aa, Artificial Sequence
  derived and/or modified sequence
MGKNLKEAVKMLEDSQRRTEEENGKKLISGDIPGPLQGRYENGCAYFHEEEREGLAKICRLAIHSRYEDFVVDGFNVLYNKKPVIYLSAAARPGLGQYLCNQLGLPFPCLCRVPCNTVFGSQHQMDVAFLEKLIKDDIERGRLPLLLVANAGTAAVGHTDKIGRLKELCEQYGIWLHVEGVNLATLALGYVSSSVLAAAKCDSMTMTPGPWLGLPAVPAVTLYKHDDPALTLVAGLTSNKPTDKLRALPLWLSLQYLGLDGFVERIKHACQLSQRLQESLKKVNYIKILVEDELSSPVVVFRFFQELPGSDPVFKAVPVPNMTPSGVGRERHSCDALNRWLGEQLKQLVPASGLTVMDLEAEGTCLRFSPLMTAAVLGTRGEDVDQLVACIESKLPVLCCTLQLREEFKQEVEATAGLLYVDDPNWSGIGVVRYEHANDDKSSLKSDPEGENIHAGLLKKLNELESDLTFKIGPEYKSMKSCLYVGMASDNVDAAELVETIAATAREIEENSRLLENMTEVVRKGIQEAQVELQKASEERLLEEGVLRQIPVVGSVLNWFSPVQALQKGRTFNLTAGSLESTEPIYVYKAQGAGVTLPPTPSGSRTKQRLPGQKPFKRSLRGSDALSETSSVSHIEDLEKVERLSSGPEQITLEASSTEGHPGAPSPQHTDQTEAFQKGVPHPEDDHSQVEGPESLR

SEQ ID NO: 104026 - DNA, 2094 bp, Artificial Sequence
  derived and/or modified sequence
atgggcaaaaatcttaaagaggcggtgaagatgctcgaagattcgcagcgtcgcaccgaggaagagaatggcaagaagctcatctccggagatatccccggcccacttcaagggagatacgaaaatggctgcgcctattttcacgaggaagagcgcgagggccttgcgaagatttgccggttagcaattcactcacggtatgaagattttgttgtggatgggttcaatgtgctgtacaataagaagccagtcatttacctttccgcagccgcaaggcctggcttaggccagtatttgtgcaaccagctcgggctcccttttccttgtctttgtcgcgtaccctgcaatacagtgtttgggagtcagcaccaaatggacgtggcatttttagagaagctgatcaaggacgatatagagcgcgggagattgcctctgctgctggttgcaaacgctggcacagcagccgttggacacacagacaaaattgggaggcttaaagagctgtgtgaacagtatggcatctggctgcatgttgagggcgtaaaccttgccactctggccttgggatatgttagttcttcagtgctggccgccgctaagtgcgacagtatgactatgacccctggtccgtggctgggcctgcccgctgtgcctgccgttactttgtacaaacatgatgacccagcactgaccctggtggcggggctgacatcaaataagcctacggataagctgagggccctgcctctctggctgtcgctgcagtaccttggcttggatggctttgtcgagcggatcaagcacgcatgtcagctctctcagagattacaggagtccctgaaaaaagtcaattatatcaaaatcttggtggaggatgagctgagcagcccggtggtggtgtttcgcttctttcaagaactgcctgggtccgaccctgtgttcaaggcagtccctgtgcctaatatgaccccctcaggcgtggggcgagaaagacactcatgtgacgccttaaaccggtggctgggggagcagttgaagcaattggtacctgcctccggcctcacagttatggatctggaagcggaagggacctgcctgcgctttagccccctgatgaccgcagctgtgttgggcacaagaggcgaggacgtggaccagctggtggcctgtatagagagcaaactccctgttctgtgctgtacgctacaattgagagaggaattcaaacaggaagtggaggctaccgcgggattgctgtacgtcgatgatcccaattggtcaggaattggcgtggtccggtatgaacacgctaatgacgataaatcgtccctcaagagcgacccagagggtgaaaatatccacgctggactgttgaagaaactaaatgaactcgaaagcgaccttacctttaagatcggccccgagtacaagtctatgaagtcttgcctgtacgtgggcatggcttctgataacgtggatgcagccgaattagtggagaccatagctgccaccgccagagagatcgaggaaaactctaggctcttggagaacatgacggaagttgtgcggaagggcatccaggaggcacaggtcgaattgcagaaggccagcgaggagagactccttgaggagggcgttctgcggcagatacctgtcgtcggttcagttctcaattggttttctcccgttcaggcgttgcagaaagggcggacttttaacctgaccgcaggctccttagagagcaccgagccaatatatgtgtataaggcacagggggccggggttaccttgcccccgacccctagcggaagccgaacaaaacagaggctgccagggcaaaaacctttcaaaaggagccttcgtggctcagacgccctttctgagacctcaagcgtctctcacatagaggatctggaaaaagtggagagactttcttctggaccagagcagattacccttgaagcctcctcaacagaagggcacccgggcgctccttcgccgcagcacacagaccagaccgaggcctttcagaaaggcgttccacatcccgaggacgatcacagccaggtggaaggccctgaatccctgagatag

SEQ ID NO: 104027 - DNA, 2094 bp, Artificial Sequence
  derived and/or modified sequence
atgggcaagaacctgaaggaggccgtgaagatgctggaggacagccagaggagaacagaggaggagaatggcaagaagctgatcagcggggacatccctggccccctgcagggccgctatgaaaatggctgtgcctacttccacgaggaggagcgggagggcctggccaagatctgccgcctggccatccacagccgctatgaggactttgtggtggatggcttcaacgtgctgtacaacaagaagcctgtgatctacctgtctgctgctgcccggcccggcctgggccagtacctgtgcaaccagctgggcctgcccttcccctgcctgtgccgggtgccctgcaacacagtgtttggcagccagcaccagatggatgtggccttcctggagaagctgatcaaggatgacatcgagcggggccgcctgcccctgctgctggtggccaatgccggcacagctgctgtgggccacacagacaagattggccgcctgaaggagctgtgtgagcagtatggcatctggctgcacgtggagggcgtgaacctggccaccctggccctgggctacgtgagcagctctgtgctggccgccgccaagtgtgacagcatgaccatgaccccaggcccctggctgggcctgcctgctgtgcctgctgtgaccctgtacaagcatgatgatcctgccctgaccctggtggccggcctgaccagcaacaagcccacagacaagctgcgggccctgcccctgtggctgagcctgcagtacctgggcctggatggctttgtggagcgcatcaagcacgcctgccagctgagccagaggctgcaggagagcctgaagaaggtgaactacatcaagatcctggtggaggatgagctgagcagccctgtggtggtgttccgcttcttccaggagctgcccggcagtgaccccgtcttcaaggctgtgcctgtgcccaacatgaccccatctggagtgggccgggagcggcacagctgtgatgccctgaaccgctggctgggggagcagctgaagcagctggtgcctgccagcggcctgactgtgatggacctggaggccgagggcacctgcctgcgcttcagccccctgatgacagctgctgtgctgggcaccagaggagaagatgtggaccagctggtggcctgcatcgagagcaagctgcctgtgctgtgctgcaccctgcagctgcgggaggagttcaagcaggaggtggaggccacagctggcctgctgtatgtggatgaccccaactggagcggcattggagtggtgcgctatgagcacgccaatgatgacaagagcagcctgaagagtgaccctgaaggagagaacatccatgctggcctgctgaagaagctgaatgagctggagagtgacctgaccttcaagattggccctgagtacaagtccatgaagagctgcctgtatgtgggcatggccagtgacaacgtggatgctgctgagctggtggagaccatcgccgccacagcccgggagattgaggagaacagccggctgctggagaacatgacagaggtggtgaggaagggcatccaggaggcccaggtggagctgcagaaggccagcgaggagcggctgctggaggagggcgtgctgcggcagatccctgtggtgggctctgtgctgaactggttcagccctgtgcaggccctgcagaagggccgcaccttcaacctgacagctggcagcctggagagcacagagcccatctacgtgtacaaggcccagggcgctggggtgaccctgccccccacccccagcggcagcaggaccaagcagaggctgcccggccagaagcccttcaagaggagcctgcggggcagtgatgccctgtctgagaccagctctgtgagccacatcgaggacctggagaaggtggagcggctgagcagcggccctgagcagatcaccctggaggccagcagcacagagggccaccctggggcccccagcccccagcacacagaccagacagaggccttccagaagggcgtgccccacccagaagatgaccacagccaggtggagggccctgagagcctgaggtag

SEQ ID NO: 104028 - DNA, 2094 bp, Artificial Sequence
  derived and/or modified sequence
atgggcaagaacctgaaggaggccgtgaagatgctggaggacagccagcgcaggacagaggaagagaatggcaagaaattgatctcaggcgacatcccaggcccgcttcagggtagatatgagaatggatgcgcttactttcacgaggaggaacgtgaaggtctggctaaaatctgtagactggcaatccactctcgctatgaagacttcgtagtagacggctttaatgtgctttacaacaaaaaacctgtgatttatctatccgctgcagctcggcctggccttggacaatacctgtgtaaccagctgggcttgccgttcccatgtctgtgtcgcgtgccctgcaatactgtgtttggatctcaacatcaaatggacgtcgcttttctcgagaagctcatcaaggacgacatagagcgcggacggttgcctctcttgctcgttgcaaacgccggtaccgctgctgtgggccatactgacaagatcgggcgcttgaaggagctgtgcgagcaatacgggatttggctgcacgtggagggtgtgaatctggcaaccctcgcactggggtatgtgagctcttctgtactggctgctgcgaaatgcgattctatgaccatgacaccagggccctggcttgggcttccggcagtgccagctgtgaccctctacaaacacgacgaccctgcactgaccctagttgctggacttacttcgaataagccaactgacaagcttcgagctttaccgctctggctctctttacagtatctcgggctggatggcttcgtggaacggattaaacacgcctgtcaactgagccagcgcctgcaggagtctttgaaaaaggttaattacataaagatcttagtggaggacgaactttccagcccagtagtagtgttccggttcttccaggagctcccagggtcagaccccgtgtttaaagccgtgccagtgccaaacatgacgccatctggcgttggtagggagcgtcatagctgtgacgctctgaacagatggttgggggagcaactcaagcagctcgtgcccgcctccggcctcaccgtgatggacctggaggccgaggggacatgtcttagatttagtcctttaatgacggccgctgtgttgggcacccgtggcgaggacgtggatcagctcgtggcgtgtatcgagagcaaattgcctgttctgtgttgcactttacaactgcgagaagaattcaaacaggaggtcgaggcaacagctggtctgctctatgtggatgaccccaactggagcggaatcggagtggttagatatgaacacgccaatgatgataagagtagtctgaaaagcgacccagaaggggagaatattcatgcaggtctcctgaagaaactaaacgagctggaatcggacctgacttttaaaatcggccccgaatacaagagcatgaagagctgtctctacgttggcatggccagcgacaacgtcgacgctgccgaattagttgagactattgccgctacagcgagagaaatcgaggaaaatagcagattgctggagaacatgacagaagtggtcagaaaaggaatccaagaggcccaggtcgagctgcagaaggcttcggaggaaagattgctcgaggagggcgtgctgaggcaaatccctgtggtagggtctgtattgaattggttctcccccgtgcaggcactgcagaagggaagaaccttcaatctcaccgccggtagccttgaatctacggagcctatctatgtctacaaggctcaaggggccggagtgacactcccacctactccaagcggaagtaggacaaagcagcggctcccaggacaaaaacctttcaaacggtccctgcggggtagcgacgccttaagtgaaacttcctctgtttctcacattgaggacctcgaaaaagtcgagaggctgtcttcagggccggaacaaattactctggaagcctcttccacagagggacacccaggggcccccagcccccaacataccgaccagacggaagccttccagaaaggggtgccccaccctgaggacgatcacagccaggtggagggccctgaaagtctgaggtag

SEQ ID NO: 104029 - DNA, 2094 bp, Artificial Sequence
  derived and/or modified sequence
atggggaagaacttgaaggaggctgtgaagatgctagaggactctcagagacggacggaggaggagaacgggaagaagttaatcagtggcgatattcccggaccgctacagggcagatacgaaaatggatgtgcttactttcacgaagaagaacgggaaggactcgccaaaatatgcaggttagcgatccacagcagatatgaggacttcgtggttgacgggttcaacgtgctttataacaaaaaacctgttatttatttatcagctgccgcacggccaggactcggccagtatttgtgtaatcagctgggactgcctttcccttgcctctgtcgtgtaccatgcaatacggtgttcggctcccaacaccagatggacgtagcctttttggagaagttaataaaggacgacattgagcgtgggcgtttgcccctcctgctggtagcaaatgcaggtaccgccgctgtcgggcacaccgataaaataggtcgcctaaaagagctgtgcgagcaatatggaatctggttacatgtggaaggcgttaatctggcgacactcgcattggggtatgtaagcagcagtgtgctggccgctgctaagtgtgattctatgacaatgacccctggtccctggcttggccttccggcagtaccagcggtcactctgtacaaacatgacgaccccgctctgaccttagttgctggactcaccagcaataaacctacagacaagttgcgggcactgcccctgtggctgtccctccagtacctcgggcttgacgggttcgtggagaggattaaacacgcctgtcagttgagccagcgcctgcaggaatctttgaagaaagtgaactatattaagatccttgtggaagatgaactcagttccccggtggtggtctttcgcttcttccaggagctgcctgggagtgatccagtgtttaaggctgtgccagtcccaaatatgacaccttccggtgtcggaagggagcgccattcctgtgacgccctgaataggtggctcggcgagcagcttaaacagctagtgcccgctagtgggttgactgtcatggatctggaggctgagggaacctgtttgcgattttcacccttaatgactgcagcagtgttggggacacggggtgaagacgtggatcagttggttgcttgcatcgagtccaaactccctgtactttgttgcaccctgcagctgagggaggagtttaagcaggaagtggaggctactgcgggattactgtacgttgatgatccaaactggtcaggaataggggtggtgaggtacgagcatgccaatgacgacaaatcatcactcaagagcgacccggaaggtgagaacattcacgcgggactccttaagaaactgaatgaattggagagtgacctcacttttaagattggacccgagtacaagagtatgaagtcatgcctgtatgtaggcatggcaagcgacaatgttgacgctgcagaactggttgagaccatcgccgctacagccagggaaattgaggagaatagtaggctgctggagaatatgacagaggtggttagaaaaggaattcaggaagctcaggtcgaactccagaaagctagcgaagagaggctgctcgaggagggagtgctgcgacagatcccggtggtggggagtgttctcaattggttcagtccagtccaggcactgcagaaaggacggaccttcaacctgactgccggaagcttggaaagtacggagcctatctacgtgtataaggcacagggagcaggggttaccctgccgccaactccctcaggctcacgcactaagcaacggttgcccggacagaagccttttaagcgcagtctccggggttctgacgccctctctgagaccagcagtgtctcgcatatcgaggatttggaaaaagtggagcgcttgtccagtggacctgaacagatcacccttgaagcaagctcaactgagggacatcctggagctccgagccctcagcacacagaccagacggaggcttttcagaagggtgtaccgcacccagaggacgaccactcccaagtcgaaggaccagaaagcttacgctag

SEQ ID NO: 104030 - DNA, 2533 bp, Artificial Sequence
  derived and/or modified sequence
atttccagcctttcactccatgaatagtactttgtgattattatacttctaccttgatgattgcaacaggctgctggaaagagtttggtgaacaatccaccgggcatcctccccccttcacctgcgcacgttagggagggccggcgtggcgcccagacggactctcaccctgtcgcccaggctggagtgcaatggcgccatctcggttcactgcaacctccgcctcccgggttcaaacgattctcctgcctcagcctcctgagtagctggggttacaggcacaccaccacgcccagatagcagaccccacgttagctgaaatgggaaaaaacttgaaggaggcagtgaagatgctggaggacagtcagagaagaacagaagaggaaaatggaaagaagctcatatccggagatattccaggcccactccagggcagatatgaaaatgggtgtgcttatttccacgaagaggaaagagaaggacttgcaaagatatgtaggcttgccattcattctcgatatgaagacttcgtagtggatggcttcaatgtgttatataacaagaagcctgtcatatatcttagtgctgctgctagacctggcctgggccaatacctttgtaatcagctcggcttgcccttcccctgcttgtgccgtgtaccctgtaacactgtgtttggatcccagcatcagatggatgttgccttcctggagaaactgattaaagatgatatagagcgaggaagactgcccctgttgcttgtcgcaaatgcaggaacggcagcagtaggacacacagacaagattgggagattgaaagaactctgtgagcagtatggcatatggcttcatgtggagggtgtgaatctggcaacattggctctgggttatgtctcctcatcagtgctggctgcagccaaatgtgatagcatgacgatgactcctggcccgtggctgggtttgccagctgttcctgcggtgacactgtataaacacgatgaccctgccttgactttagttgctggtcttacatcaaataagcccacagacaaactccgtgccctgcctctgtggttatctttacaatacttgggacttgatgggtttgtggagaggatcaagcatgcctgtcaactgagtcaacggttgcaggaaagtttgaagaaagtgaattacatcaaaatcttggtggaagatgagctcagctccccagtggtggtgttcagatttttccaggaattaccaggctcagatccggtgtttaaagccgtcccagtgcccaacatgacaccttcaggagtcggccgggagaggcactcgtgtgacgcgctgaatcgctggctgggagaacagctgaagcagctggtgcctgcaagcggcctcacagtcatggatctggaagctgagggcacgtgtttgcggttcagccctttgatgaccgcagcagttttaggaactcggggagaggatgtggatcagctcgtagcctgcatagaaagcaaactgccagtgctgtgctgtacgctccagttgcgtgaagagttcaagcaggaagtggaagcaacagcaggtctcctatatgttgatgaccctaactggtctggaataggggttgtcaggtatgaacatgctaatgatgataagagcagtttgaaatcagatcccgaaggggaaaacatccatgctggactcctgaagaagttaaatgaactggaatctgacctaacctttaaaataggccctgagtataagagcatgaagagctgcctttatgtcggcatggcgagcgacaacgtcgatgctgctgagctcgtggagaccattgcggccacagcccgggagatagaggagaactcgaggcttctggaaaacatgacagaagtggttcggaaaggcattcaggaagctcaagtggagctgcagaaggcaagtgaagaacggcttctggaagagggggtgttgcggcagatccctgtagtgggctccgtgctgaattggttttctccggtccaggctttacagaagggaagaacttttaacttgacagcaggctctctggagtccacagaacccatatatgtctacaaagcacaaggtgcaggagtcacgctgcctccaacgccctcgggcagtcgcaccaagcagaggcttccaggccagaagccttttaaaaggtccctgcgaggttcagatgctttgagtgagaccagctcagtcagtcacattgaagacttagaaaaggtggagcgcctatccagtgggccggagcagatcaccctcgaggccagcagcactgagggacacccaggggctcccagccctcagcacaccgaccagaccgaggccttccagaaaggggtcccacacccagaagatgaccactcacaggtagaaggaccggagagcttaagatgagactcattgtgtggtttgagactgtactgagtattgtttcagggaagatgaagttctattggaaatgtgaactgtgccacatactaatataaattactgttgtttgtgcttcactggga

SEQ ID NO: 104031 - DNA, 2094 bp, Artificial Sequence
  derived and/or modified sequence
atgggcaagaacctgaaggaggccgtgaagatgctggaggacagccagagaagaaccgaggaggagaacggcaagaagctgatcagcggcgacatccccggccccctgcagggcagatacgagaacggctgcgcctacttccacgaggaggagagagagggcctggccaagatctgcagactggccatccacagcagatacgaggacttcgtggtggacggcttcaacgtgctgtacaacaagaagcccgtgatctacctgagcgccgccgccagacccggcctgggccagtacctgtgcaaccagctgggcctgcccttcccctgcctgtgcagagtgccctgcaacaccgtgttcggcagccagcaccagatggacgtggccttcctggagaagctgatcaaggacgacatcgagagaggcagactgcccctgctgctggtggccaacgccggcaccgccgccgtgggccacaccgacaagatcggcagactgaaggagctgtgcgagcagtacggcatctggctgcacgtggagggcgtgaacctggccaccctggccctgggctacgtgagcagcagcgtgctggccgccgccaagtgcgacagcatgaccatgacccccggcccctggctgggcctgcccgccgtgcccgccgtgaccctgtacaagcacgacgaccccgccctgaccctggtggccggcctgaccagcaacaagcccaccgacaagctgagagccctgcccctgtggctgagcctgcagtacctgggcctggacggcttcgtggagagaatcaagcacgcctgccagctgagccagagactgcaggagagcctgaagaaggtgaactacatcaagatcctggtggaggacgagctgagcagccccgtggtggtgttcagattcttccaggagctgcccggcagcgaccccgtgttcaaggccgtgcccgtgcccaacatgacccccagcggcgtgggcagagagagacacagctgcgacgccctgaacagatggctgggcgagcagctgaagcagctggtgcccgccagcggcctgaccgtgatggacctggaggccgagggcacctgcctgagattcagccccctgatgaccgccgccgtgctgggcaccagaggcgaggacgtggaccagctggtggcctgcatcgagagcaagctgcccgtgctgtgctgcaccctgcagctgagagaggagttcaagcaggaggtggaggccaccgccggcctgctgtacgtggacgaccccaactggagcggcatcggcgtggtgagatacgagcacgccaacgacgacaagagcagcctgaagagcgaccccgagggcgagaacatccacgccggcctgctgaagaagctgaacgagctggagagcgacctgaccttcaagatcggccccgagtacaagagcatgaagagctgcctgtacgtgggcatggccagcgacaacgtggacgccgccgagctggtggagaccatcgccgccaccgccagagagatcgaggagaacagcagactgctggagaacatgaccgaggtggtgagaaagggcatccaggaggcccaggtggagctgcagaaggccagcgaggagagactgctggaggagggcgtgctgagacagatccccgtggtgggcagcgtgctgaactggttcagccccgtgcaggccctgcagaagggcagaaccttcaacctgaccgccggcagcctggagagcaccgagcccatctacgtgtacaaggcccagggcgccggcgtgaccctgccccccacccccagcggcagcagaaccaagcagagactgcccggccagaagcccttcaagagaagcctgagaggcagcgacgccctgagcgagaccagcagcgtgagccacatcgaggacctggagaaggtggagagactgagcagcggccccgagcagatcaccctggaggccagcagcaccgagggccaccccggcgcccccagcccccagcacaccgaccagaccgaggccttccagaagggcgtgccccaccccgaggacgaccacagccaggtggagggccccgagagcctgagatag

SEQ ID NO: 104032 - protein, 498 aa, Artificial Sequence
  derived and/or modified sequence
MDASLEKIADPTLAEMGKNLKEAVKMLEDSQRRTEEENGKKLISGDIPGPLQGSGQDMVSILQLVQNLMHGDEDEEPQSPRIQNIGEQGHMALLGHSLGAYISTLDKEKLRKLTTRILSDTTLWLCRIFRYENGCAYFHEEEREGLAKICRLAIHSRYEDFVVDGFNVLYNKKPVIYLSAAARPGLGQYLCNQLGLPFPCLCRVPCNTVFGSQHQMDVAFLEKLIKDDIERGRLPLLLVANAGTAAVGHTDKIGRLKELCEQYGIWLHVEGVNLATLALGYVSSSVLAAAKCDSMTMTPGPWLGLPAVPAVTLYKHDDPALTLVAGLTSNKPTDKLRALPLWLSLQYLGLDGFVERIKHACQLSQRLQESLKKVNYIKILVEDELSSPVVVFRFFQELPGSDPVFKAVPVPNMTPSGVGRERHSCDALNRWLGEQLKQLVPASGLTVMDLEAEGTCLRFSPLMTAAGWSHCGTTTRYDCVRSRLTTRLPGSTGEQAPP

SEQ ID NO: 104033 - protein, 204 aa, Artificial Sequence
  derived and/or modified sequence
MTMTPGPWLGLPAVPAVTLYKHDDPALTLVAGLTSNKPTDKLRALPLWLSLQYLGLDGFVERIKHACQLSQRLQESLKKVNYIKILVEDELSSPVVVFRFFQELPGSDPVFKAVPVPNMTPSGVGRERHSCDALNRWLGEQLKQLVPASGLTVMDLEAEGTCLRFSPLMTAAGWSHCGTTTRYDCVRSRLTTRLPGSTGEQAPP

SEQ ID NO: 104034 - DNA, 2820 bp, Artificial Sequence
  derived and/or modified sequence
ctcaaccatcaggttcggcagccggcggcgccgcctggcagctcctcctcttctccgccccgctggccgcgggcgcgggggacgtcagcgctgccagcgtggaaagagctgcggggcgcgggaggaggaagtagagcccgggaccgccgggccaccaccggccgcctcagccatggacgcgtccctggagaagatagcagaccccacgttagctgaaatgggaaaaaacttgaaggaggcagtgaagatgctggaggacagtcagagaagaacagaagaggaaaatggaaagaagctcatatccagagatattccaggcccactccagggcagtggacaagatatggtgagcatcctccagttagttcagaatctgatgcatggagatgaagatgaggagccccagagccccagaatccaaaatattggagaacaaggtcatgtggctgtgttgggacatagtctgggagcttatattttgactctggacgaagagaagctgagaaaacttacaactaggatactttcagataccaccttatggctatgcagaattttcagatatgaaaatgggtgtgcttatttccacgaagaggaaagagaaggacttgcaaagatatgtaggcttgccattcattctcaatatgaagacttcgtagtggatggcttcagtgggttatataacaagaagcctgtcatatatcttagtgctgctgctagacctggcctgggccaatacctttgtaatcagctcggcttgcccttcccctgcttgtgccgtgtaccctgtaacactatgtttggatcccagcatcagatggatgttgccttcctggagaaactgattaaagatgatatagagcgaggaagactgcccctgttgcttgtcgcaaatgcaggaacggcagcagtaggacacacagacaagattgggagattgaaagaactctgtgagcagtatggcatatggcttcatgtggagggtgtgaatctggcaacattggctctgggttatgtctcctcatcagtgctggctgcagccaaatgtgatagcatgacgatgactcctggcccgtggctgggtttgccagctgttcctgcggtgacactgtataaacacgaccctgccttgactttagttgctggtcttatatcaaataagcccacagacaaactccgtgccctgcctctgtggttatctttacaatacttgggacttgatgggtttgtggagaggatcaagcatgcctgtcaactgagtcaatggttgcaggaaagtttgaagaaagtgaattacatcaaaatcttggtggaagatgagctcagctccccagtggtggtgttcagatttttccaagaattaccaggctcagatccagtgtttaaagccgtcccagtgcccaacatgacaccttcagcagtcggccgggagaggcactcgtgtgatgcgctgaatctctggctgggagaacagctgaagcagctggtgcctgcgagcggcctcacagtcatggatctggaagctgagggcacgtgtttgcggttcagccctttgatgaccgcagcaggtatgatctcgtgaaaccttgagagaaactgaatgaggaatgaaactattgttcctgtttcacacagaagaaaactgaggttggcactcatgatgagcccctgttctcattctgcaaatggtgaagctctctatcgtcctgaccccacagttcctgtcccatgaccagggcccgctcaccaaggagctgcagcagcacgtaaagtcagtgacatgcccatgcgagtacctgaggaaggtgaccttgaggaaccctgggagctcaggaaggaaggagcgcccagaagcagggacagggagctggttggggaggaccagaaatcaggtgcccaacagcccccttctcctcctttcccttcccttacttccccccttcccctccccttcccctccccctccccaactcagatctggccccggtcccatccccttccctcccccctgccctaagccacctccacctctgtcctggctgcctcagggcgccctgaaaggaccaggacatgcgggtgcggtggctgcgcttttggctcctcttctggctcctgctgggatttatcagccatcagcccacccctgttatcaatactctggctgaccatcgtcatcgtgagactgactttggtggaagtccttggataattatcattattgtgtttctgggacgttacaaatttaccattctcttctgcacaatttacctttgtgtgcctttcctgaagactatcttctggtctcgaaatggacatgatagatccagggatgtacagcagagagctaggaggtccaaccgccgtagacaggaaggaattaaaattggcctggaagacatctgtactttatggaaacaggcggaaacaaaagttcaagctaaaatccgtaagatgaaggtcacaaagaaagtcaaccatcattacaaaatcaatggaaagaggaagaccgccaaagaacagaaaatgtttcaacgtgcgcaagagttgcggtggcgggcagaggactaccacaaatgcaaaatcaccccctctgcaagaaagcctctttgcaactgggtaagtttgtttgttttccttgcttttggaagtctgccaggtcaggacatggatacatttttctccctacagctctgtgctcaagccctgcagagggagatggcagagaggaaggctgcctacaagcatcacagtcccatccctgttggtaaccgtgttgtgcaaaaacaccttcatccccacccagtggggcccctgatctaa

SEQ ID NO: 104035 - DNA, 1497 bp, Artificial Sequence
  derived and/or modified sequence
atggacgcctccctggagaaaatcgcagatccaaccctcgccgagatgggcaaaaatttaaaagaggccgtgaagatgctggaggactcacagcggaggactgaagaagagaacgggaagaagctgattagcggcgatattcctggacccctccagggcagcggacaggacatggttagtattctgcagctggtgcaaaacctgatgcatggggacgaggatgaagagccccagagtcccagaatccaaaacatcggggaacaggggcacatggctctgcttggtcattcactcggcgcttacatttccacattagacaaggaaaagctgcggaaattgacaacaagaatactcagcgacaccacgctttggttgtgcaggatctttcgctacgaaaacggatgtgcctacttccatgaggaggaaagagagggcctggctaagatctgccgtctggccatccactctcgatatgaagacttcgttgtggatgggttcaatgtgctttacaacaagaaaccagtaatttacctgagcgccgccgccagaccgggtctgggacagtatctgtgtaatcagctgggactgccattcccttgtctgtgtagggtcccttgcaatacggtgtttggaagccaacatcagatggacgtagccttcctggagaagctcattaaggacgacatagagagagggaggctcccactgctgcttgtggccaacgccgggactgcggccgtgggacacacagacaagatcggccgcctaaaagagctttgcgagcagtatgggatttggctgcatgtggagggcgtgaacctggccactctggctctgggatacgtttcatcatccgtgctagccgcggccaaatgtgatagcatgaccatgacgcccggcccatggctcggcctgcccgcagtacctgcagtaacattgtacaagcatgatgatcctgccctgacactggttgctggacttactagtaacaaaccaaccgataaactgagagctctccctttgtggctctctctgcagtatctgggcttggatggcttcgtggagcgaataaaacatgcctgtcagctttcccagcggctccaagaatccctcaaaaaggtgaactatatcaaaattcttgttgaggatgagctcagctcccccgtggtggtcttccgattcttccaggaactcccagggtccgatccagtttttaaggcagtgccggtgcctaacatgactccttccggagttggtcgcgagagacacagctgtgacgcactgaataggtggcttggcgaacagctgaaacagctcgtcccggcatcaggcctgacggtgatggacctcgaggcagagggaacttgcctgaggttctccccactcatgacagccgctggctggagtcactgcggaacaaccacacggtacgactgcgtcaggagccggttaacaacaagattgccgggttccaccggcgaacaagctcccccctag

SEQ ID NO: 104036 - DNA, 615 bp, Artificial Sequence
  derived and/or modified sequence
atgactatgacacctggcccctggctgggcttaccagcagtgccagccgtgaccctgtacaagcatgatgatcctgccttaactcttgtcgccggcctgactagcaataaaccaactgataaactgcgtgctctccccctgtggctgtcactacagtacctgggcctagatggtttcgtggagcgaatcaaacacgcctgtcaactgagccagagactgcaggaatctctgaagaaggtgaactacattaaaatcctggtggaggatgagctttcaagtccagtcgttgtgttcaggttctttcaagagcttccaggtagtgaccccgtcttcaaagctgtccctgtgcccaacatgactccgtccggtgttggccgtgagaggcattcgtgcgacgcactgaacaggtggctgggggagcagctaaagcagctcgttccagcaagtggtctcactgtcatggacctggaggccgaaggtacatgcctgagattcagcccattgatgacggcggccggctggtctcattgcggaaccactaccaggtatgattgcgttcggtccagactgactacaaggctgccaggctctacaggggaacaagcacccccatag

SEQ ID NO: 104037 - DNA, 1497 bp, Artificial Sequence
  derived and/or modified sequence
atggatgccagcctggagaagattgctgaccccaccctggccgagatgggcaagaacctgaaggaggccgtgaagatgctggaggacagccagaggagaacagaggaggagaatggcaagaagctgatcagcggggacatccctggccccctgcagggcagcggccaggacatggtgtccatcctgcagctggtgcagaacctgatgcatggagatgaagatgaggagccccagagcccccgcatccagaacattggagagcagggccacatggccctgctgggccacagcctgggcgcctacatcagcaccctggacaaggagaagctgaggaagctgaccacccgcatcctgagtgacaccaccctgtggctgtgccgcatcttccgctatgaaaatggctgtgcctacttccacgaggaggagcgggagggcctggccaagatctgccgcctggccatccacagccgctatgaagattttgtggtggatggcttcaacgtgctgtacaacaagaagcctgtgatctacctgtctgctgctgcccggcccggcctgggccagtacctgtgcaaccagctgggcctgcccttcccctgcctgtgccgggtgccctgcaacacagtgtttggcagccagcaccagatggatgtggccttcctggagaagctgatcaaggatgacatcgagcggggccgcctgcccctgctgctggtggccaatgccggcacagctgctgtgggccacacagacaagattggccgcctgaaggagctgtgtgagcagtatggcatctggctgcacgtggagggcgtgaacctggccaccctggccctgggctacgtgagcagctctgtgctggccgccgccaagtgtgacagcatgaccatgaccccaggcccctggctgggcctgcctgctgtgcctgctgtgaccctgtacaagcatgatgatcctgccctgaccctggtggccggcctgaccagcaacaagcccacagacaagctgcgggccctgcccctgtggctgagcctgcagtacctgggcctggatggctttgtggagcgcatcaagcacgcctgccagctgagccagaggctgcaggagagcctgaagaaggtgaactacatcaagatcctggtggaggatgagctgagcagccctgtggtggtgttccgcttcttccaggagctgcccggcagtgaccctgtgttcaaggctgtgcctgtgcccaacatgacccccagcggcgtgggccgggagcggcacagctgtgatgccctgaaccgctggctgggggagcagctgaagcagctggtgcctgccagcggcctgactgtgatggacctggaggccgagggcacctgcctgcgcttcagccccctgatgacagctgctggctggagccactgcggcaccaccaccaggtatgactgtgtgcgcagccggctgaccacccggctgcccggcagcactggagagcaggcccctccttag

SEQ ID NO: 104038 - DNA, 615 bp, Artificial Sequence
  derived and/or modified sequence
atgaccatgaccccaggcccctggctgggcctgcctgctgtgcctgctgtgaccctgtacaagcatgatgatcctgccctgaccctggtggccggcctgaccagcaacaagcccacagacaagctgcgggccctgcccctgtggctgagcctgcagtacctgggcctggatggctttgtggagcgcatcaagcacgcctgccagctgagccagaggctgcaggagagcctgaagaaggtgaactacatcaagatcctggtggaggatgagctgagcagccctgtggtggtgttccgcttcttccaggagctgcccggcagtgaccctgtgttcaaggctgtgcctgtgcccaacatgacccccagcggcgtgggccgggagcggcacagctgtgatgccctgaaccgctggctgggggagcagctgaagcagctggtgcctgccagcggcctgactgtgatggacctggaggccgagggcacctgcctgcgcttcagccccctgatgacagctgctggctggagccactgcggcaccaccaccaggtatgactgtgtgcgcagccggctgaccacccggctgcccggcagcactggagagcaggcccctccttag

SEQ ID NO: 104039 - DNA, 1497 bp, Artificial Sequence
  derived and/or modified sequence
atggacgccagcctggagaagatcgccgaccccaccctggccgagatgggaaaaaacctaaaggaagcagtgaaaatgcttgaagattctcagagacggaccgaagaagagaatgggaagaaactaatttccggagatattccaggcccactgcagggaagcggccaggacatggtcagcatactgcagctggtgcagaatctgatgcacggtgacgaggatgaagagccacaatcaccccgcattcagaatatcggggagcaggggcacatggcccttctggggcactcattaggcgcctatatctcaactctcgataaagaaaaattgcgcaagctgaccacaagaattctttccgacactaccctctggttgtgtaggatttttcggtatgaaaatgggtgtgcctatttccatgaggaggaacgcgaagggctggcaaaaatctgccgattggcaatccacagtcggtatgaggatttcgtcgtggatgggttcaatgtgttgtacaacaagaagcccgtgatttacttgtccgccgccgccaggccagggttgggccagtacctatgtaaccagctcggtctgccctttccttgcctctgtcgggttccctgtaatacggtgttcggaagccagcatcagatggatgtggcgttcttagagaagctgataaaggacgacattgagcgaggcaggctgcccctgctgttggtagccaacgctggcaccgctgccgtagggcacacggataagatcgggcgcctcaaggagctctgtgagcagtatggtatttggcttcatgtcgaaggcgtcaatctggccacacttgctctgggatatgtcagtagctctgtgctggctgctgccaagtgcgactctatgacaatgaccccgggtccatggctgggtctccccgcggttccagcggtaacactatataagcacgacgatcccgccctgactctggtggcaggcctgacaagcaataagcctaccgataagttgagggcattaccactttggttgagtctccagtacctgggactcgacggttttgttgaacggattaagcatgcatgtcaactgagtcagagattacaggagtcactcaaaaaagtgaattacatcaagatactggtggaggatgagctcagctcaccggtggtggtgtttcgcttctttcaggaacttcccgggagtgaccctgtatttaaagccgtcccagtcccaaatatgactccatctggcgtcggacgcgagcgtcactcctgcgacgccctgaatcgttggttgggagagcagctgaaacagttggttccagcatcagggttgacagtgatggatctcgaagcagaaggcacatgtctgcgcttctctcccctgatgacggctgccggctggtcccactgcggcacaactacccgctacgactgcgtccgctctcgattaacgacccgtttgcccggctctaccggggagcaggcgccgccctag

SEQ ID NO: 104040 - DNA, 615 bp, Artificial Sequence
  derived and/or modified sequence
atgaccatgacccccggcccctggctgggcctgcccgccgtgcccgcagttaccctttacaagcacgacgacccagccctgacattagtggccggcctaacctcgaataagcccacagataagctacgagcactgcccctttggctgtctctacagtatctggggctggatgggtttgtggaacggatcaaacatgcgtgccagctgtcccagcgacttcaagagtcgctgaagaaggtaaattatattaagatcctagtggaggatgagctgtcaagtccagtcgtcgtgttcaggttctttcaggagctgcccgggagcgatcctgtgtttaaagcagtacctgtgccaaatatgacacctagtggtgtgggccgggagaggcatagttgtgatgccctgaatcggtggttaggcgaacagctcaagcagctcgtgccagcatcaggtctgacggtcatggatctagaagccgagggcacttgtctgaggttcagccccctgatgactgccgccggatggtctcactgtgggacaacaacacgctatgattgtgtgcgcagtcgtctgaccacccgcctgccaggctctacgggtgaacaggccccaccatag

SEQ ID NO: 104041 - DNA, 1497 bp, Artificial Sequence
  derived and/or modified sequence
atggacgccagtctcgagaaaattgccgatccgaccttggctgaaatggggaaaaacctgaaggaggcagttaagatgttagaagactctcaacggaggacagaagaagaaaatggaaaaaaactgatttccggagacatacccggacctctgcaggggagcgggcaggacatggtttccattctccagttggttcagaacttaatgcacggtgatgaggatgaagaaccccagtctcccaggatccagaacatcggagaacaggggcacatggccctgctgggtcattccctgggagcatacatcagtacgctggacaaagaaaagttgagaaagcttacaacaaggattctttctgacacaactctgtggctatgcaggatctttcgctacgaaaacggatgtgcttacttccatgaggaagaacgggaaggcctggctaaaatctgcagactggccatccactcccgctacgaggatttcgtggttgatggcttcaatgtcttgtacaacaagaagccggtaatctatctgtccgcagccgctcgccctggacttggccaatatctttgtaatcagttgggcctgccattcccctgcttgtgtcgggtcccttgtaacaccgttttcggtagccagcaccagatggacgtcgcctttctggaaaaactgattaaagacgatattgaacgcggtcggctgccactgttactggttgccaatgcaggcacagctgccgtgggccacacggataagattgggagattgaaggaactgtgcgagcagtatgggatctggctgcatgtcgaaggtgtcaatctggctacccttgcgctgggatacgtgtcttcctccgttcttgccgctgccaagtgcgattcgatgaccatgacacctggcccatggctcgggctgccggcagttcctgcagtgactttgtacaagcatgacgatccagccctcactctggtggctggtctgacctccaataaaccaaccgacaagcttcgtgctttaccactgtggctgtctctgcagtatctgggattagacgggttcgtggaacggataaagcatgcatgccagctgagccagcggctgcaggaaagtctgaaaaaagttaattacatcaagatcctggtcgaagacgagctgtcctccccggtcgtggtgtttagattttttcaggagctgcccggaagcgacccagtgtttaaggctgttccagtccccaacatgacgccttccggagtgggtagggagcgtcacagttgtgacgccctgaaccgatggttgggcgaacaactgaagcagctggtgccggcatcgggacttacagtgatggacctggaggcagagggcacgtgcttacggttttcaccgttgatgaccgctgctggttggtctcattgtggaacaaccactaggtatgattgtgttaggtcacgcctgactacacgactgccagggagtactggcgagcaggctccaccatag

SEQ ID NO: 104042 - DNA, 615 bp, Artificial Sequence
  derived and/or modified sequence
atgacaatgacccccggaccttggctgggcctgcccgctgtgcctgcagttacattgtataaacacgatgaccccgctctcacactcgtggcagggcttaccagtaataagcccacagataagcttagggcgctccccctgtggctctcgcttcagtacctcggcctcgacgggttcgtcgaacggattaaacacgcatgccagttgagccagaggctgcaggagtccctgaagaaagttaattatattaagattctggtcgaggacgagctgagttcgccagtggtggtgttcaggtttttccaagagttgcccggaagtgatcccgtgttcaaggctgtccctgtgcccaacatgactcctagtggcgtaggcagagaacggcactcgtgtgatgccctcaatcggtggctgggagagcagttgaaacaactggtgcctgcttctggattaactgtgatggacctggaggcggagggaacctgtttgcggtttagtcctctgatgactgcggcaggctggtcccactgtggcacaacaacccgatacgactgcgttagatccaggctcacaactcggttacctggaagcaccggcgagcaagctccaccttag

SEQ ID NO: 104043 - DNA, 2047 bp, Artificial Sequence
  derived and/or modified sequence
ccccgccccgccgcctctcaaccatcaggttcggcagcccgcggcgccgcctggcagctcctcctcttctccgccccgccggccgcgggcgcgggggacgtcagcgctgccagcgtggaaggagctgcggggcgcgggaggaggaagtagagcccgggaccgccaggccaccaccggccgcctcagccatggacgcgtccctggagaagatagcagaccccacgttagctgaaatgggaaaaaacttgaaggaggcagtgaagatgctggaggacagtcagagaagaacagaagaggaaaatggaaagaagctcatatccggagatattccaggcccactccagggcagtgggcaagatatggtgagcatcctccagttagttcagaatctcatgcatggagatgaagatgaggagccccagagccccagaatccaaaatattggagaacaaggtcatatggctttgttgggacatagtctgggagcttatatttcaactctggacaaagagaagctgagaaaacttacaactaggatactttcagataccaccttatggctatgcagaattttcagatatgaaaatgggtgtgcttatttccacgaagaggaaagagaaggacttgcaaagatatgtaggcttgccattcattctcgatatgaagacttcgtagtggatggcttcaatgtgttatataacaagaagcctgtcatatatcttagtgctgctgctagacctggcctgggccaatacctttgtaatcagctcggcttgcccttcccctgcttgtgccgtgtaccctgtaacactgtgtttggatcccagcatcagatggatgttgccttcctggagaaactgattaaagatgatatagagcgaggaagactgcccctgttgcttgtcgcaaatgcaggaacggcagcagtaggacacacagacaagattgggagattgaaagaactctgtgagcagtatggcatatggcttcatgtggagggtgtgaatctggcaacattggctctgggttatgtctcctcatcagtgctggctgcagccaaatgtgatagcatgacgatgactcctggcccgtggctgggtttgccagctgttcctgcggtgacactgtataaacacgatgaccctgccttgactttagttgctggtcttacatcaaataagcccacagacaaactccgtgccctgcctctgtggttatctttacaatacttgggacttgatgggtttgtggagaggatcaagcatgcctgtcaactgagtcaacggttgcaggaaagtttgaagaaagtgaattacatcaaaatcttggtggaagatgagctcagctccccagtggtggtgttcagatttttccaggaattaccaggctcagatccggtgtttaaagccgtcccagtgcccaacatgacaccttcaggagtcggccgggagaggcactcgtgtgacgcgctgaatcgctggctgggagaacagctgaagcagctggtgcctgcaagcggcctcacagtcatggatctggaagctgagggcacgtgtttgcggttcagccctttgatgaccgcagcagggtggtcccactgtgggaccacaaccaggtatgactgtgtgagaagcaggctcactaccaggctaccagggagcacaggggagcaggcgccaccttgaggcataaacccagagaaacaagacctccaagacggccaggcactggggcacacgccggtaacacagcaccgtgggagctgagacggaaggatcgcctgagcccaggattttgaaaccaccctgggcaacacagtgagaccccgtatctacaaaaaaatacacattagccaggcatggcggcatgcgcctggggtcccaagtactcgggaggtagaggagagaaaaatcacttgagcccagagaggtcaaggctacagggagctgagatcgcatcactgtactccagctggggtgaaacggcgagactctacctcaaaaataaataaatacatacataattaataaataaaacatcaaagacc

SEQ ID NO: 104044 - DNA, 1819 bp, Artificial Sequence
  derived and/or modified sequence
gaggaagtagagcccgggaccgccaggccaccaccggccgcctcagccatggacgcgtccctggagaagatagcagaccccacgttagctgaaatgggaaaaaacttgaaggaggcagtgaagatgctggaggacagtcagagaagaacagaagaggaaaatggaaagaagctcatatccggagatattccaggcccactccagggcagtgggcaagatatggtgagcatcctccagttagttcagaatctcatgcatggagatgaagatgaggagccccagagccccaggtaatgaacctggcagcttctcttttcaagtaatccaaaatattggagaacaaggtcatatggctttgttgggacatagtctgggagcttatatttcaactctggacaaagagaagctgagaaaacttacaactaggatactttcagataccaccttatggctatgcagaattttcagatatgaaaatgggtgtgcttatttccacgaagaggaaagagaaggacttgcaaagatatgtaggcttgccattcattctcgatatgaagacttcgtagtggatggcttcaatgtgttatataacaagaagcctgtcatatatcttagtgctgctgctagacctggcctgggccaatacctttgtaatcagctcggcttgcccttcccctgcttgtgccgtgtaccctgtaacactgtgtttggatcccagcagtaggacacacagacaagattgggagattgaaagaactctgtgagcagtatggcatatggcttcatgtggagggtgtgaatctggcaacattggctctgggttatgtctcctcatcagtgctggctgcagccaaatgtgatagcatgacgatgactcctggcccgtggctgggtttgccagctgttcctgcggtgacactgtataaacacgatgaccctgccttgactttagttgctggtcttacatcaaataagcccacagacaaactccgtgccctgcctctgtggttatctttacaatacttgggacttgatgggtttgtggagaggatcaagcatgcctgtcaactgagtcaacggttgcaggaaagtttgaagaaagtgaattacatcaaaatcttggtggaagatgagctcagctccccagtggtggtgttcagatttttccaggaattaccaggctcagatccggtgtttaaagccgtcccagtgcccaacatgacaccttcaggagtcggccgggagaggcactcgtgtgacgcgctgaatcgctggctgggagaacagctgaagcagctggtgcctgcaagcggcctcacagtcatggatctggaagctgagggcacgtgtttgcggttcagccctttgatgaccgcagcagggtggtcccactgtgggaccacaaccaggtatgactgtgtgagaagcaggctcactaccaggctaccagggagcacaggggagcaggcgccaccttgaggcataaacccagagaaacaagacctccaagacggccaggcactggggcacacgccggtaacacagcaccgtgggagctgagacggaaggatcgcctgagcccaggattttgaaaccaccctgggcaacacagtgagaccccgtatctacaaaaaaatacacattagccaggcatggcggcatgcgcctggggtcccaagtactcgggaggtagaggagagaaaaatcacttgagcccagagaggtcaaggctacagggagctgagatcgcatcactgtactccagctggggtgaaacggcgagactctacctcaaaaataaataaatacatacataatt

SEQ ID NO: 104045 - DNA, 1497 bp, Artificial Sequence
  derived and/or modified sequence
atggacgccagcctggagaagatcgccgaccccaccctggccgagatgggcaagaacctgaaggaggccgtgaagatgctggaggacagccagagaagaaccgaggaggagaacggcaagaagctgatcagcggcgacatccccggccccctgcagggcagcggccaggacatggtgagcatcctgcagctggtgcagaacctgatgcacggcgacgaggacgaggagccccagagccccagaatccagaacatcggcgagcagggccacatggccctgctgggccacagcctgggcgcctacatcagcaccctggacaaggagaagctgagaaagctgaccaccagaatcctgagcgacaccaccctgtggctgtgcagaatcttcagatacgagaacggctgcgcctacttccacgaggaggagagagagggcctggccaagatctgcagactggccatccacagcagatacgaggacttcgtggtggacggcttcaacgtgctgtacaacaagaagcccgtgatctacctgagcgccgccgccagacccggcctgggccagtacctgtgcaaccagctgggcctgcccttcccctgcctgtgcagagtgccctgcaacaccgtgttcggcagccagcaccagatggacgtggccttcctggagaagctgatcaaggacgacatcgagagaggcagactgcccctgctgctggtggccaacgccggcaccgccgccgtgggccacaccgacaagatcggcagactgaaggagctgtgcgagcagtacggcatctggctgcacgtggagggcgtgaacctggccaccctggccctgggctacgtgagcagcagcgtgctggccgccgccaagtgcgacagcatgaccatgacccccggcccctggctgggcctgcccgccgtgcccgccgtgaccctgtacaagcacgacgaccccgccctgaccctggtggccggcctgaccagcaacaagcccaccgacaagctgagagccctgcccctgtggctgagcctgcagtacctgggcctggacggcttcgtggagagaatcaagcacgcctgccagctgagccagagactgcaggagagcctgaagaaggtgaactacatcaagatcctggtggaggacgagctgagcagccccgtggtggtgttcagattcttccaggagctgcccggcagcgaccccgtgttcaaggccgtgcccgtgcccaacatgacccccagcggcgtgggcagagagagacacagctgcgacgccctgaacagatggctgggcgagcagctgaagcagctggtgcccgccagcggcctgaccgtgatggacctggaggccgagggcacctgcctgagattcagccccctgatgaccgccgccggctggagccactgcggcaccaccaccagatacgactgcgtgagaagcagactgaccaccagactgcccggcagcaccggcgagcaggcccccccctag

SEQ ID NO: 104046 - DNA, 615 bp, Artificial Sequence
  derived and/or modified sequence
atgaccatgacccccggcccctggctgggcctgcccgccgtgcccgccgtgaccctgtacaagcacgacgaccccgccctgaccctggtggccggcctgaccagcaacaagcccaccgacaagctgagagccctgcccctgtggctgagcctgcagtacctgggcctggacggcttcgtggagagaatcaagcacgcctgccagctgagccagagactgcaggagagcctgaagaaggtgaactacatcaagatcctggtggaggacgagctgagcagccccgtggtggtgttcagattcttccaggagctgcccggcagcgaccccgtgttcaaggccgtgcccgtgcccaacatgacccccagcggcgtgggcagagagagacacagctgcgacgccctgaacagatggctgggcgagcagctgaagcagctggtgcccgccagcggcctgaccgtgatggacctggaggccgagggcacctgcctgagattcagccccctgatgaccgccgccggctggagccactgcggcaccaccaccagatacgactgcgtgagaagcagactgaccaccagactgcccggcagcaccggcgagcaggcccccccctag

SEQ ID NO: 104047 - protein, 429 aa, Artificial Sequence
  derived and/or modified sequence
LSSTLRRIADPTLAEMGKNLKEAVKMLEDSQRRTEEENGKKLISGDIPGPLQGSGQDMVSILQLVQNLMHGDEDEEPQSPRIQNIGEQGHMALLGHSLGAYISTLDKEKLRKLTTRILSDTTLWLCRIFRYENGCAYFHEEEREGLAKICRLAIHSRYEDFVVDGFNVLYNKKPVIYLSAAARPGLGQYLCNQDVAFLEKLIKDDIERGRLPLLLVANAGTAAVGHTDKIGRLKELCEQYGIWLHVEGVNLATLALGYVSSSVLAAAKCDSMTMTPGPWLGLPAVPAVTLYKHDDPALTLVAGLTSNKPTDKLRALPLWLSLQYLGLDGFVERIKHACQLSQRLQESLKKVNYIKILVEDELSSPVVVFRFFQELPGSDPVFKAVPVPNMTPSGVGRERHSCDALNRWVRMAVTPLSFQVPVHHHPTCW

SEQ ID NO: 104048 - DNA, 1290 bp, Artificial Sequence
  derived and/or modified sequence
ctgtcctccacactgagacggatagcggatcccaccctagcagaaatggggaaaaacctgaaggaggctgtcaagatgctggaagactcgcagcggcgcactgaagaagagaacggcaagaagctcattagcggagatattccaggccctctgcaggggagcggtcaagacatggtcagtatcctgcaactcgtgcagaacctaatgcacggcgatgaggacgaggagcctcagagtccacggattcagaacattggcgagcaggggcatatggctctgctcggccacagcctcggagcttatataagcactctggataaggaaaagctaagaaagctcacaacacgtattctctcagacactacactctggctctgtcgaatctttaggtatgagaacggttgtgcatactttcatgaagaagagagggaaggcctcgccaaaatctgtcgcctggccatccacagtcgatacgaggactttgttgtggatggatttaacgtgctttataacaaaaaacccgtcatttatctgtctgctgcggcccgcccgggcctcggccagtatctgtgtaaccaggacgtggctttcttagagaagctgatcaaagacgatatcgagcggggccggctgcctctactcctggtcgctaatgcaggtaccgccgctgtcggccatactgataaaatcggtagattgaaggagttgtgcgaacaatacggaatttggctccatgtcgagggggtgaatcttgcaaccctcgcactggggtacgtgtccagcagcgtgctcgccgcggccaagtgcgatagcatgactatgactccgggcccatggctgggcctgccagctgtccctgctgtgactctgtacaagcacgacgacccagccttaaccctggtcgccgggcttacctctaataaacccactgataaacttagggcgttgccactctggctctcactccagtatcttggactggatggattcgttgaacgcatcaagcatgcctgccagctcagccagcgtcttcaggaaagcctgaaaaaggtcaattatatcaagatcttagtcgaggatgaattgagctctccggtggttgtttttcgattcttccaggagctacctggctccgatccggtttttaaagctgtgcctgtacccaacatgacaccctccggagtgggacgggaacgacactcctgcgatgccctgaacagatgggtaaggatggccgtgactcccctaagctttcaggtcccagtgcaccaccaccctacatgttggtag

SEQ ID NO: 104049 - DNA, 1290 bp, Artificial Sequence
  derived and/or modified sequence
ctgagcagcaccctgcggagaattgctgaccccaccctggccgagatgggcaagaacctgaaggaggccgtgaagatgctggaggacagccagaggagaacagaggaggagaatggcaagaagctgatcagcggggacatccctggccccctgcagggcagcggccaggacatggtgtccatcctgcagctggtgcagaacctgatgcatggagatgaagatgaggagccccagagcccccgcatccagaacattggagagcagggccacatggccctgctgggccacagcctgggcgcctacatcagcaccctggacaaggagaagctgaggaagctgaccacccgcatcctgagtgacaccaccctgtggctgtgccgcatcttccgctatgaaaatggctgtgcctacttccacgaggaggagcgggagggcctggccaagatctgccgcctggccatccacagccgctatgaagattttgtggtggatggcttcaacgtgctgtacaacaagaagcctgtgatctacctgtctgctgctgcccggcccggcctgggccagtacctgtgcaaccaggatgtggccttcctggagaagctgatcaaggatgacatcgagcggggccgcctgcccctgctgctggtggccaatgccggcacagctgctgtgggccacacagacaagattggccgcctgaaggagctgtgtgagcagtatggcatctggctgcacgtggagggcgtgaacctggccaccctggccctgggctacgtgagcagctctgtgctggccgccgccaagtgtgacagcatgaccatgaccccaggcccctggctgggcctgcctgctgtgcctgctgtgaccctgtacaagcatgatgatcctgccctgaccctggtggccggcctgaccagcaacaagcccacagacaagctgcgggccctgcccctgtggctgagcctgcagtacctgggcctggatggctttgtggagcgcatcaagcacgcctgccagctgagccagaggctgcaggagagcctgaagaaggtgaactacatcaagatcctggtggaggatgagctgagcagccctgtggtggtgttccgcttcttccaggagctgcccggcagtgaccccgtcttcaaggctgtgcctgtgcccaacatgaccccatctggagtgggccgggagcggcacagctgtgatgccctgaaccgctgggtgaggatggctgtgacccccctgtccttccaggtgcctgtgcaccaccaccccacctgctggtag

SEQ ID NO: 104050 - DNA, 1290 bp, Artificial Sequence
  derived and/or modified sequence
ctgagcagcaccctgcggcggatcgccgaccccaccctggccgagatgggcaagaacctaaaagaggctgttaagatgctcgaggactcgcagagaaggactgaagaagagaatggaaagaagctgattagtggagatattcccggacccttgcagggttcaggacaggatatggtcagtatattgcagctcgtccaaaatctgatgcatggagacgaagatgaggagccccagtcaccacgtatccagaatattggcgagcaagggcacatggccctgctgggacattccctcggagcctacatctcaacgcttgataaagagaaacttcgaaagttgactacccggatactgagtgatacaaccctctggttgtgccgaattttccggtacgagaatgggtgtgcctatttccacgaagaagagcgcgaaggcctggccaagatttgccggttggctatacacagccgatatgaagattttgtggttgacgggtttaatgttctgtacaataagaagcctgtgatttacttaagcgccgccgcgcggcccgggttaggccagtacctgtgtaatcaggatgtagcgtttcttgagaagttgataaaggacgatattgagcgaggacggctgccactcctgctggttgccaatgccggtacagctgccgtaggtcacaccgataaaattggacgcctgaaggaactgtgcgagcaatacgggatttggcttcatgtggagggagtaaacctagcgacactcgcactgggctacgtctcctcatccgtgctggccgccgcgaagtgtgactcgatgactatgaccccgggtccttggctgggtctgcctgctgtgccagctgttacgctgtacaagcatgacgaccctgccctaactctggtggctggtctgacttccaacaagccgaccgacaagttgcgggctttacccctgtggctgtcactgcagtacctcggactggacgggtttgtagagaggatcaaacatgcctgtcagctgagccagaggctgcaggagtctcttaaaaaggtgaattacataaaaattttggtggaggacgagctatctagcccagtggttgttttcaggttcttccaggagcttcccggatctgaccccgtgtttaaagccgtgcccgtgccaaatatgactccatccggcgttggacgggaaagacattcctgcgacgccctgaaccggtgggtgaggatggcagtgactccgcttagttttcaggtgcctgtgcaccaccacccaacgtgctggtag

SEQ ID NO: 104051 - DNA, 1290 bp, Artificial Sequence
  derived and/or modified sequence
ctctccagcaccctgagacggattgctgacccaacactggcagaaatggggaagaacttgaaagaggccgtcaagatgctggaagacagtcaacggaggacagaggaggagaatggaaagaaactgatctccggcgatatacccggtcctctgcaggggtctggacaagatatggtttctattctacagctggttcagaatctgatgcacggtgatgaggacgaagagccgcagtcaccgaggattcagaatataggggagcagggtcacatggctctcctgggacactcactcggggcttacatcagcacactggacaaagaaaaacttcggaaattgaccaccagaatactttcggataccaccttgtggctctgtcgcatttttcgctacgaaaatgggtgtgcctattttcatgaagaggagcgcgagggcctggccaaaatctgccggctggcaatccacagccgatacgaggactttgtagtagatggctttaacgtgttatacaataagaaacccgtgatttatctaagtgctgcagcaagacctgggctcggacaatacttgtgcaaccaggatgtggctttcctggagaaactgatcaaggatgatattgagcggggaagactcccactgctcttggtcgctaacgccggaacagccgctgtgggacatacagacaagataggcagattgaaagagttgtgcgagcagtacggtatttggctgcacgtcgagggcgtgaatctagctacactcgctttgggatacgtcagcagttccgtgctggcagctgcgaagtgtgactcaatgaccatgactccaggcccttggctcggcttgcccgcagtcccggcagtcacactttataaacatgacgaccccgctctcacactggtcgccggactcaccagcaataaacccactgacaaactgcgcgcactgcccctctggctgagtctgcagtacttaggcctcgatggttttgtggagaggattaaacatgcttgtcagctaagtcaaagactgcaggaaagcttaaaaaaagttaattacataaagattctggtggaggacgagctgagtagtcccgttgtcgtgttcaggttcttccaggaacttccaggatcagatcctgtgttcaaggcagtgcccgtgcccaacatgaccccaagcggtgtggggagggaacggcattcgtgtgacgcactcaaccgctgggtgcgcatggcagttacaccgttgagcttccaggtcccagttcatcaccatcccacctgttggtag

SEQ ID NO: 104052 - DNA, 2058 bp, Artificial Sequence
  derived and/or modified sequence
ttaagcagcacacttagaagaatagcagaccccacgttagctgaaatgggaaaaaacttgaaggaggcagtgaagatgctggaggacagtcagagaagaacagaagaggaaaatggaaagaagctcatatccggagatattccaggcccactccagggcagtgggcaagatatggtgagcatcctccagttagttcagaatctcatgcatggagatgaagatgaggagccccagagccccagaatccaaaatattggagaacaaggtcatatggctttgttgggacatagtctgggagcttatatttcaactctggacaaagagaagctgagaaaacttacaactaggatactttcagataccaccttatggctatgcagaattttcagatatgaaaatgggtgtgcttatttccacgaagaggaaagagaaggacttgcaaagatatgtaggcttgccattcattctcgatatgaagacttcgtagtggatggcttcaatgtgttatataacaagaagcctgtcatatatcttagtgctgctgctagacctggcctgggccaatacctttgtaatcaggatgttgccttcctggagaaactgattaaagatgatatagagcgaggaagactgcccctgttgcttgtcgcaaatgcaggaacggcagcagtaggacacacagacaagattgggagattgaaagaactctgtgagcagtatggcatatggcttcatgtggagggtgtgaatctggcaacattggctctgggttatgtctcctcatcagtgctggctgcagccaaatgtgatagcatgacgatgactcctggcccgtggctgggtttgccagctgttcctgcggtgacactgtataaacacgatgaccctgccttgactttagttgctggtcttacatcaaataagcccacagacaaactccgtgccctgcctctgtggttatctttacaatacttgggacttgatgggtttgtggagaggatcaagcatgcctgtcaactgagtcaacggttgcaggaaagtttgaagaaagtgaattacatcaaaatcttggtggaagatgagctcagctccccagtggtggtgttcagatttttccaggaattaccaggctcagatccggtgtttaaagccgtcccagtgcccaacatgacaccttcaggagtcggccgggagaggcactcgtgtgacgcgctgaatcgctgggtgagaatggcagtcacccccctttcctttcaggtccccgtccatcaccatccgacctgctggtgagggtgacgcgtgctcgtgtatgggaactgaggcccacaggaggagccgccctgccagtgctgggcctgctctggagttctgttccccattgcgttaccacctcacgagctgggtcacctctggcaagtccttctggcattgctccctcactttccttgctgctgtataaggctgtgagacaacaggcaaaaggtgggctgcagggcagctgcggtgggttctggtgagcctgggcagcacagccgggagccccaggcagagtctgccgagcatctgcagctggcagtgtggagccaggcctgcactttgatagcgttttgggcactgaatagcagctctaggatttgagtctgaagggtcttgtgaacagtgtgggatggcggcagcagcagttctagccaatgctggacacgcccagcctagcagggttggcagataagtcctggtacatccatgctggggctcagcacagctgtgagagaccacagagctgagtgtctcaagcagaaaggaactggtcataaacgaaatgaatcaatgcaggttactaagcagtgtcaagtagcatgttttatgacaacaactacaactccctgcccgccactaggagaaaagacgctgggggcagaccacatgtcagcagtgggtgtcgcttagtaatatattgtgggtcattgttattttcttctttttgtttacttgtatttcctaaatttttctacaatgaacttgtattaataagaaaaaaccataaaatttactgttttt

SEQ ID NO: 104053 - DNA, 1290 bp, Artificial Sequence
  derived and/or modified sequence
ctgagcagcaccctgagaagaatcgccgaccccaccctggccgagatgggcaagaacctgaaggaggccgtgaagatgctggaggacagccagagaagaaccgaggaggagaacggcaagaagctgatcagcggcgacatccccggccccctgcagggcagcggccaggacatggtgagcatcctgcagctggtgcagaacctgatgcacggcgacgaggacgaggagccccagagccccagaatccagaacatcggcgagcagggccacatggccctgctgggccacagcctgggcgcctacatcagcaccctggacaaggagaagctgagaaagctgaccaccagaatcctgagcgacaccaccctgtggctgtgcagaatcttcagatacgagaacggctgcgcctacttccacgaggaggagagagagggcctggccaagatctgcagactggccatccacagcagatacgaggacttcgtggtggacggcttcaacgtgctgtacaacaagaagcccgtgatctacctgagcgccgccgccagacccggcctgggccagtacctgtgcaaccaggacgtggccttcctggagaagctgatcaaggacgacatcgagagaggcagactgcccctgctgctggtggccaacgccggcaccgccgccgtgggccacaccgacaagatcggcagactgaaggagctgtgcgagcagtacggcatctggctgcacgtggagggcgtgaacctggccaccctggccctgggctacgtgagcagcagcgtgctggccgccgccaagtgcgacagcatgaccatgacccccggcccctggctgggcctgcccgccgtgcccgccgtgaccctgtacaagcacgacgaccccgccctgaccctggtggccggcctgaccagcaacaagcccaccgacaagctgagagccctgcccctgtggctgagcctgcagtacctgggcctggacggcttcgtggagagaatcaagcacgcctgccagctgagccagagactgcaggagagcctgaagaaggtgaactacatcaagatcctggtggaggacgagctgagcagccccgtggtggtgttcagattcttccaggagctgcccggcagcgaccccgtgttcaaggccgtgcccgtgcccaacatgacccccagcggcgtgggcagagagagacacagctgcgacgccctgaacagatgggtgagaatggccgtgacccccctgagcttccaggtgcccgtgcaccaccaccccacctgctggtag

SEQ ID NO: 104054 - protein, 1071 aa, Artificial Sequence
  derived and/or modified sequence
MHSLPGVVAVGYINEAIDEGNPLRTLETLLLPTANISDVDPAHAQHYQDVLYHAKSQKLGDSESVSKVLWLDEIQQAVDDANVDKDRAKQWVTLVVDVNQCLEGKKSSDILSVLKSSTSNANDIIPECADKYYDALVKAKELKSERVSSDGSWLKLNLHKKYDYYYNTDSKESSWVTPESCLYKESWLTGKEIEAFWKGYKQRKEYMHRRQTFIDNTDSIVKIQSWFRMATARKSYLSRLQYFRDHNNEIVKIQSLLRANKARDDYKTLVGSENPPLTVIRKFVYLLDQSDLDFQEELEVARLREEVVTKIRANQQLEKDLNLMDIKIGLLVKNRITLEDVISHSKKLNKKKGGEMEILNNTDNQGIKSLSKERRKTLETYQQLFYLLQTNPLYLAKLIFQMPQNKSTKFMDTVIFTLYNYASNQREEYLLLKLFKTALEEEIKSKVDQVQDIVTGNPTVIKMVVSFNRGARGQNTLRQLLAPVVKEIIDDKSLIINTNPVEVYKAWVNQLETQTGEASKLPYDVTTEQALTYPEVKNKLEASIENLRRVTDKVLNSIISSLDLLPYGLRYIAKVLKNSIHEKFPDATEDELLKIVGNLLYYRYMNPAIVAPDGFDIIDMTAGGQINSDQRRNLGSVAKVLQHAASNKLFEGENEHLSSMNNYLSETYQEFRKYFKEACNVPEPEEKFNMDKYTDLVTVSKPVIYISIEEIISTHSLLLEHQDAIAPEKNDLLSELLGSLGEVPTVESFLGEGAVDPNDPNKANTLSQLSKTEISLVLTSKYDIEDGEAIDSRSLMIKTKKLIIDVIRNQPGNTLTEILETPATAQQEVDHATDMVSRAMIDSRTPEEMKHSQSMIEDAQLPLEQKKRKIQRNLRTLEQTGHVSSENKYQDILNEIAKDIRNQRIYRKLRKAELAKLQQTLNALNKKAAFYEEQINYYDTYIKTCLDNLKRKNTRRSIKLDGKGEPKGAKRAKPVKYTAAKLHEKGVLLDIDDLQTNQFKNVTFDIIATEDVGIFDVRSKFLGVEMEKVQLNIQDLLQMQYEGVAVMKMFDKVKVNVNLLIYLLNKKFYGK

SEQ ID NO: 104055 - DNA, 3216 bp, Artificial Sequence
  derived and/or modified sequence
atgcacagcctaccaggagtcgttgcagtgggatacatcaatgaagccattgatgaaggaaaccctcttcggactctggagactcttttacttccaaccgcgaatatcagtgacgtagacccagcccacgcccagcactaccaagacgtgctctatcacgccaagtcacagaaactgggggactcggagagcgtttctaaggtgttgtggttggatgagattcagcaagctgtggacgatgcaaacgtggacaaggaccgtgccaaacagtgggtcacgctggtggtggatgtgaaccaatgtttagagggcaagaagtccagcgatatcttaagcgttctaaagtcaagtacaagcaatgctaatgacataattccagagtgcgctgacaagtactatgacgctctcgttaaggccaaagagctcaaaagtgaacgagtgagctcagatggtagttggctgaaactcaatctgcacaagaaatatgactactattacaacaccgactccaaagagtccagttgggtgaccccggaatcatgcctgtacaaggagtcttggctaactgggaaagaaattgaggccttctggaaagggtacaagcaacgcaaggagtatatgcacaggcgccagacattcattgataacacggactccattgtcaagatccagtcgtggttcagaatggctacagccaggaagtcatatctctcgcggctacaatatttccgcgatcataataatgaaattgtcaagatccagagcctcctgcgcgctaataaggcacgagatgattataagaccctcgtcggcagcgaaaacccaccgctgacggtaatccgaaagtttgtgtatctcttagaccagtctgatctggactttcaagaggagctggaagtcgctaggcttcgggaggaggtcgtgactaagataagggcaaatcagcagctcgaaaaagacctcaacctaatggacattaagataggcctgctggttaaaaatcgaatcaccctcgaggacgttatctctcacagcaagaaattgaacaagaagaaaggtggagagatggaaatcctcaacaatacggataatcaggggattaaaagtttgagcaaggaacggagaaaaacactggaaacctatcagcaactcttctacctgctccagacaaatcccctgtaccttgcaaaactcattttccagatgccacaaaataagtcaacgaaattcatggacacagtcatctttaccctgtataattacgcctcaaaccagcgcgaggaatatctgctattaaaactctttaagacggctcttgaagaggagatcaaatccaaggtcgaccaggttcaggacatcgtgaccggtaacccaaccgttatcaagatggtggtgtcattcaatcggggcgcccgtgggcaaaatactctgcgccaattactggcacctgtggtcaaggaaattatcgatgataaatctctgattatcaataccaatcctgtcgaggtttacaaggcctgggtgaaccagctcgagacccagactggggaagcctcaaaactgccgtacgatgtgaccactgagcaggccctgacctatccagaggtgaagaacaaacttgaggcatcgattgaaaacctgcgaagagtcacggacaaggtcctgaactcaatcatctcgtcacttgacctcctaccgtacggcctccggtacattgctaaagtcctgaagaatagcatacacgagaagtttccagacgccaccgaggatgagctgttgaagattgtgggaaacctgctgtattatcggtacatgaaccctgccattgtggccccggacggtttcgatattatcgacatgactgcggggggccaaatcaactccgaccagcggaggaacttggggtcagtggctaaagtgctgcagcatgcggcgtctaataagttgttcgagggtgaaaacgaacacctgtcaagcatgaacaactacctttcagagacttatcaggagttccgaaaatatttcaaggaggcttgcaatgtgcctgagccagaggagaagttcaacatggataagtacactgatctggtaaccgtatctaagcccgtcatatacatttccattgaagagattatttcaacgcacagcttgctgcttgagcatcaggatgccattgcccccgagaagaacgacctgctttccgaacttctcggctcgctgggcgaagttccaacagtggaaagtttcctgggggagggagccgtagaccctaacgatcccaataaagccaatacacttagccagctgtccaagaccgaaatttcccttgttttgactagcaagtacgacattgaggacggggaagcaatcgactcaagatccctcatgatcaaaacgaagaagctgattatcgacgtgatccgcaaccaacccggtaataccctcaccgaaatcctggaaaccccggcaaccgcacagcaggaagtcgatcacgccactgacatggtgagtagggctatgatcgatagccggacccctgaggaaatgaaacactcccagagcatgattgaagatgcacagttgcccctcgagcagaagaaaaggaagatccagcgaaatctgcggaccttggagcaaacaggccatgtctccagtgaaaacaagtaccaggacatcctgaatgagatcgcaaaggatattagaaatcagcgcatctaccggaaattacggaaagcggaactggcaaagttgcagcagacactcaacgccctgaataaaaaggcggctttctacgaagagcagataaactactatgacacttacataaaaacctgtctcgacaacctgaagcgcaagaatacccgccgctctatcaaacttgacggaaaaggcgaaccgaaaggtgcaaagcgggccaaaccggtaaagtacaccgccgccaaattacacgagaagggtgtgctgttagatattgacgacctgcagactaaccagttcaagaatgtgaccttcgatattattgctacagaagatgtcggaatcttcgatgttaggagcaagtttctcggtgttgagatggagaaagtgcaactgaacattcaggatttgctgcagatgcagtacgaaggggtagcagttatgaaaatgttcgataaagtcaaggtgaacgtcaatctgctcatttatttgcttaacaaaaagttttatggcaagtag

SEQ ID NO: 104056 - DNA, 3376 bp, Artificial Sequence
  derived and/or modified sequence
agcagcttgtattcttagaaacgcagcagacagcaactttagcaggtgatttcaatcaagtcagctgaaatgcactcacttccaggagttgtagctgtagggtacatcaatgaagctattgatgaagggaatcctttgaggactttagaaactttgctcctacctactgcgaatattagtgatgtggacccagcccatgcccagcactaccaggatgttttataccatgctaaatcacagaaactcggagactctgagagtgtttccaaagtgctttggctggatgagatacagcaagccgtcgatgatgccaacgtggacaaggacagagcaaaacaatgggttactctggtggttgatgttaatcagtgtttggaaggaaaaaaatcaagtgatattttgtctgtattgaagtcttccacttctaatgcaaatgacataatcccggagtgtgctgacaaatactatgatgcccttgtgaaggcaaaagagctcaaatctgaaagagtgtctagtgacggttcatggctcaaactcaacctgcacaaaaaatatgactactattacaacactgattcaaaagagagttcctgggtcacacctgaatcatgcttgtataaagaatcatggctcacaggaaaagaaatcgaggctttttggaaaggatataaacaacggaaggagtatatgcacaggcggcaaacgttcattgataatactgattctattgtgaagattcagtcctggttccgaatggcaactgcaagaaagagctatctttcaagactacagtatttcagagatcataataatgaaattgtgaaaatacagtcactgttgagagcgaacaaagctagagatgactacaaaacattggttggctctgaaaacccaccattaacagtaattcgcaaatttgtatacctgctggaccaaagtgatttggatttccaggaggaactagaggttgcacgattaagggaagaagtagtgaccaagatcagggccaatcaacagctggaaaaagacctgaacctgatggacatcaagattggactgctggtgaagaacaggatcacactagaggatgtaatttcacatagtaaaaagctgaacaagaaaaaaggaggagaaatggaaatactgaataacaccgacaaccaaggaataaaaagtttgagtaaggagaggagaaaaacactagaaacatatcagcagctgttttaccttttacagaccaaccctttatacttggctaagctgattttccagatgccacagaacaagtccactaaatttatggatactgttattttcacactatataattatgcctctaatcagcgagaagaatatctacttctcaagctttttaaaactgctctggaggaagaaataaaatcaaaagtggaccaggtacaggacatagttactggtaaccctacagtcatcaagatggtcgtcagcttcaatagaggtgcccggggacagaacaccctgcgccaactcctggctccagtggtaaaagagatcatcgacgacaagtcgctgattatcaacacaaaccctgtagaggtgtacaaggcttgggtgaaccaactagaaacacagactggagaggccagcaagttgccttatgatgtgaccacagaacaagctctaacatacccagaagtgaaaaataaactggaggcttccattgagaacctgagaagggtcaccgacaaagtcctgaattctatcatttcttcccttgatctactgccttatggattgaggtatatagccaaagtactgaagaattcgatccatgagaaattccccgatgcaacagaagatgagctattaaagattgttggaaacctcctgtactatcggtacatgaatccagccattgtagctccagatggctttgatatcatcgacatgacagctggaggtcagataaattctgaccaaaggagaaacttaggatcagtggccaaggttcttcagcacgcagcctccaacaagctgtttgaaggagaaaatgagcatctctcatctatgaacaattatttatcagagacgtatcaggaattcaggaaatatttcaaagaagcatgtaatgtccctgagccagaagagaagtttaatatggacaaatacacagacctggtgacagtcagcaaaccagtcatttatatttcaattgaagaaatcatcagcacacactcactcctgttggaacaccaggatgcaattgcccctgagaaaaatgacttactgagtgaattgctggggtcgctgggagaggtgccaaccgtggaatcttttcttggggaaggagcagttgaccccaatgaccctaacaaggcaaatacactaagtcagctttcaaagaccgagatttctcttgtcttgacaagcaaatatgacatagaggacggtgaagctatagatagccgaagcctcatgataaagaccaagaagctgataattgatgtgatccggaaccagccagggaacacattgacagaaatcttagagacaccagcaactgcgcaacaggaggtagaccatgccacggacatggtgagccgtgcaatgatagattccaggactccagaagaaatgaagcatagccaatctatgattgaagatgcacagctgcctcttgagcagaagaagaggaaaatccagaggaatcttcggacgttggaacagactggacacgtgtcatccgaaaataaataccaagacattctcaatgagattgccaaggatattcgaaatcaaagaatctatcgtaagcttcgaaaagctgaattggcaaaacttcagcagaccctgaatgcacttaacaagaaggcagcattttatgaagagcaaatcaattattatgacacctacataaagacttgtttagacaacttaaaaagaaaaaatactcggagatcaattaaactagatggaaaaggagaacccaaaggggcgaagagagcgaagccagtgaagtacactgcagcaaagctgcatgagaaaggtgtcctgctagatatagatgatcttcaaacaaaccagtttaagaatgttacatttgatatcatagctactgaagatgtaggcattttcgatgtaagatcaaaattccttggtgttgagatggaaaaggtgcaactcaatattcaggatttacttcagatgcaatatgaaggagtagctgtaatgaaaatgtttgataaggttaaagtgaatgtaaaccttctcatatacctgctgaacaagaagttctatggaaagtgaagtgcctacagaaatttcttggattctgtatcatctggattaggaaatgaatttgtttaatatttttgtttttaaacatgattgaaatcac

SEQ ID NO: 104057 - DNA, 3216 bp, Artificial Sequence
  derived and/or modified sequence
atgcacagcctgcccggggtggtggccgtgggctacatcaatgaggccattgatgagggcaaccccctgcggaccctggagaccctgctgctgcccacagccaacatcagtgatgtggaccctgcccacgcccagcactaccaggatgtgctgtaccacgccaagagccagaagctgggggacagcgagagcgtgtccaaggtgctgtggctggatgagatccagcaggccgtggatgatgccaacgtggacaaggaccgggccaagcagtgggtgaccctggtggtggatgtgaaccagtgcctggagggcaagaagagcagtgacatcctgtctgtgctgaagagcagcaccagcaatgccaatgacatcatcccagaatgtgccgacaagtactatgatgccctggtgaaggccaaggagctgaagtctgagcgggtgtccagtgatggctcctggctgaagctgaacctgcacaagaagtatgactactactacaacacagacagcaaggagagctcctgggtgaccccagagagctgcctgtacaaggagagctggctgaccgggaaggagattgaggccttctggaagggctacaagcagaggaaggagtacatgcaccggcggcagaccttcatcgacaacacagacagcatcgtgaagatccagagctggttcaggatggccacagccaggaagagctacctgagccggctgcagtacttccgggaccacaacaatgagatcgtgaagatccagagcctgctgcgggccaacaaggccagagatgactacaagaccctggtgggctctgaaaatccacccctgaccgtcatcaggaagtttgtgtacctgctggaccagagcgacctggacttccaggaggagctggaggtggcccggctgcgggaggaggtggtgaccaagatccgggccaaccagcagctggagaaggacctgaacctgatggacatcaagattggcctgctggtgaagaaccgcatcaccctggaggatgtgatcagccacagcaagaagctgaacaagaagaagggcggggagatggagatcctgaacaacacagacaaccagggcatcaagagcctgagcaaggagaggaggaagaccctggagacctaccagcagctgttctacctgctgcagaccaaccccctgtacctggccaagctgatcttccagatgccccagaacaagagcaccaagttcatggacaccgtcatcttcaccctgtacaactatgccagcaaccagcgggaggagtacctgctgctgaagctgttcaagacagccctggaggaggagatcaagagcaaggtggaccaggtgcaggacatcgtgactggaaaccccaccgtcatcaagatggtggtgtccttcaacagaggagcccggggccagaacaccctgcggcagctgctggcccctgtggtgaaggagatcattgatgacaagagcctcatcatcaacaccaaccctgtggaggtgtacaaggcctgggtgaaccagctggagacccagacaggagaggccagcaagctgccctatgatgtgaccacagagcaggccctgacctacccagaggtgaagaacaagctggaggccagcattgagaacctgcggcgggtgacagacaaggtgctgaacagcatcatcagcagcctggacctgctgccctacggcctgcgctacatcgccaaggtgctgaagaacagcatccacgagaagttcccagatgccacagaagatgagctgctgaagatcgtgggcaacctgctgtactaccgctacatgaacccagccatcgtggccccagatggctttgacatcatcgacatgacagctgggggccagatcaacagcgaccagaggaggaacctgggctctgtggccaaggtgctgcagcacgccgccagcaacaagctgtttgaaggagaaaatgagcacctgagctccatgaacaactacctgtctgagacctaccaggagttcaggaagtacttcaaggaggcctgcaatgtgcctgagcctgaggagaagttcaacatggacaagtacacagacctggtgacagtgtccaagcctgtgatctacatcagcattgaggagatcatcagcacccacagcctgctgctggagcaccaggatgccatcgcccctgagaagaatgacctgctgtctgagctgctgggcagcctgggggaggtgcccaccgtggagagcttcctgggggagggcgctgtggaccccaatgaccccaacaaggccaacaccctgagccagctgagcaagacagagatcagcctggtgctgaccagcaaatatgacattgaagatggagaggccatcgacagccgcagcctgatgatcaagaccaagaagctgatcattgatgtgatccggaaccagcccggcaacaccctgacagagatcctggagaccccagccacagcccagcaggaggtggaccacgccacagacatggtgtcccgggccatgattgacagcaggaccccagaggagatgaagcacagccagagcatgattgaagatgcccagctgcccctggagcagaagaagaggaagatccagaggaacctgcggaccctggagcagacaggccacgtgtcctctgagaacaagtaccaggacatcctgaatgagatcgccaaggacatccggaaccagaggatctacaggaagctgaggaaggccgagctggccaagctgcagcagaccctgaatgccctgaacaagaaggccgccttctatgaggagcagatcaactactatgacacctacatcaagacctgcctggacaacctgaagaggaagaacaccaggaggagcatcaagctggatggaaaaggagagcccaagggggccaagagggccaagcctgtgaagtacacagctgccaagctgcacgagaagggcgtgctgctggacattgatgacctgcagaccaaccagttcaagaatgtgacctttgacatcatcgccacagaagatgtgggcatctttgatgtgcgcagcaagttcctgggcgtggagatggagaaggtgcagctgaacatccaggacctgctgcagatgcagtatgaaggagtggccgtgatgaagatgtttgacaaggtgaaggtgaatgtgaacctgctgatctacctgctgaacaagaagttctacggcaagtag

SEQ ID NO: 104058 - DNA, 3216 bp, Artificial Sequence
  derived and/or modified sequence
atgcacagcctgcccggcgtggtggccgtgggctacatcaacgaggcaatagatgaggggaaccccttacgcacacttgagactttgctactcccaacggctaatatcagtgatgtggacccggcacacgctcagcactaccaggacgtgttgtatcacgccaaaagtcagaaattgggagattcagaatcagtatcaaaagtgttatggcttgatgagatccaacaggctgtggatgatgccaatgtggacaaggatagggccaagcagtgggttaccctggttgtcgatgttaatcagtgtttagagggtaaaaagagctcagacattctgagtgtcctgaaaagctccacctccaacgccaacgatattatccccgaatgtgccgacaagtactatgatgcccttgttaaagccaaggagcttaaaagtgagagagtgtccagtgatggtagctggttgaagctgaatcttcataagaagtatgattactactataacaccgattctaaggagagcagttgggtgacacctgagagttgtttgtataaggaatcttggctcacaggcaaggaaatcgaggcattctggaaaggctataagcagcggaaagagtatatgcaccgccgacagacattcatcgacaacaccgatagcattgtgaaaattcagtcctggtttaggatggctacagcacgtaagtcgtacttaagtaggctgcaatatttccgtgatcataacaatgagatcgttaaaatacagtccctgctgagggcaaacaaagcgagggacgactataaaacgctggtcggttccgagaatcctcccttgactgttatccggaagtttgtttatctgctggatcagtccgatctggattttcaggaagaactagaagtcgcgcggctcagggaggaagtggttacgaaaatacgggccaaccaacagctcgagaaggatcttaaccttatggacatcaaaatcggattgttagtaaagaacagaataactttggaagacgtgatctcccattccaaaaagcttaacaaaaaaaaaggcggcgaaatggaaattctcaataatacagataaccagggtatcaagagcctgtcaaaagaacgcagaaagactctggaaacctatcaacagctgttttatttgttacagaccaaccccctgtacctggccaaactaatctttcagatgccccagaacaaaagcactaaatttatggataccgttatctttacactctacaactatgcaagtaaccaacgagaggagtatctgctcctaaagttattcaaaacagccctggaggaggagatcaaatcgaaagtggatcaggtgcaggacatcgtgacaggtaatcccacagttataaaaatggtggttagcttcaaccgcggggcgagagggcagaacacgctccgacaacttctggcccctgtggtgaaagagatcatcgacgacaaatccctgattataaatacaaaccccgttgaggtgtataaggcttgggtcaatcagctcgaaacgcagacaggggaagcctcgaaactaccctacgatgtcaccaccgaacaggctctaacatatccagaggtgaagaacaaattggaagcaagtatcgagaacctacgcagagtgactgataaggtcctgaactccataatctcgagtttggatttgttgccttacgggctcagatacatcgccaaagtgcttaagaatagcatccatgagaaatttcccgatgctactgaagatgagctccttaaaatagtcggaaatttactgtactatagatatatgaaccccgccattgtcgccccagacggcttcgatatcatcgacatgactgctggagggcaaattaactctgatcagcgtcgcaatcttgggagtgtggccaaggttctccagcatgcggcctctaacaagttgttcgaaggtgagaatgaacatctaagctccatgaataactatctgtctgagacgtaccaggagttcaggaagtacttcaaggaagcctgcaatgtgcccgagcctgaggagaaatttaacatggacaaatataccgacctggtgacagtgtcaaaaccagtgatttatatttccattgaagaaatcatatcaacccactctctcctgctcgagcatcaggacgcaattgctcccgagaaaaacgatttgctgagtgagttactgggctccctcggggaggtcccgactgtggaaagctttctcggtgagggagccgtggatccaaacgatcctaataaagccaacaccctgagtcagctatccaaaaccgagatcagcctcgtcctgacatcaaaatatgacatcgaggatggcgaggccatcgacagccgcagcttaatgatcaaaaccaaaaagctcattatcgacgtaatccggaaccagccgggcaacaccttgacagagatactggagactcctgccacggctcagcaagaagtcgaccacgcaacagacatggtttcaagggcgatgatcgattccagaactcccgaagaaatgaagcacagccagtccatgatagaggacgcacaactgcctttggagcaaaagaaacgaaagatacagcggaatctcagaaccctcgaacaaacggggcatgtatctagcgaaaacaaataccaggacattctaaacgaaattgccaaggacattaggaaccagaggatttaccgcaagctgcgcaaggctgagctagccaaactgcagcagactcttaacgctctcaacaagaaagctgcattctacgaggagcagattaattattatgacacttacatcaagacctgtctcgataaccttaagcggaagaacaccagacggtctatcaagctggatgggaaaggagagccaaaaggggctaaacgggcgaagccagtaaagtacactgcagccaagttgcatgaaaaaggagtcttactcgatattgacgatctgcagacaaaccagttcaaaaatgttactttcgatattatagccacggaagatgtcgggattttcgacgttcgatctaaattcctaggcgtggaaatggagaaagtacagctgaatatccaggacctgctgcagatgcagtatgagggggtggccgtcatgaaaatgttcgacaaggtaaaagtgaacgtcaatctgctcatatatctcctcaataagaagttttatggaaaatag

SEQ ID NO: 104059 - DNA, 3216 bp, Artificial Sequence
  derived and/or modified sequence
atgcactcacttcctggcgtcgtggctgtgggatacattaatgaggccatcgacgaaggaaaccctttacgtacacttgaaacactgctgttgccaaccgcgaacattagtgacgtggatccagctcacgcccagcactaccaggacgtgctatatcacgctaagagccagaagcttggagactctgaatctgtttctaaggtgctttggctggacgaaattcagcaggccgtcgatgacgctaatgtggacaaagaccgtgcaaagcagtgggtgaccctcgtggtcgatgttaaccaatgtcttgagggaaaaaaatcctcagatatcctgtccgtcctgaagtcttcaaccagcaatgccaacgacataattccagagtgtgccgacaaatattacgacgctctggtgaaggccaaagagctgaaatcagaaagagtaagctcagacggtagctggctcaagctcaatctgcataaaaaatatgattactattataacacagatagcaaggagtccagttgggttaccccagaatcctgcctgtataaggagtcatggctaaccgggaaagagatcgaggccttttggaagggctataagcagcggaaagaatacatgcataggaggcaaacgttcatagacaacacagactctattgtcaagattcagtcatggtttcggatggccactgcaagaaagtcctacctgtctaggctgcagtacttcagagatcataacaatgaaatcgtgaaaatccagtctcttttgagggccaacaaggcacgggacgactacaaaacactggtgggcagcgagaaccctcctctgacagttattcgcaagttcgtctacctcctagaccagtcagacctcgactttcaagaagagctagaagtggccagactgagagaggaagtagtcaccaaaattcgggctaaccagcaactggagaaagaccttaatctaatggatattaaaattgggctgctcgtgaaaaaccgcattaccctggaggacgttatttcccacagcaaaaaactgaataagaaaaagggaggtgagatggaaattctcaacaacacagataaccagggaataaagtccctctctaaggaacgacggaagaccctagagacataccagcagttgttctatttgctgcaaaccaatcccctgtacttggccaagcttatttttcagatgccccagaataagtccactaagtttatggacaccgtcatcttcacgctatataactacgcctctaaccagcgcgaggaatacttgttgctaaaattattcaagactgccctcgaagaggaaataaaatccaaggtggaccaggtgcaagacattgtaactggtaaccccacggtgataaaaatggttgtgagctttaataggggcgctaggggtcagaatacactccggcagcttctcgcacctgtggtgaaagaaattattgatgacaaatcccttattattaacactaatccagtcgaggtgtataaggcctgggtaaaccagctggaaacccaaactggcgaagcctccaaactcccgtatgatgtgaccactgagcaagcactgacatatccggaggtcaagaataaacttgaagcctctatcgagaatctgcggagagtgacagacaaggtccttaatagcattatctccagcttagatctgttgccctacggtttgaggtacatcgctaaagttttgaagaatagcatccacgagaaattcccagacgctacggaggacgagctgctgaaaatcgttgggaacctactttattatcgatacatgaaccctgcaatcgtcgcacccgacgggtttgatatcattgacatgaccgcgggtggccagatcaattccgatcaacggaggaacctgggaagcgtcgctaaagtgcttcagcacgcagcttcaaataaactcttcgagggggagaacgaacacctgtcctccatgaataactatcttagtgaaacttaccaggaatttcgaaagtatttcaaagaggcttgcaacgtgcccgagccagaagagaagttcaacatggacaaatacaccgacttagtcaccgtgagcaaacccgttatctatatcagtatcgaggagatcatatcgactcatagcttgctcctggaacaccaggatgctattgcacccgaaaaaaacgacctgttgtctgagctgctcggatccctcggcgaggtaccaaccgtcgaatcatttcttggagaaggagctgttgacccaaatgaccctaacaaagccaacacgctgagtcagctaagcaagaccgagattagtctggtccttaccagcaagtacgacattgaagatggagaggcaatcgattcgcggtccttgatgatcaaaaccaaaaaactgattattgacgtcatacgcaatcagccaggcaacaccctcacagaaatcctggaaaccccagccacggctcagcaagaagtcgaccacgcgacggacatggtgtccagagcaatgatcgactccaggactcctgaagagatgaagcattcccagtcaatgattgaggacgcccagttgccgctagagcagaaaaaacgcaaaatacagcgcaacctgaggaccctggagcaaacaggtcacgtgtcatccgagaacaaataccaggacatattaaacgagatagcaaaagacatccgcaatcagcgtatctatcgtaaactcaggaaagccgaactcgccaaactccaacagaccttgaatgccctcaataaaaaagctgctttctatgaggagcagatcaactattatgatacctatattaagacctgcctcgacaacttaaagcggaaaaataccaggaggtccatcaaactggatggaaaaggtgaaccaaaaggagctaaacgcgcaaagcccgtcaaatatacagcagctaagctccacgagaagggggtgctactcgatatcgatgatctgcaaacgaaccagttcaaaaacgtcaccttcgatatcattgctaccgaagacgtgggtatcttcgacgtgagaagtaagttcctcggagtggagatggaaaaggtacagctgaatatccaggacctccttcagatgcagtacgagggggtggccgtcatgaagatgttcgataaggttaaagtcaatgttaaccttctgatttacctgctcaacaaaaagttctatggaaaatag

SEQ ID NO: 104060 - DNA, 3216 bp, Artificial Sequence
  derived and/or modified sequence
atgcacagcctgcccggcgtggtggccgtgggctacatcaacgaggccatcgacgagggcaaccccctgagaaccctggagaccctgctgctgcccaccgccaacatcagcgacgtggaccccgcccacgcccagcactaccaggacgtgctgtaccacgccaagagccagaagctgggcgacagcgagagcgtgagcaaggtgctgtggctggacgagatccagcaggccgtggacgacgccaacgtggacaaggacagagccaagcagtgggtgaccctggtggtggacgtgaaccagtgcctggagggcaagaagagcagcgacatcctgagcgtgctgaagagcagcaccagcaacgccaacgacatcatccccgagtgcgccgacaagtactacgacgccctggtgaaggccaaggagctgaagagcgagagagtgagcagcgacggcagctggctgaagctgaacctgcacaagaagtacgactactactacaacaccgacagcaaggagagcagctgggtgacccccgagagctgcctgtacaaggagagctggctgaccggcaaggagatcgaggccttctggaagggctacaagcagagaaaggagtacatgcacagaagacagaccttcatcgacaacaccgacagcatcgtgaagatccagagctggttcagaatggccaccgccagaaagagctacctgagcagactgcagtacttcagagaccacaacaacgagatcgtgaagatccagagcctgctgagagccaacaaggccagagacgactacaagaccctggtgggcagcgagaacccccccctgaccgtgatcagaaagttcgtgtacctgctggaccagagcgacctggacttccaggaggagctggaggtggccagactgagagaggaggtggtgaccaagatcagagccaaccagcagctggagaaggacctgaacctgatggacatcaagatcggcctgctggtgaagaacagaatcaccctggaggacgtgatcagccacagcaagaagctgaacaagaagaagggcggcgagatggagatcctgaacaacaccgacaaccagggcatcaagagcctgagcaaggagagaagaaagaccctggagacctaccagcagctgttctacctgctgcagaccaaccccctgtacctggccaagctgatcttccagatgccccagaacaagagcaccaagttcatggacaccgtgatcttcaccctgtacaactacgccagcaaccagagagaggagtacctgctgctgaagctgttcaagaccgccctggaggaggagatcaagagcaaggtggaccaggtgcaggacatcgtgaccggcaaccccaccgtgatcaagatggtggtgagcttcaacagaggcgccagaggccagaacaccctgagacagctgctggcccccgtggtgaaggagatcatcgacgacaagagcctgatcatcaacaccaaccccgtggaggtgtacaaggcctgggtgaaccagctggagacccagaccggcgaggccagcaagctgccctacgacgtgaccaccgagcaggccctgacctaccccgaggtgaagaacaagctggaggccagcatcgagaacctgagaagagtgaccgacaaggtgctgaacagcatcatcagcagcctggacctgctgccctacggcctgagatacatcgccaaggtgctgaagaacagcatccacgagaagttccccgacgccaccgaggacgagctgctgaagatcgtgggcaacctgctgtactacagatacatgaaccccgccatcgtggcccccgacggcttcgacatcatcgacatgaccgccggcggccagatcaacagcgaccagagaagaaacctgggcagcgtggccaaggtgctgcagcacgccgccagcaacaagctgttcgagggcgagaacgagcacctgagcagcatgaacaactacctgagcgagacctaccaggagttcagaaagtacttcaaggaggcctgcaacgtgcccgagcccgaggagaagttcaacatggacaagtacaccgacctggtgaccgtgagcaagcccgtgatctacatcagcatcgaggagatcatcagcacccacagcctgctgctggagcaccaggacgccatcgcccccgagaagaacgacctgctgagcgagctgctgggcagcctgggcgaggtgcccaccgtggagagcttcctgggcgagggcgccgtggaccccaacgaccccaacaaggccaacaccctgagccagctgagcaagaccgagatcagcctggtgctgaccagcaagtacgacatcgaggacggcgaggccatcgacagcagaagcctgatgatcaagaccaagaagctgatcatcgacgtgatcagaaaccagcccggcaacaccctgaccgagatcctggagacccccgccaccgcccagcaggaggtggaccacgccaccgacatggtgagcagagccatgatcgacagcagaacccccgaggagatgaagcacagccagagcatgatcgaggacgcccagctgcccctggagcagaagaagagaaagatccagagaaacctgagaaccctggagcagaccggccacgtgagcagcgagaacaagtaccaggacatcctgaacgagatcgccaaggacatcagaaaccagagaatctacagaaagctgagaaaggccgagctggccaagctgcagcagaccctgaacgccctgaacaagaaggccgccttctacgaggagcagatcaactactacgacacctacatcaagacctgcctggacaacctgaagagaaagaacaccagaagaagcatcaagctggacggcaagggcgagcccaagggcgccaagagagccaagcccgtgaagtacaccgccgccaagctgcacgagaagggcgtgctgctggacatcgacgacctgcagaccaaccagttcaagaacgtgaccttcgacatcatcgccaccgaggacgtgggcatcttcgacgtgagaagcaagttcctgggcgtggagatggagaaggtgcagctgaacatccaggacctgctgcagatgcagtacgagggcgtggccgtgatgaagatgttcgacaaggtgaaggtgaacgtgaacctgctgatctacctgctgaacaagaagttctacggcaagtag

SEQ ID NO: 104061 - protein, 1077 aa, Artificial Sequence
  derived and/or modified sequence
MVNAQIQEENDRVVAVGYINEAIDEGNPLRTLETLLLPTANISDVDPAHAQHYQDVLYHAKSQKLGDSESVSKVLWLDEIQQAVDDANVDKDRAKQWVTLVVDVNQCLEGKKSSDILSVLKSSTSNANDIIPECADKYYDALVKAKELKSERVSSDGSWLKLNLHKKYDYYYNTDSKESSWVTPESCLYKESWLTGKEIEAFWKGYKQRKEYMHRRQTFIDNTDSIVKIQSWFRMATARKSYLSRLQYFRDHNNEIVKIQSLLRANKARDDYKTLVGSENPPLTVIRKFVYLLDQSDLDFQEELEVARLREEVVTKIRANQQLEKDLNLMDIKIGLLVKNRITLEDVISHSKKLNKKKGGEMEILNNTDNQGIKSLSKERRKTLETYQQLFYLLQTNPLYLAKLIFQMPQNKSTKFMDTVIFTLYNYASNQREEYLLLKLFKTALEEEIKSKVDQVQDIVTGNPTVIKMVVSFNRGARGQNTLRQLLAPVVKEIIDDKSLIINTNPVEVYKAWVNQLETQTGEASKLPYDVTTEQALTYPEVKNKLEASIENLRRVTDKVLNSIISSLDLLPYGLRYIAKVLKNSIHEKFPDATEDELLKIVGNLLYYRYMNPAIVAPDGFDIIDMTAGGQINSDQRRNLGSVAKVLQHAASNKLFEGENEHLSSMNNYLSETYQEFRKYFKEACNVPEPEEKFNMDKYTDLVTVSKPVIYISIEEIISTHSLLLEHQDAIAPEKNDLLSELLGSLGEVPTVESFLGEGAVDPNDPNKANTLSQLSKTEISLVLTSKYDIEDGEAIDSRSLMIKTKKLIIDVIRNQPGNTLTEILETPATAQQEVDHATDMVSRAMIDSRTPEEMKHSQSMIEDAQLPLEQKKRKIQRNLRTLEQTGHVSSENKYQDILNEIAKDIRNQRIYRKLRKAELAKLQQTLNALNKKAAFYEEQINYYDTYIKTCLDNLKRKNTRRSIKLDGKGEPKGAKRAKPVKYTAAKLHEKGVLLDIDDLQTNQFKNVTFDIIATEDVGIFDVRSKFLGVEMEKVQLNIQDLLQMQYEGVAVMKMFDKVKVNVNLLIYLLNKKFYGK

SEQ ID NO: 104062 - DNA, 561 bp, Artificial Sequence
  derived and/or modified sequence
atggattcatctgcagctccgactaatgctagtaactgcacagacgctctagcctattcaagttgctctccagcgccttctcccggatcatgggttaatctgagccaccttgatggcaacttgtctgacccttgtggaccgaaccgtacggaccttggagggagggattcattgtgtccccccacaggcagtccctcaatgataactgctatcaccataatggccctatatagcatcgtttgtgttgttgggcttttcggtaactttcttgtgatgtacgtcattgtaaggtttcaccgactgtacactaacatcttgtctagcaaccttgtgctgggcaaacccgctgaagatctgtgtttccatttacgtctgcactatgctagcgcacaccattatagggtgctctggactgatgacctggctccccaggaatgccctcacgccctctggctgcagcgcaaagggcaggaatcatcaaaagaccatcaggatggcgcaggcggaggggggtgtgtgcacaggctcctcgactcgcattcgcatttgcgacaccattag

SEQ ID NO: 104063 - DNA, 561 bp, Artificial Sequence
  derived and/or modified sequence
atggacagcagcgctgcccccaccaatgccagcaactgcacagatgccctggcctacagcagctgcagccctgcccccagccctggctcctgggtgaacctgagccacctggatggcaacctgagtgacccctgtggccccaacagaacagacctgggcggccgggacagcctgtgcccccccaccggcagccccagcatgatcacagccatcaccatcatggccctgtacagcatcgtgtgtgtggtgggcctgtttggaaacttcctggtgatgtatgtgattgtgcgcttccaccggctgtacaccaacatcctgagcagcaacctggtgctgggcaagccagctgaggacctgtgcttccacctgcggctgcactacgccagcgcccaccactacagagtgctgtggacagatgacctggccccccaggagtgcccccacgccctgtggctgcagaggaagggccaggagagcagcaaggaccaccaggatggagctgggggcggcggctgtgtgcaccggctgctggacagccacagccacctgcggcaccactag

SEQ ID NO: 104064 - DNA, 561 bp, Artificial Sequence
  derived and/or modified sequence
atggacagcagcgccgcccccaccaacgccagcaactgcaccgacgcattggcttattcgagctgctctcccgccccgagcccggggagctgggtgaatctttctcacctggatggaaacctttctgatccttgtggacctaaccggacagatttaggaggcagggactctttatgtcccccaacgggctctcctagtatgataaccgccattactattatggccctatatagcatagtgtgcgtcgtgggcttattcgggaattttctagtgatgtatgtcatcgtccgctttcatcgcctgtacacaaatatcttatccagtaaccttgtgctgggaaagccggccgaagatctttgcttccatctgcgcctgcactatgcttcagcccaccactaccgcgtgctgtggactgatgatctcgccccgcaagaatgtccccacgctctatggttgcagcggaaagggcaggaatccagcaaggatcaccaggatggagccggggggggaggctgtgtgcataggctgcttgattcacattctcatctaaggcaccactag

SEQ ID NO: 104065 - DNA, 561 bp, Artificial Sequence
  derived and/or modified sequence
atggactccagcgctgcgccaaccaatgcatccaactgtactgacgcccttgcctattcgtcctgctccccagctccgagccctggaagctgggtgaacctgtcccacctggatggtaatttgagtgatccatgcgggccaaatagaactgatttgggaggacgagactcattgtgccccccaacagggtcaccaagcatgatcaccgccattaccatcatggcactttattctatcgtgtgtgtagttggcctgttcggcaatttcttagtgatgtatgtgattgtgaggttccacaggctctatacgaatatattgagctccaatcttgtgctgggcaaacccgctgaggatctgtgctttcacttgcgcctccattacgcatctgctcatcattacagggtgctctggactgacgatctggctccccaagaatgcccgcacgctctgtggctgcagcgtaaagggcaggagtctagtaaagatcaccaggacggtgctggtggagggggatgtgtacatcgccttctggactctcactctcatttacgtcaccattag

SEQ ID NO: 104066 - DNA, 561 bp, Artificial Sequence
  derived and/or modified sequence
atggacagcagcgccgcccccaccaacgccagcaactgcaccgacgccctggcctacagcagctgcagccccgcccccagccccggcagctgggtgaacctgagccacctggacggcaacctgagcgacccctgcggccccaacagaaccgacctgggcggcagagacagcctgtgcccccccaccggcagccccagcatgatcaccgccatcaccatcatggccctgtacagcatcgtgtgcgtggtgggcctgttcggcaacttcctggtgatgtacgtgatcgtgagattccacagactgtacaccaacatcctgagcagcaacctggtgctgggcaagcccgccgaggacctgtgcttccacctgagactgcactacgccagcgcccaccactacagagtgctgtggaccgacgacctggccccccaggagtgcccccacgccctgtggctgcagagaaagggccaggagagcagcaaggaccaccaggacggcgccggcggcggcggctgcgtgcacagactgctggacagccacagccacctgagacaccactag

SEQ ID NO: 104067 - protein, 400 aa, Artificial Sequence
  derived and/or modified sequence
MDSSAAPTNASNCTDALAYSSCSPAPSPGSWVNLSHLDGNLSDPCGPNRTDLGGRDSLCPPTGSPSMITAITIMALYSIVCVVGLFGNFLVMYVIVRYTKMKTATNIYIFNLALADALATSTLPFQSVNYLMGTWPFGTILCKIVISIDYYNMFTSIFTLCTMSVDRYIAVCHPVKALDFRTPRNAKIINVCNWILSSAIGLPVMFMATTKYRQGSIDCTLTFSHPTWYWENLLKICVFIFAFIMPVLIITVCYGLMILRLKSVRMLSGSKEKDRNLRRITRMVLVVVAVFIVCWTPIHIYVIIKALVTIPETTFQTVSWHFCIALGYTNSCLNPVLYAFLDENFKRCFREFCIPTSSNIEQQNSTRIRQNTRDHPSTANTVDRTNHQLENLEAETAPLP

SEQ ID NO: 104068 - protein, 402 aa, Artificial Sequence
  derived and/or modified sequence
MDSSAAPTNASNCTDALAYSSCSPAPSPGSWVNLSHLDGNLSDPCGPNRTDLGGRDSLCPPTGSPSMITAITIMALYSIVCVVGLFGNFLVMYVIVRYTKMKTATNIYIFNLALADALATSTLPFQSVNYLMGTWPFGTILCKIVISIDYYNMFTSIFTLCTMSVDRYIAVCHPVKALDFRTPRNAKIINVCNWILSSAIGLPVMFMATTKYRQGSIDCTLTFSHPTWYWENLLKICVFIFAFIMPVLIITVCYGLMILRLKSVRMLSGSKEKDRNLRRITRMVLVVVAVFIVCWTPIHIYVIIKALVTIPETTFQTVSWHFCIALGYTNSCLNPVLYAFLDENFKRCFREFCIPTSSNIEQQNSTRIRQNTRDHPSTANTVDRTNHQIRDPISNLPRVSVF

SEQ ID NO: 104069 - protein, 493 aa, Artificial Sequence
  derived and/or modified sequence
MCLHRRVPSEETYSLDRFAQNPPLFPPPSLPASESRMAHAPLLQRCGAARTGFCKKQQELWQRRKEAAEALGTRKVSVLLATSHSGARPAVSTMDSSAAPTNASNCTDALAYSSCSPAPSPGSWVNLSHLDGNLSDPCGPNRTDLGGRDSLCPPTGSPSMITAITIMALYSIVCVVGLFGNFLVMYVIVRYTKMKTATNIYIFNLALADALATSTLPFQSVNYLMGTWPFGTILCKIVISIDYYNMFTSIFTLCTMSVDRYIAVCHPVKALDFRTPRNAKIINVCNWILSSAIGLPVMFMATTKYRQGSIDCTLTFSHPTWYWENLLKICVFIFAFIMPVLIITVCYGLMILRLKSVRMLSGSKEKDRNLRRITRMVLVVVAVFIVCWTPIHIYVIIKALVTIPETTFQTVSWHFCIALGYTNSCLNPVLYAFLDENFKRCFREFCIPTSSNIEQQNSTRIRQNTRDHPSTANTVDRTNHQLENLEAETAPLP

SEQ ID NO: 104070 - protein, 163 aa, Artificial Sequence [sequence omitted]

SEQ ID NO: 104071 - protein, 186 aa, Artificial Sequence
  derived and/or modified sequence
MDSSAAPTNASNCTDALAYSSCSPAPSPGSWVNLSHLDGNLSDPCGPNRTDLGGRDSLCPPTGSPSMITAITIMALYSIVCVVGLFGNFLVMYVIVRFHRLYTNILSSNLVLGKPAEDLCFHLRLHYASAHHYRVLWTDDLAPQECPHALWLQRKGQESSKDHQDGAGGGGCVHRLLDSHSHLRHH

SEQ ID NO: 104072 - protein, 389 aa, Artificial Sequence
  derived and/or modified sequence
MDSSAAPTNASNCTDALAYSSCSPAPSPGSWVNLSHLDGNLSDPCGPNRTDLGGRDSLCPPTGSPSMITAITIMALYSIVCVVGLFGNFLVMYVIVRYTKMKTATNIYIFNLALADALATSTLPFQSVNYLMGTWPFGTILCKIVISIDYYNMFTSIFTLCTMSVDRYIAVCHPVKALDFRTPRNAKIINVCNWILSSAIGLPVMFMATTKYRQGSIDCTLTFSHPTWYWENLLKICVFIFAFIMPVLIITVCYGLMILRLKSVRMLSGSKEKDRNLRRITRMVLVVVAVFIVCWTPIHIYVIIKALVTIPETTFQTVSWHFCIALGYTNSCLNPVLYAFLDENFKRCFREFCIPTSSNIEQQNSTRIRQNTRDHPSTANTVDRTNHQS

SEQ ID NO: 104073 - DNA, 1482 bp, Artificial Sequence
  derived and/or modified sequence
atgtgtcttcataggagagtgcccagcgaggaaacctacagcctggatcgtttcgctcagaacccccccctatttcctccaccatccctccccgcgagcgaaagccgtatggctcacgcgccattgctgcagcggtgcggggctgcccggacaggtttttgcaagaaacaacaggaactgtggcagaggagaaaggaagcagccgaagcacttggaacgagaaaagtgagtgttctgctcgcaacctcccatagcggagcacggcccgctgttagcactatggattctagcgcagcacctacaaatgccagtaattgcacagacgccctggcatacagctcctgctctccagcccctagtccaggctcatgggttaacctttcacatttggatggcaacctcagcgatccttgcgggcccaacaggaccgatttaggcggtcgagactccctgtgcccaccgaccggttctccgtccatgataaccgcaatcaccattatggcgctttatagcattgtgtgtgtggtgggtctgtttggcaatttcctcgttatgtatgtcatcgtaagatataccaagatgaaaaccgcaactaatatctacatcttcaacctggccctggccgatgctctggccacctcaacattgccttttcagtccgtcaactatttgatgggcacctggcctttcggcacaattctgtgtaaaattgtgatctctattgattattacaacatgtttacctccatttttaccctgtgcacaatgtcagtggaccggtatatcgctgtctgtcaccctgtgaaagccctggatttcagaacgcctcgtaatgctaagattatcaatgtgtgtaactggatactctcgtcagccattggactgcccgttatgtttatggccaccacaaagtacaggcaaggctcaatcgattgcacactgacattttcacacccaacatggtattgggagaatctgctgaagatttgtgtgtttatcttcgcattcatcatgcccgtgctaatcatcaccgtttgctatggactgatgatcctccgactcaagagtgttaggatgctctctggctcaaaggaaaaagacaggaacctcagacggatcacaagaatggtactggtggtagttgccgtgttcatcgtctgctggacacctattcacatctatgtcataataaaagcccttgtaaccattcctgagacgacattccagacagtgtcatggcacttttgtatagctctcggttatactaattcgtgcttaaaccccgtcctctatgccttcctggatgaaaacttcaagcggtgcttcagagagttttgtatccccacctcctccaatatagagcaacagaactcaaccaggatacgccagaacacgcgggatcacccttcgacagccaatactgttgacaggacaaaccatcaactggagaatctcgaggctgagaccgcaccgctcccgtag

SEQ ID NO: 104074 - DNA, 492 bp, Artificial Sequence
  derived and/or modified sequence
atggtgcaagcgcgaactggcttttgtaagaaacaacaggaactgtggcaaagacgaaaagaggccgctgaggcactaggcacccgcaaggtgtccgtgctgctggccaccagtcattcaggggctaggcctgccgtttcaaccatggatagttcagccgctccgaccaacgcctccaactgcaccgatgcactggcatacagtagctgttcgcccgctcctagcccaggttcctgggtgaatctgagccacctagacggcaatctgtcagatccgtgcgggcccaacagaaccgacctgggaggacgcgatagtttgtgccctcccaccggcagtcccagtatgattactgccattactataatggctctgtattctattgtgtgtgtcgtgggactctttggtaactttttagtcatgtatgttatcgtgcgctacacaaaaatgaaaactgcgactaatatttatatttttaacttggctctggcgtag

SEQ ID NO: 104075 - DNA, 1482 bp, Artificial Sequence
  derived and/or modified sequence
atgtgcctgcacagaagagtgcccagcgaggagacctacagcctggacagatttgcccagaaccccccactcttccccccacccagcctgcctgccagcgagagcaggatggcccacgcccccctgctgcagagatgtggggccgccaggacaggcttctgcaagaagcagcaggagctgtggcagaggaggaaggaggccgctgaggccctgggcaccaggaaggtgtctgtgctgctggccaccagccacagcggggcccggcctgctgtgtccaccatggacagcagcgctgcccccaccaatgccagcaactgcacagatgccctggcctacagcagctgcagccctgcccccagccctggctcctgggtgaacctgagccacctggatggcaacctgagtgacccctgtggccccaacagaacagacctgggcggccgggacagcctgtgccccccaacaggcagccccagcatgatcacagccatcaccatcatggccctgtacagcatcgtgtgtgtggtgggcctgtttggaaacttcctggtgatgtatgtgattgtgcgctacaccaagatgaagacagccaccaacatctacatcttcaacctggccctggctgatgccctggccaccagcaccctgcccttccagagcgtgaactacctgatgggcacctggcccttcggcaccatcctgtgcaagatcgtcatcagcattgactactacaacatgttcaccagcatcttcaccctgtgcaccatgtctgtggaccgctacatcgctgtgtgccaccctgtgaaggccctggacttccgcaccccaagaaatgccaagatcatcaacgtgtgcaactggatcctgagcagcgccatcggcctgcctgtgatgttcatggccaccaccaagtaccggcagggcagcattgactgcaccctgaccttcagccaccccacctggtactgggagaacctgctgaagatctgtgtgttcatctttgccttcatcatgcctgtgctgatcatcaccgtgtgctacggcctgatgatcctgcggctgaagtctgtgaggatgctgagcggcagcaaggagaaggacaggaacctgcggcgcatcaccaggatggtgctggtggtggtggccgtgttcatcgtgtgctggacccccatccacatctacgtgatcatcaaggccctggtgaccatccctgagaccaccttccagacagtgtcctggcacttctgcatcgccctgggctacaccaacagctgcctgaaccctgtgctgtatgccttcctggatgagaacttcaagcgctgcttccgggagttctgcatccccaccagcagcaacatcgagcagcagaacagcacccgcatccggcagaacacccgggaccaccccagcacagccaacacagtggacaggaccaaccaccagctggagaacctggaggccgagacagcccccctgccctag

SEQ ID NO: 104076 - DNA, 492 bp, Artificial Sequence
  derived and/or modified sequence
atggtgcaggccaggacaggcttctgcaagaagcagcaggagctgtggcagaggaggaaggaggccgctgaggccctgggcaccaggaaggtgtctgtgctgctggccaccagccacagcggggcccggcctgctgtgtccaccatggacagcagcgctgcccccaccaatgccagcaactgcacagatgccctggcctacagcagctgcagccctgcccccagccctggctcctgggtgaacctgagccacctggatggcaacctgagtgacccctgtggccccaacagaacagacctgggcggccgggacagcctgtgcccccccaccggcagccccagcatgatcacagccatcaccatcatggccctgtacagcatcgtgtgtgtggtgggcctgtttggaaacttcctggtgatgtatgtgattgtgcgctacaccaagatgaagacagccaccaacatctacatcttcaacctggccctggcctag

SEQ ID NO: 104077 - DNA, 1482 bp, Artificial Sequence
  derived and/or modified sequence
atgtgcctgcaccggcgggtgcccagcgaggagacctacagcctggacagatttgctcagaaccccccgctgtttccacctccttctctgccagcttcagaaagccgtatggcacatgcccctctcctgcagaggtgtggggccgccagaaccggattctgcaagaagcagcaagaactatggcagcgcagaaaggaggctgccgaggcgctgggcacacgtaaggtgagcgtgctgctcgccacctctcatagcggtgcgaggccagccgtttccacaatggactcaagtgcagcccctactaatgcgtcgaactgtactgacgctctggcctactcgtcttgttcgcctgccccatcccccgggtcgtgggtaaatttgtcgcaccttgatggaaatttaagtgacccctgcgggcctaaccgtactgacctcggaggcagggactccctgtgccctcctaccggcagccctagtatgattaccgccatcactatcatggcgctctactcaatcgtctgcgtagttggcctgtttggtaacttcctcgtaatgtatgtcatcgtccgttacacaaaaatgaagaccgccaccaacatttatattttcaacttggctctggctgacgcgcttgctacctctacattaccattccaaagtgtcaattacctcatgggaacctggccctttgggactatactttgcaagatcgtgatctccatcgactactacaacatgttcacctctatcttcactctttgtacaatgtcagtcgaccgctatatcgcagtttgccatcccgtgaaggcactggattttcggaccccgagaaatgccaaaataatcaacgtgtgcaattggattctgtcgagcgctattgggctgccggttatgttcatggctacgacaaaataccggcagggcagtatcgattgcactctgacattctcccaccccacctggtactgggaaaacttactcaaaatctgcgtctttatatttgcattcatcatgccagtcctgataattaccgtgtgttatggactgatgatcctgagactgaagtcagtaaggatgctgagtggtagcaaggaaaaagaccgaaatctcagacgcattactagaatggtgctggtcgtcgtcgctgtcttcatagtgtgttggaccccaatccacatttacgttatcataaaagccctcgtgacgatacccgagaccacatttcagaccgtatcatggcatttttgtattgccctaggatatacaaacagttgcctgaaccccgttctgtatgccttccttgatgagaacttcaaacgatgcttccgagaattctgcatccctacctccagtaacatagaacagcagaacagtacccgaatcaggcagaacacccgcgatcacccgtccaccgccaacacggttgatcgaaccaatcatcagttagaaaatctggaggctgagacagctccactcccttag

SEQ ID NO: 104078 - DNA, 492 bp, Artificial Sequence
  derived and/or modified sequence
atggtgcaggcccggaccggcttctgcaagaagcagcaggagctgtggcaacgcagaaaggaagccgccgaagcactgggcacaagaaaagtctctgttttacttgcgacatcacactcgggcgctcggcccgctgtcagtacaatggattcatcggctgctcccacaaatgctagtaattgcactgatgccttagcttacagctcatgctcccccgcaccatcccctgggtcatgggtaaacctgagccatctggacggcaatctgtcagacccatgcggcccaaaccgtacggatctgggtggacgggatagcctatgcccccccaccggctcccccagtatgattaccgccatcacaatcatggcactgtatagcatagtgtgcgttgtgggtctgttcgggaactttctggtcatgtacgtgatagtccgctatacaaagatgaaaactgccacaaatatctacatctttaacctcgctctagcctag

SEQ ID NO: 104079 - DNA, 2178 bp, Artificial Sequence
  derived and/or modified sequence
gatgagcctctgtgaactactaaggtgggagggggctatacgcagaggagaatgtcagatgctcagctcggtcccctccgcctgacgctcctctctgtctcagccaggactggtttctgtaagaaacagcaggagctgtggcagcggcgaaaggaagcggctgaggcgcttggaacccgaaaagtctcggtgctcctggctacctcgcacagcggtgcccgcccggccgtcagtaccatggacagcagcgctgcccccacgaacgccagcaattgcactgatgccttggcgtactcaagttgctccccagcacccagccccggttcctgggtcaacttgtcccacttagatggcaacctgtccgacccatgcggtccgaaccgcaccgacctgggcgggagagacagcctgtgccctccgaccggcagtccctccatgatcacggccatcacgatcatggccctctactccatcgtgtgcgtggtggggctcttcggaaacttcctggtcatgtatgtgattgtcagatacaccaagatgaagactgccaccaacatctacattttcaaccttgctctggcagatgccttagccaccagtaccctgcccttccagagtgtgaattacctaatgggaacatggccatttggaaccatcctttgcaagatagtgatctccatagattactataacatgttcaccagcatattcaccctctgcaccatgagtgttgatcgatacattgcagtctgccaccctgtcaaggccttagatttccgtactccccgaaatgccaaaattatcaatgtctgcaactggatcctctcttcagccattggtcttcctgtaatgttcatggctacaacaaaatacaggcaaggttccatagattgtacactaacattctctcatccaacctggtactgggaaaacctgctgaagatctgtgttttcatcttcgccttcattatgccagtgctcatcattaccgtgtgctatggactgatgatcttgcgcctcaagagtgtccgcatgctctctggctccaaagaaaaggacaggaatcttcgaaggatcaccaggatggtgctggtggtggtggctgtgttcatcgtctgctggactcccattcacatttacgtcatcattaaagccttggttacaatcccagaaactacgttccagactgtttcttggcacttctgcattgctctaggttacacaaacagctgcctcaacccagtcctttatgcatttctggatgaaaacttcaaacgatgcttcagagagttctgtatcccaacctcttccaacattgagcaacaaaactccactcgaattcgtcagaacactagagaccacccctccacggccaatacagtggatagaactaatcatcagctagaaaatctggaagcagaaactgctccgttgccctaacagggtctcatgccattccgaccttcaccaagcttagaagccaccatgtatgtggaagcaggttgcttcaagaatgtgtaggaggctctaattctctaggaaagtgcctgcttttaggtcatccaacctctttcctctctggccactctgctctgcacattagagggacagccaaaagtaagtggagcatttggaaggaaaggaatataccacaccgaggagtccagtttgtgcaagacacccagtggaaccaaaacccatcgtggtatgtgaattgaagtcatcataaaaggtgacccttctgtctgtaagattttattttcaagcaaatatttatgacctcaacaaagaagaaccatcttttgttaagttcaccgtagtaacacataaagtaaatgctacctctgatcaaagcaccttgaatggaaggtccgagtctttttagtgttttgcaagggaatgaatccattattctattttagacttttaacttcaccttaaaattagcatctggctaaggcatcattttcacctccatttcttggttttgtattgtttaaaaaaataacatctctttcatctagctccataattgcaagggaagagattagcatgaaaggtaatctgaaacacagtcatgtgtcagctgtagaaaggttgattctcatgcactgcaaatacttccaaagagtcatcatgggggatttttcattcttaggctttcagtggtttgttcct

SEQ ID NO: 104080 - DNA, 1446 bp, Artificial Sequence
  derived and/or modified sequence
gatgagcctctgtgaactactaaggtgggagggggctatacgcagaggagaatgtcagatgctcagctcggtcccctccgcctgacgctcctctctgtctcagccaggactggtttctgtaagaaacagcaggagctgtggcagcggcgaaaggaagcggctgaggcgcttggaacccgaaaagtctcggtgctcctggctacctcgcacagcggtgcccgcccggccgtcagtaccatggacagcagcgctgcccccacgaacgccagcaattgcactgatgccttggcgtactcaagttgctccccagcacccagccccggttcctgggtcaacttgtcccacttagatggcaacctgtccgacccatgcggtccgaaccgcaccgacctgggcgggagagacagcctgtgccctccgaccggcagtccctccatgatcacggccatcacgatcatggccctctactccatcgtgtgcgtggtggggctcttcggaaacttcctggtcatgtatgtgattgtcagatacaccaagatgaagactgccaccaacatctacattttcaaccttgctctggcagatgccttagccaccagtaccctgcccttccagagtgtgaattacctaatgggaacatggccatttggaaccatcctttgcaagatagtgatctccatagattactataacatgttcaccagcatattcaccctctgcaccatgagtgttgatcgatacattgcagtctgccaccctgtcaaggccttagatttccgtactccccgaaatgccaaaattatcaatgtctgcaactggatcctctcttcagccattggtcttcctgtaatgttcatggctacaacaaaatacaggcaaggttccatagattgtacactaacattctctcatccaacctggtactgggaaaacctgctgaagatctgtgttttcatcttcgccttcattatgccagtgctcatcattaccgtgtgctatggactgatgatcttgcgcctcaagagtgtccgcatgctctctggctccaaagaaaaggacaggaatcttcgaaggatcaccaggatggtgctggtggtggtggctgtgttcatcgtctgctggactcccattcacatttacgtcatcattaaagccttggttacaatcccagaaactacgttccagactgtttcttggcacttctgcattgctctaggttacacaaacagctgcctcaacccagtcctttatgcatttctggatgaaaacttcaaacgatgcttcagagagttctgtatcccaacctcttccaacattgagcaacaaaactccactcgaattcgtcagaacactagagaccacccctccacggccaatacagtggatagaactaatcatcagatcagagatccaatatcaaaccttcccagggtgtctgtattctga

SEQ ID NO: 104081 - DNA, 1481 bp, Artificial Sequence
  derived and/or modified sequence
gcagaggagaatgtcagatgctcagctcggtcccctccgcctgacgctcctctctgtctcagccaggactggtttctgtaagaaacagcaggagctgtggcagcggcgaaaggaagcggctgaggcgcttggaacccgaaaagtctcggtgctcctggctacctcgcacagcggtgcccgcccggccgtcagtaccatggacagcagcgctgcccccacgaacgccagcaattgcactgatgccttggcgtactcaagttgctccccagcacccagccccggttcctgggtcaacttgtcccacttagatggcaacctgtccgacccatgcggtccgaaccgcaccgacctgggcgggagagacagcctgtgccctccgaccggcagtccctccatgatcacggccatcacgatcatggccctctactccatcgtgtgcgtggtggggctcttcggaaacttcctggtcatgtatgtgattgtcagatacaccaagatgaagactgccaccaacatctacattttcaaccttgctctggcagatgccttagccaccagtaccctgcccttccagagtgtgaattacctaatgggaacatggccatttggaaccatcctttgcaagatagtgatctccatagattactataacatgttcaccagcatattcaccctctgcaccatgagtgttgatcgatacattgcagtctgccaccctgtcaaggccttagatttccgtactccccgaaatgccaaaattatcaatgtctgcaactggatcctctcttcagccattggtcttcctgtaatgttcatggctacaacaaaatacaggcaaggttccatagattgtacactaacattctctcatccaacctggtactgggaaaacctgctgaagatctgtgttttcatcttcgccttcattatgccagtgctcatcattaccgtgtgctatggactgatgatcttgcgcctcaagagtgtccgcatgctctctggctccaaagaaaaggacaggaatcttcgaaggatcaccaggatggtgctggtggtggtggctgtgttcatcgtctgctggactcccattcacatttacgtcatcattaaagccttggttacaatcccagaaactacgttccagactgtttcttggcacttctgcattgctctaggttacacaaacagctgcctcaacccagtcctttatgcatttctggatgaaaacttcaaacgatgcttcagagagttctgtatcccaacctcttccaacattgagcaacaaaactccactcgaattcgtcagaacactagagaccacccctccacggccaatacagtggatagaactaatcatcaggtacgcagtctctagaattaggtatatctactggggatgacataaaaattataaggctttgtgctaaactaggagtttaatccattatagaggatgagaatggagggaagaggggaagcaa

SEQ ID NO: 104082 - DNA, 2033 bp, Artificial Sequence
  derived and/or modified sequence
cctgtaaagaaaatgatgagggctaaatccatcagcaccaaagctgggaagccctccaggttcatttggaagaaaatactcctctgagctcaaaggaagtgtgatctgtcacaatattgtatgcctgcactaagtttgcatcctgaaaactcactggaagataggaaagcaagcatgaaaaagcagccgggtcagacaggcttctggattcagtgtgtggacatgactttgcctgcatgaattgcccctttctcctacaaacaagagaattcggtcaagtggatgtggcagaactgggctgctctgagatgatagaaaagggctcctgcttttcctgtaattgcagccccttgttcttgtggttgctacatgcaataaatgtaattctatgagaaggaccagcccttacatcccatcaaaatgtttcctggaaacctggagcacagaactctgatatcctctcacactgtggcaggagaagcagcacaaggcacaatgctgaaatagcatggtccaggatgtgtttgcacagaagagtgcccagtgaagagacctactccttggatcgctttgcgcaaaatccaccccttttccctcctccctcccttccagcctccgaatcccgcatggcccacgctcccctcctgcagcggtgcggggcagccaggactggtttctgtaagaaacagcaggagctgtggcagcggcgaaaggaagcggctgaggcgcttggaacccgaaaagtctcggtgctcctggctacctcgcacagcggtgcccgcccggccgtcagtaccatggacagcagcgctgcccccacgaacgccagcaattgcactgatgccttggcgtactcaagttgctccccagcacccagccccggttcctgggtcaacttgtcccacttagatggcaacctgtccgacccatgcggtccgaaccgcaccgacctgggcgggagagacagcctgtgccctccgaccggcagtccctccatgatcacggccatcacgatcatggccctctactccatcgtgtgcgtggtggggctcttcggaaacttcctggtcatgtatgtgattgtcagatacaccaagatgaagactgccaccaacatctacattttcaaccttgctctggcagatgccttagccaccagtaccctgcccttccagagtgtgaattacctaatgggaacatggccatttggaaccatcctttgcaagatagtgatctccatagattactataacatgttcaccagcatattcaccctctgcaccatgagtgttgatcgatacattgcagtctgccaccctgtcaaggccttagatttccgtactccccgaaatgccaaaattatcaatgtctgcaactggatcctctcttcagccattggtcttcctgtaatgttcatggctacaacaaaatacaggcaaggttccatagattgtacactaacattctctcatccaacctggtactgggaaaacctgctgaagatctgtgttttcatcttcgccttcattatgccagtgctcatcattaccgtgtgctatggactgatgatcttgcgcctcaagagtgtccgcatgctctctggctccaaagaaaaggacaggaatcttcgaaggatcaccaggatggtgctggtggtggtggctgtgttcatcgtctgctggactcccattcacatttacgtcatcattaaagccttggttacaatcccagaaactacgttccagactgtttcttggcacttctgcattgctctaggttacacaaacagctgcctcaacccagtcctttatgcatttctggatgaaaacttcaaacgatgcttcagagagttctgtatcccaacctcttccaacattgagcaacaaaactccactcgaattcgtcagaacactagagaccacccctccacggccaatacagtggatagaactaatcatcagctagaaaatctggaagcagaaactgctccgttgccctaacagggtctcatgccattccgaccttcaccaagc

SEQ ID NO: 104083 - DNA, 2217 bp, Artificial Sequence
  derived and/or modified sequence
cggtgctcctggctacctcgcacagcggtgcccgcccggccgtcagtaccatggacagcagcgctgcccccacgaacgccagcaattgcactgatgccttggcgtactcaagttgctccccagcacccagccccggttcctgggtcaacttgtcccacttagatggcaacctgtccgacccatgcggtccgaaccgcaccgacctgggcgggagagacagcctgtgccctccgaccggcagtccctccatgatcacggccatcacgatcatggccctctactccatcgtgtgcgtggtggggctcttcggaaacttcctggtcatgtatgtgattgtcagatacaccaagatgaagactgccaccaacatctacattttcaaccttgctctggcagatgccttagccaccagtaccctgcccttccagagtgtgaattacctaatgggaacatggccatttggaaccatcctttgcaagatagtgatctccatagattactataacatgttcaccagcatattcaccctctgcaccatgagtgttgatcgatacattgcagtctgccaccctgtcaaggccttagatttccgtactccccgaaatgccaaaattatcaatgtctgcaactggatcctctcttcagccattggtcttcctgtaatgttcatggctacaacaaaatacaggcaaggttccatagattgtacactaacattctctcatccaacctggtactgggaaaacctgctgaagatctgtgttttcatcttcgccttcattatgccagtgctcatcattaccgtgtgctatggactgatgatcttgcgcctcaagagtgtccgcatgctctctggctccaaagaaaaggacaggaatcttcgaaggatcaccaggatggtgctggtggtggtggctgtgttcatcgtctgctggactcccattcacatttacgtcatcattaaagccttggttacaatcccagaaactacgttccagactgtttcttggcacttctgcattgctctaggttacacaaacagctgcctcaacccagtcctttatgcatttctggatgaaaacttcaaacgatgcttcagagagttctgtatcccaacctcttccaacattgagcaacaaaactccactcgaattcgtcagaacactagagaccacccctccacggccaatacagtggatagaactaatcatcagagagaaagaagacagaaatctgactggtaagaaattgttacccttttgccagcatgccaggcttctgggttccctttccctgagcggccctagtgatccggcttgcggcaccatcgcctacgggccaagctgcatcataaaggaaatttttttttttcattctggccagagcaaaacacatgtgataaaacataggcattagctactctgcttagcaccaaatatcagactagcttaaatttgcccccagatgggttccatcatctttaatccgacctctgacttgcagtttcaacacgtgctctctgggcaaaacagttgccctgagtaacagaaaagataggaaaggaaaaggagagagagaaaaacgtgccagtggaagggtggggaaggtgaaatgatcaaggaggccagagaaagactcacctattgcagcaacactgtagaagttcaggcagctgcttctcggtagcaaaaggatcttttccagcaatcctattagctctcaagtttccccttttagggaggaaaaagctccccatgtcccgcgatcctgtacatgtccaaccctgccatccacagccatcagcaaagagtgcaagacagattaatccaaagagaatagcaattaatatcccatagcatcaaagctgttcttagccaagagggactttaacgagaggggtctctaacaccctaaatcttagaagagactctaaccatcctaagtagggcctctaaccccgctttataaacttttaattgactcccatcttaacagttgcaatccatggaggaatgcttgataacctcggtgataagataaaaaaccaagcatactagaagtgttctctaaaattaaaaatacagtagttactagagaaaaattttagtccaaaaatccaactatagaaacatagaatgtgagaggtagcacataagaaataagtcatggggattttatttcatggaccagcaatatgatgataaaagccatctaacc

SEQ ID NO: 104084 - DNA, 1352 bp, Artificial Sequence
  derived and/or modified sequence
gaaaggaagcggctgaggcgcttggaacccgaaaagtctcggtgctcctggctacctcgcacagcggtgcccgcccggccgtcagtaccatggacagcagcgctgcccccacgaacgccagcaattgcactgatgccttggcgtactcaagttgctccccagcacccagccccggttcctgggtcaacttgtcccacttagatggcaacctgtccgacccatgcggtccgaaccgcaccgacctgggcgggagagacagcctgtgccctccgaccggcagtccctccatgatcacggccatcacgatcatggccctctactccatcgtgtgcgtggtggggctcttcggaaacttcctggtcatgtatgtgattgtcagatacaccaagatgaagactgccaccaacatctacattttcaaccttgctctggcagatgccttagccaccagtaccctgcccttccagagtgtgaattacctaatgggaacatggccatttggaaccatcctttgcaagatagtgatctccatagattactataacatgttcaccagcatattcaccctctgcaccatgagtgttgatcgatacattgcagtctgccaccctgtcaaggccttagatttccgtactccccgaaatgccaaaattatcaatgtctgcaactggatcctctcttcagccattggtcttcctgtaatgttcatggctacaacaaaatacaggcaaggttccatagattgtacactaacattctctcatccaacctggtactgggaaaacctgctgaagatctgtgttttcatcttcgccttcattatgccagtgctcatcattaccgtgtgctatggactgatgatcttgcgcctcaagagtgtccgcatgctctctggctccaaagaaaaggacaggaatcttcgaaggatcaccaggatggtgctggtggtggtggctgtgttcatcgtctgctggactcccattcacatttacgtcatcattaaagccttggttacaatcccagaaactacgttccagactgtttcttggcacttctgcattgctctaggttacacaaacagctgcctcaacccagtcctttatgcatttctggatgaaaacttcaaacgatgcttcagagagttctgtatcccaacctcttccaacattgagcaacaaaactccactcgaattcgtcagaacactagagaccacccctccacggccaatacagtggatagaactaatcatcagaaaatagatttatttcaaaagtcatctttactcaactgtgagcataccaagggctaataattacaatattttcccgtgaaagaatataagattggaagc

SEQ ID NO: 104085 - DNA, 2594 bp, Artificial Sequence
  derived and/or modified sequence
cggtgctcctggctacctcgcacagcggtgcccgcccggccgtcagtaccatggacagcagcgctgcccccacgaacgccagcaattgcactgatgccttggcgtactcaagttgctccccagcacccagccccggttcctgggtcaacttgtcccacttagatggcaacctgtccgacccatgcggtccgaaccgcaccgacctgggcgggagagacagcctgtgccctccgaccggcagtccctccatgatcacggccatcacgatcatggccctctactccatcgtgtgcgtggtggggctcttcggaaacttcctggtcatgtatgtgattgtcagatacaccaagatgaagactgccaccaacatctacattttcaaccttgctctggcagatgccttagccaccagtaccctgcccttccagagtgtgaattacctaatgggaacatggccatttggaaccatcctttgcaagatagtgatctccatagattactataacatgttcaccagcatattcaccctctgcaccatgagtgttgatcgatacattgcagtctgccaccctgtcaaggccttagatttccgtactccccgaaatgccaaaattatcaatgtctgcaactggatcctctcttcagccattggtcttcctgtaatgttcatggctacaacaaaatacaggcaaggttccatagattgtacactaacattctctcatccaacctggtactgggaaaacctgctgaagatctgtgttttcatcttcgccttcattatgccagtgctcatcattaccgtgtgctatggactgatgatcttgcgcctcaagagtgtccgcatgctctctggctccaaagaaaaggacaggaatcttcgaaggatcaccaggatggtgctggtggtggtggctgtgttcatcgtctgctggactcccattcacatttacgtcatcattaaagccttggttacaatcccagaaactacgttccagactgtttcttggcacttctgcattgctctaggttacacaaacagctgcctcaacccagtcctttatgcatttctggatgaaaacttcaaacgatgcttcagagagttctgtatcccaacctcttccaacattgagcaacaaaactccactcgaattcgtcagaacactagagaccacccctccacggccaatacagtggatagaactaatcatcagatcagagatccaatatcaaaccttcccagggtgtctgtattctgacaactgtccactgaggcaatttccatacagcgcaaagtggagtggcgatttggcagttatcaagggacctccagccaagtttgttgctgaccaacttgccgggtcgtcttgaaaagggggcttacaggtgttccaagcccgtgttttatcctgaagtatccctcaacacagaaaaacgacctcataacacaaaatacaccagcttaaaaatagcctttgaattatttttcacattaatcaaaactttacagaggagataaacactgatttttttattttattttattttattttattttattttattgccattcattcaaccgtttgcacagagagaaagaagacagaaatctgactggtaagaaattgttacccttttgccagcatgccaggcttctgggttccctttccctgagcggccctagtgatccggcttgcggcaccatcgcctacgggccaagctgcatcataaaggaaatttttttttttcattctggccagagcaaaacacatgtgataaaacataggcattagctactctgcttagcaccaaatatcagactagcttaaatttgcccccagatgggttccatcatctttaatccgacctctgacttgcagtttcaacacgtgctctctgggcaaaacagttgccctgagtaacagaaaagataggaaaggaaaaggagagagagaaaaacgtgccagtggaagggtggggaaggtgaaatgatcaaggaggccagagaaagactcacctattgcagcaacactgtagaagttcaggcagctgcttctcggtagcaaaaggatcttttccagcaatcctattagctctcaagtttccccttttagggaggaaaaagctccccatgtcccgcgatcctgtacatgtccaaccctgccatccacagccatcagcaaagagtgcaagacagattaatccaaagagaatagcaattaatatcccatagcatcaaagctgttcttagccaagagggactttaacgagaggggtctctaacaccctaaatcttagaagagactctaaccatcctaagtagggcctctaaccccgctttataaacttttaattgactcccatcttaacagttgcaatccatggaggaatgcttgataacctcggtgataagataaaaaaccaagcatactagaagtgttctctaaaattaaaaatacagtagttactagagaaaaattttagtccaaaaatccaactatagaaacatagaatgtgagaggtagcacataagaaataagtcatggggattttatttcatggaccagcaatatgatgataaaagccatctaacc

SEQ ID NO: 104086 - DNA, 1001 bp, Artificial Sequence
  derived and/or modified sequence
gtcttcctgtaaagaaaatgatgagggctaaatccatcagcaccaaagctgggaagccctccaggttcatttggaagaaaatactcctctgagctcaaaggaagtgtgatctgtcacaatattgtatgcctgcactaagtttgcatcctgaaaactcactggaagataggaaagcaagcatgaaaaagcagccgggtcagacaggcttctggattcagtgtgtggacatgactttgcctgcatgaattgcccctttctcctacaaacaagagaattcggtcaagtggatgtggcagaactgggctgctctgagatgatagaaaagggctcctgcttttcctgtaattgcagccccttgttcttgtggttgctacatgcaataaatgtaattctatgagaaggaccagcccttacatcccatcaaaatgtttcctggaaacctggagcacagaactctgatatcctctcacactgtggcaggagaagcagcacaaggcacaatgctgaaatagcatggtccaggccaggactggtttctgtaagaaacagcaggagctgtggcagcggcgaaaggaagcggctgaggcgcttggaacccgaaaagtctcggtgctcctggctacctcgcacagcggtgcccgcccggccgtcagtaccatggacagcagcgctgcccccacgaacgccagcaattgcactgatgccttggcgtactcaagttgctccccagcacccagccccggttcctgggtcaacttgtcccacttagatggcaacctgtccgacccatgcggtccgaaccgcaccgacctgggcgggagagacagcctgtgccctccgaccggcagtccctccatgatcacggccatcacgatcatggccctctactccatcgtgtgcgtggtggggctcttcggaaacttcctggtcatgtatgtgattgtcagatacaccaagatgaagactgccaccaacatctacattttcaaccttgctctggc

SEQ ID NO: 104087 - DNA, 1468 bp, Artificial Sequence
  derived and/or modified sequence
gcttggaacccgaaaagtctcggtgctcctggctacctcgcacagcggtgcccgcccggccgtcagtaccatggacagcagcgctgcccccacgaacgccagcaattgcactgatgccttggcgtactcaagttgctccccagcacccagccccggttcctgggtcaacttgtcccacttagatggcaacctgtccgacccatgcggtccgaaccgcaccgacctgggcgggagagacagcctgtgccctccgaccggcagtccctccatgatcacggccatcacgatcatggccctctactccatcgtgtgcgtggtggggctcttcggaaacttcctggtcatgtatgtgattgtcagatacaccaagatgaagactgccaccaacatctacattttcaaccttgctctggcagatgccttagccaccagtaccctgcccttccagagtgtgaattacctaatgggaacatggccatttggaaccatcctttgcaagatagtgatctccatagattactataacatgttcaccagcatattcaccctctgcaccatgagtgttgatcgatacattgcagtctgccaccctgtcaaggccttagatttccgtactccccgaaatgccaaaattatcaatgtctgcaactggatcctctcttcagccattggtcttcctgtaatgttcatggctacaacaaaatacaggcaaggttccatagattgtacactaacattctctcatccaacctggtactgggaaaacctgctgaagatctgtgttttcatcttcgccttcattatgccagtgctcatcattaccgtgtgctatggactgatgatcttgcgcctcaagagtgtccgcatgctctctggctccaaagaaaaggacaggaatcttcgaaggatcaccaggatggtgctggtggtggtggctgtgttcatcgtctgctggactcccattcacatttacgtcatcattaaagccttggttacaatcccagaaactacgttccagactgtttcttggcacttctgcattgctctaggttacacaaacagctgcctcaacccagtcctttatgcatttctggatgaaaacttcaaacgatgcttcagagagttctgtatcccaacctcttccaacattgagcaacaaaactccactcgaattcgtcagaacactagagaccacccctccacggccaatacagtggatagaactaatcatcagatcagagatccaatatcaaaccttcccagggtgtctgtattctgacaactgtccactgaggcaatttccatacagcgcaaagtggagtggcgatttggcagttatcaagctagaaaatctggaagcagaaactgctccgttgccctaacagggtctcatgccattccgaccttcaccaagcttagaagccaccatgtatgtggaagcaggttgcttcaagaatgtgtaggaggc

SEQ ID NO: 104088 - DNA, 1251 bp, Artificial Sequence
  derived and/or modified sequence
cggtgctcctggctacctcgcacagcggtgcccgcccggccgtcagtaccatggacagcagcgctgcccccacgaacgccagcaattgcactgatgccttggcgtactcaagttgctccccagcacccagccccggttcctgggtcaacttgtcccacttagatggcaacctgtccgacccatgcggtccgaaccgcaccgacctgggcgggagagacagcctgtgccctccgaccggcagtccctccatgatcacggccatcacgatcatggccctctactccatcgtgtgcgtggtggggctcttcggaaacttcctggtcatgtatgtgattgtcagatacaccaagatgaagactgccaccaacatctacattttcaaccttgctctggcagatgccttagccaccagtaccctgcccttccagagtgtgaattacctaatgggaacatggccatttggaaccatcctttgcaagatagtgatctccatagattactataacatgttcaccagcatattcaccctctgcaccatgagtgttgatcgatacattgcagtctgccaccctgtcaaggccttagatttccgtactccccgaaatgccaaaattatcaatgtctgcaactggatcctctcttcagccattggtcttcctgtaatgttcatggctacaacaaaatacaggcaaggttccatagattgtacactaacattctctcatccaacctggtactgggaaaacctgctgaagatctgtgttttcatcttcgccttcattatgccagtgctcatcattaccgtgtgctatggactgatgatcttgcgcctcaagagtgtccgcatgctctctggctccaaagaaaaggacaggaatcttcgaaggatcaccaggatggtgctggtggtggtggctgtgttcatcgtctgctggactcccattcacatttacgtcatcattaaagccttggttacaatcccagaaactacgttccagactgtttcttggcacttctgcattgctctaggttacacaaacagctgcctcaacccagtcctttatgcatttctggatgaaaacttcaaacgatgcttcagagagttctgtatcccaacctcttccaacattgagcaacaaaactccactcgaattcgtcagaacactagagaccacccctccacggccaatacagtggatagaactaatcatcagagctgactatgacatgaaccctaaaattcctgttccc

SEQ ID NO: 104089 - DNA, 1482 bp, Artificial Sequence
  derived and/or modified sequence
atgtgcctgcaccgcagagtaccttctgaagaaacatactccctagacagatttgcccagaatcctcccctattccctccaccctctctcccagctagcgagtccagaatggctcacgccccattgctccaacgatgtggcgctgccagaacaggcttctgtaagaagcagcaggagctgtggcagcgtaggaaggaagccgcagaagcgttgggtactagaaaggtgagcgtcctcctggcaacttcccattcaggcgctcgtccagctgtgtcgacaatggactcctcagccgcaccaaccaatgctagcaattgtactgatgctcttgcatactcgagctgctcccccgcaccttcccctggctcatgggtcaaccttagtcaccttgacggcaacctctctgatccatgtggaccaaatcgcacagacctagggggaagggactccctgtgtcccccaacaggctctccttctatgatcactgcgattacaattatggcgctttatagcattgtgtgtgtggtgggattattcggaaatttcctagtcatgtatgtcattgtgcgctatacgaaaatgaagacggccaccaacatttacatttttaatctggcccttgctgatgcactcgccacctctaccttgccttttcagtctgtgaactatctgatgggaacctggccctttggcacgatcttgtgcaaaattgtaatctcaattgactactacaatatgtttacttctatcttcaccctctgcactatgtctgtggatcggtatatagccgtgtgtcaccccgtcaaggccttggatttcaggacacctaggaatgctaagattataaacgtgtgtaattggatactgtccagtgccatagggctccctgtaatgtttatggccaccaccaagtatcgccagggcagtatcgattgcacccttacttttagtcatcccacctggtactgggaaaacttactcaagatctgcgtgttcatttttgctttcatcatgcccgtgctcattatcactgtgtgttatggactcatgatactgaggttaaagagtgtgaggatgctgtctgggagtaaggaaaaggatcgaaacctcaggcggataacaagaatggttcttgtggtagttgctgttttcatcgtgtgctggaccccaattcacatctacgtgattattaaggcccttgtgactatcccagaaacgacattccagactgtgtcctggcacttttgcatagcgctgggctataccaactcttgcctgaatccggtattgtacgcatttttagacgagaacttcaaaagatgttttagagagttctgcattccgaccagcagcaacatcgaacagcaaaattcaacccgcatcagacagaacacaagagaccaccccagtaccgccaataccgtggaccgtaccaaccaccaactggaaaacctcgaagctgagaccgctcctctgccttag

SEQ ID NO: 104090 - DNA, 492 bp, Artificial Sequence
  derived and/or modified sequence
atggtccaggccaggacaggattctgcaaaaaacaacaggagctgtggcagagaaggaaagaggcggcagaggctttaggaacccgaaaagtgtctgtactcctggcaacatcgcactccggagctcgtcctgctgtttccactatggattcatccgcagctcctacgaacgcttctaattgcaccgacgccctcgcttatagcagctgctccccggctccatcccccggatcgtgggtaaatttatctcacctggacggcaacctgtctgacccctgcggacctaacagaaccgaccttggcggaagagacagtctgtgtcccccaacgggttcaccttccatgattaccgccatcactattatggccctgtactcaattgtgtgtgtcgttggcctctttggaaattttctggtgatgtatgtaatcgtgcgatacaccaaaatgaagaccgctacaaatatctacatttttaacttggcgctggcatag

SEQ ID NO: 104091 - DNA, 1482 bp, Artificial Sequence
  derived and/or modified sequence
atgtgcctgcacagaagagtgcccagcgaggagacctacagcctggacagattcgcccagaacccccccctgttccccccccccagcctgcccgccagcgagagcagaatggcccacgcccccctgctgcagagatgcggcgccgccagaaccggcttctgcaagaagcagcaggagctgtggcagagaagaaaggaggccgccgaggccctgggcaccagaaaggtgagcgtgctgctggccaccagccacagcggcgccagacccgccgtgagcaccatggacagcagcgccgcccccaccaacgccagcaactgcaccgacgccctggcctacagcagctgcagccccgcccccagccccggcagctgggtgaacctgagccacctggacggcaacctgagcgacccctgcggccccaacagaaccgacctgggcggcagagacagcctgtgcccccccaccggcagccccagcatgatcaccgccatcaccatcatggccctgtacagcatcgtgtgcgtggtgggcctgttcggcaacttcctggtgatgtacgtgatcgtgagatacaccaagatgaagaccgccaccaacatctacatcttcaacctggccctggccgacgccctggccaccagcaccctgcccttccagagcgtgaactacctgatgggcacctggcccttcggcaccatcctgtgcaagatcgtgatcagcatcgactactacaacatgttcaccagcatcttcaccctgtgcaccatgagcgtggacagatacatcgccgtgtgccaccccgtgaaggccctggacttcagaacccccagaaacgccaagatcatcaacgtgtgcaactggatcctgagcagcgccatcggcctgcccgtgatgttcatggccaccaccaagtacagacagggcagcatcgactgcaccctgaccttcagccaccccacctggtactgggagaacctgctgaagatctgcgtgttcatcttcgccttcatcatgcccgtgctgatcatcaccgtgtgctacggcctgatgatcctgagactgaagagcgtgagaatgctgagcggcagcaaggagaaggacagaaacctgagaagaatcaccagaatggtgctggtggtggtggccgtgttcatcgtgtgctggacccccatccacatctacgtgatcatcaaggccctggtgaccatccccgagaccaccttccagaccgtgagctggcacttctgcatcgccctgggctacaccaacagctgcctgaaccccgtgctgtacgccttcctggacgagaacttcaagagatgcttcagagagttctgcatccccaccagcagcaacatcgagcagcagaacagcaccagaatcagacagaacaccagagaccaccccagcaccgccaacaccgtggacagaaccaaccaccagctggagaacctggaggccgagaccgcccccctgccctag

SEQ ID NO: 104092 - DNA, 492 bp, Artificial Sequence
  derived and/or modified sequence
atggtgcaggccagaaccggcttctgcaagaagcagcaggagctgtggcagagaagaaaggaggccgccgaggccctgggcaccagaaaggtgagcgtgctgctggccaccagccacagcggcgccagacccgccgtgagcaccatggacagcagcgccgcccccaccaacgccagcaactgcaccgacgccctggcctacagcagctgcagccccgcccccagccccggcagctgggtgaacctgagccacctggacggcaacctgagcgacccctgcggccccaacagaaccgacctgggcggcagagacagcctgtgcccccccaccggcagccccagcatgatcaccgccatcaccatcatggccctgtacagcatcgtgtgcgtggtgggcctgttcggcaacttcctggtgatgtacgtgatcgtgagatacaccaagatgaagaccgccaccaacatctacatcttcaacctggccctggcctag

SEQ ID NO: 104093 - DNA, 495 bp, Artificial Sequence
  derived and/or modified sequence
atgtgcaaactacggcctctactccagaaatgggtggaagaggctgataacaatgaaaatctgcaggagatttgtaaggccgagacactggtgcaagctagaaagagaaaacgcactagcattgaaaaccgcgtgcgggggaatctcgagaatcttttccttcagtgtcctaaacctactctgcaacaaatttcccacatagcccagcagctggggttagaaaaagacgtcgtgagagtgtggttttgtaaccggaggcagaaaggcaagcggtcttcctccgactatgcccagcgggaagacttcgaagcggccggctctcctttctcagggggccccgtgtcatttcccctcgctcctggacctcacttcggcacaccaggctacgggagcccccacttcactgcattatattcgagtgtaccctttcccgagggtgaagcctttccacctgtgtcagttaccacactgggatcacccatgcacagcaattag

SEQ ID NO: 104094 - DNA, 495 bp, Artificial Sequence
  derived and/or modified sequence
atgtgcaagctgcgtcccctgctccaaaagtgggtggaagaggccgacaataatgagaacttacaagagatctgtaaggcagagactcttgtccaagctcggaagaggaagcggactagtattgaaaacagggtgcgcggtaatctggaaaacctatttctgcagtgtccaaagcctacacttcaacagatcagccacattgcacaacagctgggcctcgaaaaggatgtcgttcgcgtttggttctgcaatcgaaggcaaaaaggtaaaagatcttcatccgattatgcgcaaagagaagactttgaggctgctggctctcccttctctgggggccccgtctcgttccccttggctcctggaccacacttcggtactccaggctacggatctccacactttacagcactgtactcctcggtgcctttccccgagggcgaggctttcccacccgtgtctgttactaccttaggcagtccaatgcactccaattag

SEQ ID NO: 104095 - DNA, 495 bp, Artificial Sequence
  derived and/or modified sequence
atgtgcaagctgcggcccctgctgcagaagtgggtggaggaggccgacaacaatgaaaacctgcaggagatctgcaaggccgagaccctggtgcaggccaggaagaggaagaggaccagcattgagaacagagtgcggggcaacctggagaacctcttcctgcagtgccccaagcccaccctgcagcagatcagccacatcgcccagcagctgggcctggagaaggatgtggtgcgggtgtggttctgcaacagacggcagaagggcaagaggagcagcagtgactatgcccagcgggaggactttgaggccgccggcagccccttcagcggcggccctgtgtccttccccctggcccctggcccccacttcggcaccccaggctacggcagcccccacttcaccgccctgtacagctctgtgcccttccctgagggggaggccttcccccctgtgtctgtgaccaccctgggcagccccatgcacagcaactag

SEQ ID NO: 104096 - DNA, 495 bp, Artificial Sequence
  derived and/or modified sequence
atgtgcaagctgcggcccctgctgcagaagtgggtggaggaggccgataataatgagaatttgcaagaaatctgcaaagccgaaaccctggtgcaggcccggaaaagaaagcgcaccagtatcgagaaccgggtgaggggtaatttggaaaatctgttcctccaatgccccaagccaactttgcaacagatctcgcacatagcccaacagctgggtctggaaaaggatgtggttagggtgtggttctgtaacagacgccagaagggcaaacgctcaagtagcgattacgcccagagggaggattttgaagccgctggatctccattcagcggcggccctgtgagtttcccattggctccgggacctcactttggcaccccagggtatggaagccctcacttcacggctctgtacagctcagtgcctttcccggagggcgaggcctttccaccagtctccgtgaccaccctggggtcaccgatgcacagcaattag

SEQ ID NO: 104097 - DNA, 495 bp, Artificial Sequence
  derived and/or modified sequence
atgtgcaagctgcggcccctgctgcagaagtgggtggaggaggccgacaataatgaaaatctgcaagagatttgcaaggcggaaacgctggtgcaagcacgcaagagaaaacggaccagcatcgagaaccgagtgcgagggaacctcgaaaacctctttttacagtgccccaaacctactctgcaacagatctctcacattgcccagcaattaggcctcgagaaagacgtagtaagagtgtggttctgcaatcggagacagaaaggcaaaaggtcctcctcagattacgcccagcgggaagacttcgaggcagctggcagccctttcagcgggggaccagtttcattccccctcgcgccaggaccacattttggcaccccagggtatggaagcccacactttaccgcgctctactcgtctgtgccttttccagagggggaggctttcccacctgtatccgttactaccctcggttccccaatgcactcaaattag

SEQ ID NO: 104098 - DNA, 495 bp, Artificial Sequence
  derived and/or modified sequence
atgtgcaagttgcgtcccctcctgcagaagtgggtggaagaggctgataacaatgagaatctgcaggaaatttgcaaggccgagactttggtccaggccaggaagcgcaagcggacgagcattgagaaccgcgtccgaggtaatctggagaatctgttcctccagtgtccaaagcctactctccaacaaatttcacatattgcccagcagttagggctagagaaagacgtcgtgagggtgtggttctgcaacagaaggcaaaagggaaagagatcctcctccgactatgcccagcgtgaagatttcgaggcagctggctcccctttctcgggcggtcccgtttctttcccccttgccccaggccctcattttggcacaccgggatatggatctcctcacttcactgccctgtacagttctgtacctttccccgagggcgaggcattcccccctgtcagcgtgaccacgctcgggagtccaatgcacagcaactag

SEQ ID NO: 104099 - DNA, 495 bp, Artificial Sequence
  derived and/or modified sequence
atgtgtaaactacgccctctcctgcaaaagtgggtggaggaggccgataacaatgagaatcttcaagaaatttgcaaagccgagacgctggtgcaggcacgaaagaggaagaggacgagcatcgagaaccgggttcggggtaacttagagaatcttttcctgcagtgtcccaaaccaacgctacagcagatctcccacatcgctcaacagttgggcctcgagaaggatgttgtgcgggtctggttttgcaaccggaggcagaaaggcaaacggagctcttctgattacgctcagagggaagattttgaagcagcaggtagtccattcagtgggggacccgtctctttccctttggccccaggcccacacttcggtactccgggatatgggagcccccatttcacagctctgtatagtagtgtcccattccccgagggtgaggcctttccaccagtcagcgtcacaacactaggttccccaatgcattctaactag

SEQ ID NO: 104100 - DNA, 495 bp, Artificial Sequence
  derived and/or modified sequence
atgtgcaagctgagacccctgctgcagaagtgggtggaggaggccgacaacaacgagaacctgcaggagatctgcaaggccgagaccctggtgcaggccagaaagagaaagagaaccagcatcgagaacagagtgagaggcaacctggagaacctgttcctgcagtgccccaagcccaccctgcagcagatcagccacatcgcccagcagctgggcctggagaaggacgtggtgagagtgtggttctgcaacagaagacagaagggcaagagaagcagcagcgactacgcccagagagaggacttcgaggccgccggcagccccttcagcggcggccccgtgagcttccccctggcccccggcccccacttcggcacccccggctacggcagcccccacttcaccgccctgtacagcagcgtgcccttccccgagggcgaggccttcccccccgtgagcgtgaccaccctgggcagccccatgcacagcaactag

SEQ ID NO: 104101 - protein, 265 aa, Artificial Sequence
  derived and/or modified sequence
MHFYRLFLGATRRFLNPEWKGEIDNWCVYVLTSLLPFKIQSQDIKALQKELEQFAKLLKQKRITLGYTQADVGLTLGVLFGKVFSQTTICRFEALQLSFKNMCKLRPLLQKWVEEADNNENLQEICKAETLVQARKRKRTSIENRVRGNLENLFLQCPKPTLQQISHIAQQLGLEKDVVRVWFCNRRQKGKRSSSDYAQREDFEAAGSPFSGGPVSFPLAPGPHFGTPGYGSPHFTALYSSVPFPEGEAFPPVSVTTLGSPMHSN

SEQ ID NO: 104102 - protein, 164 aa, Artificial Sequence
  derived and/or modified sequence
MCKLRPLLQKWVEEADNNENLQEICKAETLVQARKRKRTSIENRVRGNLENLFLQCPKPTLQQISHIAQQLGLEKDVVRVWFCNRRQKGKRSSSDYAQREDFEAAGSPFSGGPVSFPLAPGPHFGTPGYGSPHFTALYSSVPFPEGEAFPPVSVTTLGSPMHSN

SEQ ID NO: 104103 - DNA, 798 bp, Artificial Sequence
  derived and/or modified sequence
atgcacttctacagactgttcctgggcgccaccagaagattcctgaaccccgagtggaagggcgagatcgacaactggtgcgtgtacgtgctgaccagcctgctgcccttcaagatccagagccaggacatcaaggccctgcagaaggagctggagcagttcgccaagctgctgaagcagaagagaatcaccctgggctacacccaggccgacgtgggcctgaccctgggcgtgctgttcggcaaggtgttcagccagaccaccatctgcagattcgaggccctgcagctgagcttcaagaacatgtgcaagctgagacccctgctgcagaagtgggtggaggaggccgacaacaacgagaacctgcaggagatctgcaaggccgagaccctggtgcaggccagaaagagaaagagaaccagcatcgagaacagagtgagaggcaacctggagaacctgttcctgcagtgccccaagcccaccctgcagcagatcagccacatcgcccagcagctgggcctggagaaggacgtggtgagagtgtggttctgcaacagaagacagaagggcaagagaagcagcagcgactacgcccagagagaggacttcgaggccgccggcagccccttcagcggcggccccgtgagcttccccctggcccccggcccccacttcggcacccccggctacggcagcccccacttcaccgccctgtacagcagcgtgcccttccccgagggcgaggccttcccccccgtgagcgtgaccaccctgggcagccccatgcacagcaactag

SEQ ID NO: 104104 - DNA, 798 bp, Artificial Sequence
  derived and/or modified sequence
atgcacttctaccggctgtttcttggagcaacgagacgctttctaaaccctgagtggaaaggcgagatcgataactggtgcgtctacgttctcacttctctgctgcccttcaagatccaatcgcaggatatcaaagctctgcagaaagaactggaacagttcgcaaaactccttaagcagaaacgcattaccctgggctatactcaagcagatgtgggtctcactctgggggttctgttcggcaaagttttttctcaaaccaccatatgcaggttcgaagctcttcaactctcatttaaaaacatgtgcaagctacgccctctgcttcagaagtgggtcgaggaggccgataacaacgagaacctgcaagagatatgtaaagcagaaaccctcgtgcaggccagaaagagaaagagaactagcattgagaacagggtaaggggtaatttggagaatctgttccttcagtgtcccaaacccactctgcaacagataagtcacattgcacaacagctgggcctggaaaaggacgttgtgcgagtatggttctgtaatcgacgacagaagggaaaacggtcgtcaagcgactatgcacagagggaggacttcgaggccgccggctctcctttcagtggaggaccggtctcttttcccctagctcctggcccacacttcgggactcccggctacgggtctcctcacttcacagccctctatagcagtgtgcctttcccggaaggcgaggcctttccgccagtgagcgtcaccactctgggctccccgatgcactcaaattag

SEQ ID NO: 104105 - DNA, 798 bp, Artificial Sequence
  derived and/or modified sequence
atgcacttctataggctttttctcggagcaacacgacgctttctgaaccctgaatggaagggcgaaatcgacaactggtgcgtatatgtgttgacaagcctgctgcctttcaagattcagtcccaggatattaaggccctgcagaaagagcttgaacaattcgccaagctccttaaacagaagcgtattactctgggatatacacaggctgacgttggccttaccctaggcgtgctgttcggaaaagtgtttagccagaccacaatatgccggtttgaggcactgcagctctcttttaaaaatatgtgtaagttgcgacctctgctgcagaaatgggtggaagaagccgataacaacgagaacctccaggaaatctgcaaagcagagacattggttcaggcccggaagaggaagcgcacatctatcgaaaatcgagtcaggggaaacctcgaaaaccttttcttgcagtgtcctaagcccacactccaacagattagccacatagcacaacagctgggactggagaaggacgtcgtgcgagtctggttctgcaaccggcggcagaaaggcaaaaggtcttcatccgactacgcccaaagggaagacttcgaagccgcaggctctcctttttccggcgggcccgtgagtttcccgcttgccccaggcccgcatttcggaacccccggatacggatcaccgcacttcacagccctgtattcttcagttccttttccagaaggcgaggcatttccgcccgtgagtgtaacaactttggggagccctatgcactccaactag

SEQ ID NO: 104106 - DNA, 798 bp, Artificial Sequence
  derived and/or modified sequence
atgcatttttatcggctgttcctgggggctactcgcaggttcttaaatccggagtggaaaggggagatcgataattggtgtgtatacgttctgaccagcctcctgccattcaaaatccagtcacaagacatcaaggccctccagaaagaactcgagcagttcgcaaagttgttgaagcagaagcgaattacactgggctacactcaggctgacgtcggattaacacttggagtgttgttcggcaaggtgtttagtcagaccacaatctgtagatttgaggccctgcagctgagtttcaaaaacatgtgtaagttacgaccactcctccaaaaatgggttgaagaggccgacaataatgagaacctgcaggagatctgcaaggctgagacgctggtgcaggctcggaagcgtaagcgcaccagcattgagaaccgagtgagaggtaacctggagaacctcttcctccagtgcccaaagccaaccctccagcaaatcagccacatcgctcagcagttagggttggaaaaggacgtggtcagggtatggttttgcaatagacgccagaaaggcaagaggtcttctagcgattacgcccagcgggaggacttcgaagcagccggctcaccattcagcggcggcccagtctccttcccgctcgctcctggcccacactttggcacacctggatacggctcacctcactttactgctctgtactcttcagttcccttccccgagggggaggccttcccacccgtgagcgtgaccactctaggcagtccaatgcattctaattag

SEQ ID NO: 104107 - DNA, 798 bp, Artificial Sequence
  derived and/or modified sequence
atgcacttctatcggctcttcctgggcgctaccaggaggtttctcaatccggagtggaagggcgagatagacaattggtgtgtttacgtcctgacgtcactactcccctttaagattcagagtcaagacatcaaagcgcttcagaaggagcttgagcaatttgccaagctacttaagcagaagcgcatcaccctcggttacacgcaggcagatgttggcctgacgctgggggttttgttcgggaaggtgtttagccagacaaccatttgcagattcgaggctcttcagctctctttcaagaacatgtgcaagcttcgccccctcctgcagaagtgggtggaagaggctgacaataatgagaatctccaggaaatctgcaaggcagagaccctagtgcaagcccggaaaagaaagagaacgtcaatcgagaatagggtccggggaaatctggagaatctgtttctgcagtgcccaaagcctactctgcaacaaatcagccacatcgcacagcagttgggccttgaaaaggacgtggtgcgtgtctggttttgcaatcgtcgccagaaaggtaaaagaagcagctccgactacgcacagcgcgaggattttgaggctgcaggatcccctttcagcggcggacctgtgagcttcccccttgcaccagggccacattttggaactcctggttacgggagtccccacttcactgctctgtattcttctgtgccgtttccagagggagaagcctttccgccagtgtcagtgaccaccctaggcagtcccatgcacagcaattag

SEQ ID NO: 104108 - DNA, 798 bp, Artificial Sequence
  derived and/or modified sequence
atgcatttttatcgattgttcctgggagcgactcggcgatttctcaacccagaatggaagggcgagattgacaactggtgtgtgtatgtgctgactagtttgcttccattcaagatccagtcacaggatataaaggcccttcagaaggagctggaacagttcgccaagttactcaagcagaaacgaatcactttaggttatactcaggcagatgtcgggctgacactcggcgtactctttgggaaggtgttcagccagactacaatttgtaggtttgaggccctccagctatcctttaagaacatgtgcaaactgcgccctctgttgcaaaaatgggtggaagaggccgacaacaacgagaatctccaggagatctgcaaggctgagacattagttcaggcacggaaaagaaaacggacttctatagaaaatagagtccgcggaaacctcgagaacctgttcctgcagtgccccaaacctaccctgcaacagatcagccacattgcacagcagctgggtttggaaaaggatgtcgtgcgggtgtggttttgcaacagaaggcagaaaggcaaaagatccagctccgactatgctcagagagaagatttcgaagctgctgggtcaccattctcgggggggcccgtgtcgtttcctcttgctcccgggccacactttggaacccccggatacggatccccacactttaccgctctctatagttcagtcccattccctgaaggcgaggcttttccccctgtgtcagtgaccaccctgggctctcctatgcactcaaactag

SEQ ID NO: 104109 - DNA, 798 bp, Artificial Sequence
  derived and/or modified sequence
atgcacttctaccgcctcttcctgggcgccacccggcgcttcctgaaccctgagtggaagggggagattgacaactggtgtgtgtatgtgctgaccagcctgctgcccttcaagatccagagccaggacatcaaggccctgcagaaggagctggagcagtttgccaagctgctgaagcagaagaggatcaccctgggctacacccaggctgatgtgggcctgaccctgggcgtgctgtttgggaaggtgttcagccagaccaccatctgccgctttgaggccctgcagctgtccttcaagaacatgtgcaagctgcggcccctgctgcagaagtgggtggaggaggccgacaacaatgaaaacctgcaggagatctgcaaggccgagaccctggtgcaggccaggaagaggaagaggaccagcattgaaaatagagtgcggggcaacctggagaacctcttcctgcagtgccccaagcccaccctgcagcagatcagccacatcgcccagcagctgggcctggagaaggatgtggtgcgggtgtggttctgcaacagacggcagaagggcaagaggagcagcagtgactatgcccagagagaagattttgaagctgctggcagccccttcagcggcggccctgtgtccttccccctggcccctggcccccacttcggcaccccaggctacggcagcccccacttcaccgccctgtacagctctgtgcccttccctgagggggaggccttcccccctgtgtctgtgaccaccctgggcagccccatgcacagcaactag

SEQ ID NO: 104110 - DNA, 798 bp, Artificial Sequence
  derived and/or modified sequence
atgcacttctaccggctgttcctgggcgccacccggcggttcctgaatcctgagtggaaaggtgaaatcgacaattggtgtgtgtatgtgctgacctctcttttgccctttaagattcagtcacaggacattaaggccctgcagaaagaactcgagcagttcgctaagctgcttaagcaaaaaagaatcacactaggctacacacaagcagatgtgggactcaccctgggcgtcctttttggaaaggtgttctcacagacaacaatttgtaggtttgaggccctccagttgagctttaagaatatgtgtaagctaaggcccctgctccagaagtgggtggaggaggccgacaataatgaaaaccttcaggagatctgcaaggcagaaacactggtgcaggctcggaagagaaagcgaactagcatagaaaacagagtgcgtggaaacctagaaaacctctttctccaatgtcccaagccaaccctgcagcagatctcccatatcgcacaacagcttggtctggaaaaggatgtggtccgggtgtggttttgtaaccggagacagaaaggcaagaggagctcatctgattacgctcagagagaggatttcgaagccgcagggtcccctttctcaggaggcccggttagcttccctctcgctcctggtcctcacttcggaactcccggatatggtagcccacactttacagcactctatagttcagtcccatttcctgagggggaagcgtttccccctgtttcagttacaacattaggttctcccatgcacagcaactag

SEQ ID NO: 104111 - DNA, 798 bp, Artificial Sequence
  derived and/or modified sequence
atgcacttctaccggctgttcctgggcgccacccggcggttcctgaaccctgagtggaaaggcgagattgataactggtgcgtctatgtcctgacctccctgctaccatttaagattcaaagccaggatattaaggcactccaaaaggaactcgagcagttcgcaaagcttttgaagcagaagcggatcactctcggctatactcaggccgacgtcggacttaccttaggggtcctcttcggtaaggtgttctctcagacgacaatctgtcgatttgaagccctgcagttgagcttcaaaaacatgtgtaagctacgccctctacttcagaaatgggtggaggaagcagacaacaacgagaacctgcaggagatctgcaaagctgaaaccctagtccaggcaaggaaacgaaagaggacctctatcgagaaccgcgtccggggcaatctcgagaatctgttcctccagtgccccaaacccactctgcagcagataagtcacatagcgcagcagctcgggctcgagaaagacgtggtgcgtgtctggttttgtaatagacgccagaaggggaaacggagttcctctgattacgcacaacgggaagacttcgaggctgcaggcagtcccttctcaggagggccagttagctttcctttagctccagggccgcattttgggactccaggttacggctcaccacatttcactgccttgtattccagtgtgccgttccccgaaggtgaggcattcccccccgtgtcagtgacaacactaggatcccccatgcacagcaattag

SEQ ID NO: 104112 - DNA, 798 bp, Artificial Sequence
  derived and/or modified sequence
atgcacttctaccggctgttcctgggcgccacccggcggttcctgaatcccgaatggaagggggagatcgacaactggtgcgtgtacgtcctgacctcgctacttccatttaagatccaatcacaggacattaaggccttgcagaaagaactggagcagttcgctaagttactgaaacagaagagaattacattgggatacactcaggctgatgtcggcctcactctgggggtgctgttcggtaaggtgttctcacaaactactatctgtaggtttgaggccctgcaactgtccttcaagaacatgtgcaagctgagaccacttttgcagaagtgggttgaagaggcagacaataacgagaacctgcaggaaatctgcaaggcagaaacacttgtacaggcgagaaagcggaagaggacctctatagagaaccgggtaagggggaacttagaaaatctatttttgcaatgtcctaaacccactctgcaacaaatatcacacatagcccagcagctaggactggaaaaagacgtcgtccgtgtctggttttgcaaccgccggcagaagggcaagcgatcctcaagtgactacgcgcagcgtgaggacttcgaagcagctggatcaccattctcgggagggcctgtgtcatttccccttgcaccagggccccatttcggtaccccgggctacgggtcaccgcactttaccgcactgtattcctctgtgcccttcccagaaggcgaggcgtttcctcccgtctccgtgaccactctggggtctccaatgcacagcaattag

SEQ ID NO: 104113 - DNA, 798 bp, Artificial Sequence
  derived and/or modified sequence
atgcacttctaccggctgttcctgggcgccacccggcggttcctgaacccggaatggaagggtgagattgataactggtgtgtgtacgtgctgacatcattgctgccgtttaagatacaaagccaggatattaaggctcttcagaaagaattagagcaattcgcaaaattgctgaagcagaagcgcattactctgggctacacccaggccgatgtgggcctaactctcggcgttttgtttgggaaggtttttagccagactaccatctgtcgatttgaggctctgcagctgagctttaagaatatgtgcaagttaagacccttattgcaaaaatgggtagaggaagccgacaacaatgagaatttacaggaaatttgtaaggcggaaaccctggtccaagccaggaagagaaagaggacgtctattgaaaatagagttcgcggcaacttggaaaacctatttttgcagtgcccaaagccaacacttcagcagattagtcacatagcccagcaactgggtctcgaaaaggatgtggtcagggtgtggttctgcaatagacgccaaaaggggaaaaggtcttcctcagattacgctcagagggaggatttcgaggccgccggtagccctttttcggggggccccgtctcgtttcctttggcacctggcccccactttgggacccctgggtacggttccccacactttaccgcattgtactccagtgttcccttccccgagggagaggccttcccgcccgtaagcgtgacaactctcgggtcccctatgcatagcaactag

SEQ ID NO: 104114 - DNA, 798 bp, Artificial Sequence
  derived and/or modified sequence
atgcacttctaccggctgttcctgggcgccacccggcggttcctgaacccagaatggaagggagagattgacaattggtgtgtctatgtgctcaccagcctactgccatttaagatacagtcccaagacataaaagctttgcagaaggagttggagcagttcgccaaattgttaaaacagaaaaggataacattggggtatacccaagccgatgttggtctcacactgggcgtcctgttcggcaaggtattcagccagactacaatttgcaggtttgaggccctgcagctgtccttcaagaatatgtgcaaattaaggccgctcttacagaaatgggtggaagaagctgacaataatgagaacctccaggaaatctgtaaggcagagacactcgtgcaggctcgcaaacgaaaacgcactagtattgaaaacagagttcgcggcaacctggagaacctgttcctgcagtgcccgaaacccaccctccagcagatctcacatatcgcacaacagttgggcttggaaaaagacgttgtgagagtttggttctgcaaccggcggcaaaagggaaagcgctcctcatccgactatgcccagcgggaggattttgaggcagccggctccccattctccggaggacccgtgagctttcccctcgcgccgggccctcacttcgggacccccgggtatggaagccctcactttaccgctctctacagctccgtgccatttccagagggcgaagcctttcccccagtgagcgtcacaaccctgggaagcccgatgcattccaattag

SEQ ID NO: 104115 - DNA, 798 bp, Artificial Sequence
  derived and/or modified sequence
atgcatttctatcgcttgtttctgggggctacacggcgattcctaaatccagagtggaaaggtgaaatcgacaattggtgtgtgtatgtccttacatccctgcttcctttcaagatccagagccaggacatcaaggctttgcagaaagaactagagcaatttgccaaactgcttaaacagaagaggattacactaggatacacacaggcagatgttggactgacactgggagtgttgtttggtaaggtattcagccagaccactatctgccgatttgaagccctgcagctgtcatttaaaaacatgtgcaaactaaggccattactgcagaagtgggtggaggaagccgataacaacgagaatctacaggagatctgtaaagctgagactctagtgcaggctagaaaacgcaaacgcacgtctattgaaaatagagtccgcggaaaccttgaaaatctcttcctccaatgccccaaacctaccttgcagcaaatttcccatatcgcacaacagctggggctagaaaaagatgttgtgcgggtgtggttctgcaaccggaggcaaaagggcaagcgatcctctagcgattacgcccaacgcgaggacttcgaggcagcgggttcgccattttcaggcggacccgtttcatttcccctggcaccaggccctcacttcggcacgcctggatacgggtcgccccacttcaccgcactgtacagtagcgttccgtttcccgagggagaagccttcccaccggtgtccgtaactacactaggatcgcctatgcattctaattag

SEQ ID NO: 104116 - DNA, 798 bp, Artificial Sequence
  derived and/or modified sequence
atgcacttctatcggctgttcctgggggctacaagacgctttttaaaccccgagtggaagggagagatcgacaattggtgtgtttacgtgctgacctcccttctgccgttcaaaatccagtcccaggatatcaaggcactgcagaaggaacttgaacaattcgccaagctcctgaagcaaaaacgtattactttgggatatacccaggccgacgtgggcctcacgctgggggttcttttcggaaaagtgttctcacaaaccaccatttgccgattcgaggccctgcagctgagcttcaagaatatgtgtaagctaaggcctttgctgcagaaatgggtcgaggaggcagataacaacgaaaacttacaggagatttgtaaggccgaaactttggtgcaggcgcgaaaacggaagaggacatcaatcgagaacagagtgcgaggaaacctggaaaacctattcctgcaatgtcctaaaccaacactgcagcagatcagtcacattgcacagcaactcgggttggaaaaagatgtcgtgagggtatggttctgtaatagacggcagaagggtaagcggtcttctagcgactacgcccaacgagaggactttgaggctgccggatctcctttcagcggtggaccggtttcattccccctggcccctggtccccatttcggaacacccggatatggcagccctcactttacggcgctgtactcttctgtgccattccccgaaggagaagcattcccacccgtatcagtgaccactcttgggtctcctatgcacagcaattag

SEQ ID NO: 104117 - DNA, 798 bp, Artificial Sequence
  derived and/or modified sequence
atgcatttctaccgcctcttcctaggtgcgactagacgattccttaaccccgagtggaaaggagaaatcgacaactggtgcgtgtacgtgctaacgagccttctgccatttaaaatccagagccaggatatcaaagccctgcagaaagagttggagcaatttgccaagcttctcaagcaaaaaagaataacactggggtatacgcaggccgatgtgggtctaactctcggtgtgctctttggcaaggtctttagccaaaccactatatgtcgattcgaggccctgcagttgtcattcaagaatatgtgcaagcttcgccctctcctgcaaaagtgggtcgaggaggccgataataacgagaacctgcaggaaatttgcaaggccgagaccctggtgcaggcccgaaaacgtaaacggacctcgatcgagaaccgagttcggggaaatttagagaatttgttcctgcagtgtcccaagccgactctgcagcagatcagccacattgcccagcagctgggactggagaaagatgttgtcagggtctggttctgtaaccgcagacagaagggaaaacggtcttctagcgactacgcacagagggaagatttcgaagccgctggctctccattttctgggggacctgtgtcctttcccttggcacccggaccacactttggaacccccggatacggctccccccactttacagccttgtacagttccgttccttttccagagggggaagcatttccgccagtgtccgttacaaccttgggctcgcccatgcacagcaactag

SEQ ID NO: 104118 - DNA, 798 bp, Artificial Sequence
  derived and/or modified sequence
atgcacttctatcgtttgtttttaggggctacacggagatttctaaatcccgaatggaaaggtgagatcgataattggtgtgtttacgtactgacttccctgttgccctttaaaatccaatcacaggatataaaagctttgcagaaggagctggaacaatttgcaaagctacttaagcagaaacggatcaccctgggctacacacaggcagatgtggggctgactctgggtgttttatttggcaaggtgttcagtcagacaaccatttgccggttcgaggcccttcagctgtccttcaagaatatgtgcaaattgcgccctcttttgcagaagtgggtggaggaagccgacaacaacgaaaacctgcaggagatctgcaaagccgaaacactggtgcaggctagaaagagaaagaggaccagtattgagaacagggttcggggaaatttagaaaacctctttcttcaatgccctaagccaaccctgcaacagatctctcacatcgcacagcaactgggacttgagaaggatgtggtcagggtgtggttttgtaaccggagacagaaaggaaaacggtcaagtagtgactatgcccagcgggaagactttgaggccgcagggagcccattttccggtggacctgttagctttcccctagcgccaggaccccactttggtactcccggttatgggagccctcatttcaccgctctctacagctcagtgccatttccggagggtgaggccttccctccagtctctgtcacaacactcggtagccctatgcactctaattag

SEQ ID NO: 104119 - DNA, 798 bp, Artificial Sequence
  derived and/or modified sequence
atgcacttctatcggctcttccttggggcaacacgacgcttcttaaacccggagtggaaaggggaaatagataattggtgtgtttacgtcctcaccagtcttctgccattcaagattcagagccaagatatcaaagcactccaaaaggagttggagcaattcgcaaagctgttaaagcagaagaggataacactaggctacacccaggccgatgtgggtctgaccctcggcgttctgttcgggaaagtgttcagccagaccaccatctgtcggtttgaggccctgcagctgtcattcaagaatatgtgtaaacttcgccctctgttgcagaaatgggttgaggaggccgataataacgagaatctgcaagagatttgtaaagccgagaccctcgtgcaggcgaggaagagaaaaagaacctcaattgaaaatcgggtgaggggcaatttagaaaatcttttcctgcagtgcccgaaacccactctgcagcagatctcccacatagcacagcagttgggattggaaaaggacgtggtgagggtgtggttctgcaaccggaggcaaaaaggcaaaagatcctccagtgactacgctcagcgtgaggatttcgaggccgcaggctcacctttttcaggtggcccagtgagctttcctcttgccccagggcctcacttcgggaccccgggttatggctcaccccattttacagctctgtattcgagcgtaccattcccggaaggtgaggcctttccacctgtttccgttaccacactgggatcacccatgcatagcaactag

SEQ ID NO: 104120 - DNA, 1163 bp, Artificial Sequence
  derived and/or modified sequence
gtagtcctttgttacatgcatgagtcagtgaacagggaatgggtgaatgacatttgtgggtaggttatttctagaagttaggtgggcagcttggaaggcagatgcacttctacagactattccttggggccacacgtaggttcttgaatcccgaatggaaaggggagattgataactggtgtgtttatgttcttacaagtcttctgccttttaaaatccagtcccaggacatcaaagctctgcagaaagaactcgagcaatttgccaagctcctgaagcagaagaggatcaccctgggatatacacaggccgatgtggggctcaccctgggggttctatttgggaaggtattcagccaaacgaccatctgccgctttgaggctctgcagcttagcttcaagaacatgtgtaagctgcggcccttgctgcagaagtgggtggaggaagctgacaacaatgaaaatcttcaggagatatgcaaagcagaaaccctcgtgcaggcccgaaagagaaagcgaaccagtatcgagaaccgagtgagaggcaacctggagaatttgttcctgcagtgcccgaaacccacactgcagcagatcagccacatcgcccagcagcttgggctcgagaaggatgtggtccgagtgtggttctgtaaccggcgccagaagggcaagcgatcaagcagcgactatgcacaacgagaggattttgaggctgctgggtctcctttctcagggggaccagtgtcctttcctctggccccagggccccattttggtaccccaggctatgggagccctcacttcactgcactgtactcctcggtccctttccctgagggggaagcctttccccctgtctctgtcaccactctgggctctcccatgcattcaaactgaggtgcctgcccttctaggaatgggggacagggggaggggaggagctagggaaagaaaacctggagtttgtgccagggtttttgggattaagttcttcattcactaaggaaggaattgggaacacaaagggtgggggcaggggagtttggggcaactggttggagggaaggtgaagttcaatgatgctcttgattttaatcccacatcatgtatcacttttttcttaaataaagaagcctgggacacagtagatagacacactta

SEQ ID NO: 104121 - DNA, 1163 bp, Artificial Sequence
  derived and/or modified sequence
gtagtcctttgttacatgcatgagtcagtgaacagggaatgggtgaatgacatttgtgggtaggttatttctagaagttaggtgggcagcttggaaggcagatgcacttctacagactattccttggggccacacgtaggttcttgaatcccgaatggaaaggggagattgataactggtgtgtttatgttcttacaagtcttctgccttttaaaatccagtcccaggacatcaaagctctgcagaaagaactcgagcaatttgccaagctcctgaagcagaagaggatcaccctgggatatacacaggccgatgtggggctcaccctgggggttctatttgggaaggtattcagccaaacgaccatctgccgctttgaggctctgcagcttagcttcaagaacatgtgtaagctgcggcccttgctgcagaagtgggtggaggaagctgacaacaatgaaaatcttcaggagatatgcaaagcagaaaccctcgtgcaggcccgaaagagaaagcgaaccagtatcgagaaccgagtgagaggcaacctggagaatttgttcctgcagtgcccgaaacccacactgcagcagatcagccacatcgcccagcagcttgggctcgagaaggatgtggtccgagtgtggttctgtaaccggcgccagaagggcaagcgatcaagcagcgactatgcacaacgagaggattttgaggctgctgggtctcctttctcagggggaccagtgtcctttcctctggccccagggccccattttggtaccccaggctatgggagccctcacttcactgcactgtactcctcggtccctttccctgagggggaagcctttccccctgtctctgtcaccactctgggctctcccatgcattcaaactgaggtgcctgcccttctaggaatgggggacagggggaggggaggagctagggaaagaaaacctggagtttgtgccagggtttttgggattaagttcttcattcactaaggaaggaattgggaacacaaagggtgggggcaggggagtttggggcaactggttggagggaaggtgaagttcaatgatgctcttgattttaatcccacatcatgtatcacttttttcttaaataaagaagcttgggacacagtagatagacacactta

SEQ ID NO: 104122 - DNA, 798 bp, Artificial Sequence
  derived and/or modified sequence
atgcacttctaccgactattcctgggcgctactcgccggtttctaaatcccgagtggaagggcgagatagacaattggtgcgtgtatgtgctgacctcgctgctgccattcaagatacagagtcaggacatcaaggctcttcagaaagagttagaacaatttgctaagttgctgaagcagaaacgaatcactctgggatatacgcaggcagatgttggcctgactttgggcgtgctgtttggcaaggtattttctcagactacaatttgccgcttcgaggcactccaactctcatttaaaaacatgtgtaaactgaggcctctgctgcagaagtgggtcgaggaggccgacaataacgaaaacctgcaggagatctgtaaggcggagaccctcgtgcaagcacggaaacggaagagaacttccatcgaaaaccgagtcaggggtaaccttgagaacctgtttctgcaatgtcccaaaccgactctgcagcaaatctcccacatagctcaacaactcggtctggagaaagacgtggtgcgagtctggttttgcaacagaagacagaaaggcaagcgaagctcgagtgactacgctcagcgggaggacttcgaggcagctggatctcccttttctggaggacctgtctcattcccacttgccccaggcccccatttcgggacacctggctatggctctcctcacttcaccgccctgtattcttccgtacccttccctgaaggggaggcttttccacccgtgtctgttacgactctaggttcgcccatgcattctaactag

SEQ ID NO: 104123 - DNA, 798 bp, Artificial Sequence
  derived and/or modified sequence
atgcacttctaccggctgttcctgggcgccacccggcggttcctgaatccagaatggaagggcgagatagacaattggtgcgtctacgtgcttactagcctcctgccttttaagatacagagtcaagacattaaggcattacaaaaagaactggagcagttcgcaaagttactgaagcaaaaacgtatcactctagggtacacccaagcagacgtgggactgaccctcggtgtcctgtttggtaaggtctttagtcagacaacaatctgccgttttgaggcacttcagctctccttcaagaacatgtgcaagctaagaccactgctgcagaagtgggtcgaggaagctgacaataacgagaatttacaggagatatgcaaagcggagaccctcgtccaggcccgtaagagaaaacggacctccatcgaaaaccgagtgcgaggtaatttggagaacctttttctgcagtgccccaagccgaccctccaacaaattagccacatcgctcagcagctcggcctggaaaaggatgtagtacgggtttggttctgtaaccgccggcagaaagggaaaagatcaagttccgattacgctcagcgtgaagactttgaagccgccggcagcccattctcaggaggccccgtctctttccccctggcccccggcccccatttcggaactcctggctatggcagcccccactttacagcactgtactcgagcgtacccttcccggagggagaggccttcccccctgtttcggtcacgaccttagggtctcctatgcattccaattag

SEQ ID NO: 104124 - DNA, 1718 bp, Artificial Sequence
  derived and/or modified sequence
ctggggagagtatatactgaatttagcttctgagacatgatgctcttcctttttaattaacccagaacttagcagcttatctatttctctaatctcaaaacatccttaaactgggggtgatacttgagtgagagaattttgcaggtattaaatgaactatcttcttttttttttttctttgagacagagtcttgctctgtcacccaggctggagtgcagtggcgtgatctcagctcactgcaacctccgcctcccgggttcaagtgattctcctgcctcagcctcctgagtagctgggattacaggtgcgtgccaccgtgcccagctaatttttgtgtttttagtagagacggggtttcaccatgttggccatgctggtcttgaactcctgacctcgtgatctgcccacctcggcctcccaaagtgctggaattataggcgtgagccaccgcgcccagcaaagaacttctaaccttcataacctgacaggtgttctcgaggccagggtctctctttctgtcctttcacgatgctctgcatcccttggatgtgccagtttctgggggaagagtagtcctttgttacatgcatgagtcagtgaacagggaatgggtgaatgacatttgtgggtaggttatttctagaagttaggtgggcagcttggaaggcagaggcacttctacagactattccttggggccacacgtaggttcttgaatcccgaatggaaaggggagattgataactggtgtgtttatgttcttacaagtcttctgccttttaaaatccagtcccaggacatcaaagctctgcagaaagaactcgagcaatttgccaagctcctgaagcagaagaggatcaccctgggatatacacaggccgatgtggggctcaccctgggggttctatttgggaaggtattcagccaaacgaccatctgccgctttgaggctctgcagcttagcttcaagaacatgtgtaagctgcggcccttgctgcagaagtgggtggaggaagctgacaacaatgaaaatcttcaggagatatgcaaagcagaaaccctcgtgcaggcccgaaagagaaagcgaaccagtatcgagaaccgagtgagaggcaacctggagaatttgttcctgcagtgcccgaaacccacactgcagcagatcagccacatcgcccagcagcttgggctcgagaaggatgtggtccgagtgtggttctgtaaccggcgccagaagggcaagcgatcaagcagcgactatgcacaacgagaggattttgaggctgctgggtctcctttctcagggggaccagtgtcctttcctctggccccagggccccattttggtaccccaggctatgggagccctcacttcactgcactgtactcctcggtccctttccctgagggggaagcctttccccctgtctccgtcaccactctgggctctcccatgcattcaaactgaggtgcctgcccttctaggaatgggggacagggggaggggaggagctagggaaagaaaacctggagtttgtgccagggtttttgggattaagttcttcattcactaaggaaggaattgggaacacaaagggtgggggcaggggagtttggggcaactggttggagggaaggtgaagttcaatgatgctcttgattttaatcccacatcatgtatcacttttttcttaaataaagaagcctgggacacagt

SEQ ID NO: 104125 - DNA, 1233 bp, Artificial Sequence
  derived and/or modified sequence
ctggggagagtatatactgaatttagcttctgagacatgatgctcttcctttttaattaacccagaacttagcagcttatctatttctctaatctcaaaacatccttaaactgggggtgatacttgagtgagagaattttgcaggtattaaatgaactatcttcttttttttttttctttgagacagagtcttgctctgtcacccaggctggagtgcagtggcgtgatctcagctcactgcaacctccgcctcccgggttcaagtgattctcctgcctcagcctcctgagtagctgggattacagtcccaggacatcaaagctctgcagaaagaactcgagcaatttgccaagctcctgaagcagaagaggatcaccctgggatatacacaggccgatgtggggctcaccctgggggttctatttgggaaggtattcagccaaacgaccatctgccgctttgaggctctgcagcttagcttcaagaacatgtgtaagctgcggcccttgctgcagaagtgggtggaggaagctgacaacaatgaaaatcttcaggagatatgcaaagcagaaaccctcgtgcaggcccgaaagagaaagcgaaccagtatcgagaaccgagtgagaggcaacctggagaatttgttcctgcagtgcccgaaacccacactgcagcagatcagccacatcgcccagcagcttgggctcgagaaggatgtggtccgagtgtggttctgtaaccggcgccagaagggcaagcgatcaagcagcgactatgcacaacgagaggattttgaggctgctgggtctcctttctcagggggaccagtgtcctttcctctggccccagggccccattttggtaccccaggctatgggagccctcacttcactgcactgtactcctcggtccctttccctgagggggaagcctttccccctgtctccgtcaccactctgggctctcccatgcattcaaactgaggtgcctgcccttctaggaatgggggacagggggaggggaggagctagggaaagaaaacctggagtttgtgccagggtttttgggattaagttcttcattcactaaggaaggaattgggaacacaaagggtgggggcaggggagtttggggcaactggttggagggaaggtgaagttcaatgatgctcttgattttaatcccacatcatgtatcacttttttcttaaataaagaagcctgggacacagta

SEQ ID NO: 104126 - DNA, 798 bp, Artificial Sequence
  derived and/or modified sequence
atgcatttctatcgcctgttcctcggagccacacgccgatttctgaaccccgagtggaagggcgagatcgataattggtgcgtgtatgtgctgacaagcttgctgccttttaagatccagagccaagatatcaaggccttgcagaaggaactggagcagttcgctaagctgctcaaacagaagcggatcactctcggttatacccaggccgatgttgggttgacgctcggagtattgtttggcaaggtgttctcacagactaccatctgtagatttgaggccttgcagctttcctttaagaacatgtgtaaactaaggcccctgctccagaagtgggttgaggaagctgacaacaatgaaaatttgcaagagatatgcaaggcagaaacactcgtgcaggcaagaaaacgaaagagaaccagcatcgagaaccgggttcggggaaatcttgaaaacctatttctgcagtgtcccaaacctactctccagcaaatttcccatatcgcccagcagctagggttggagaaagacgttgttcgagtgtggttttgtaaccgccgacagaaaggtaagagaagttcctcagattatgctcaaagagaggacttcgaggccgctggaagtccgttttccggaggtcctgtttcctttccgctggccccaggaccacatttcggcactcctggttacgggtctccccattttaccgctttgtattcaagtgtgcctttccctgaaggcgaggctttcccacctgtgtccgttaccactctggggagcccaatgcattcaaactag

SEQ ID NO: 104127 - protein, 244 aa, Artificial Sequence
  derived and/or modified sequence
MNPVYSPVQPGAPYGNPKNMAYTGYPTAYPAAAPAYNPSLYPTNSPSYAPEFQFLHSAYATLLMKQAWPQNSSSCGTEGTFHLPVDTGTENRTYQASSAAFRYTAGTPYKVPPTQSNTAPPPYSPSPNPYQTAMYPIRSAYPQQNLYAQGAYYTQPVYAAQPHVIHHTTVVQPNSIPSAIYPAPVAAPRTNGVAMGMVAGTTMAMSAGTLLTTPQHTAIGAHPVSMPTYRAQGTPAYSYVPPHW

SEQ ID NO: 104128 - DNA, 735 bp, Artificial Sequence
  derived and/or modified sequence
atgaaccccgtgtacagccccgtgcagcccggcgccccctacggcaaccccaagaacatggcctacaccggctaccccaccgcctaccccgccgccgcccccgcctacaaccccagcctgtaccccaccaacagccccagctacgcccccgagttccagttcctgcacagcgcctacgccaccctgctgatgaagcaggcctggccccagaacagcagcagctgcggcaccgagggcaccttccacctgcccgtggacaccggcaccgagaacagaacctaccaggccagcagcgccgccttcagatacaccgccggcaccccctacaaggtgccccccacccagagcaacaccgccccccccccctacagccccagccccaacccctaccagaccgccatgtaccccatcagaagcgcctacccccagcagaacctgtacgcccagggcgcctactacacccagcccgtgtacgccgcccagccccacgtgatccaccacaccaccgtggtgcagcccaacagcatccccagcgccatctaccccgcccccgtggccgcccccagaaccaacggcgtggccatgggcatggtggccggcaccaccatggccatgagcgccggcaccctgctgaccaccccccagcacaccgccatcggcgcccaccccgtgagcatgcccacctacagagcccagggcacccccgcctacagctacgtgcccccccactggtag

SEQ ID NO: 104129 - DNA, 735 bp, Artificial Sequence
  derived and/or modified sequence
atgaaccccgtgtattctccagttcaacccggagccccatatggaaatccaaaaaacatggcatatacaggttaccccacagcctatccggcggctgccccagcatacaatccaagtctctatcctacgaactctcccagctacgctcccgagttccagtttctacactccgcctacgcaaccctgctgatgaaacaggcctggccgcagaacagcagttcgtgcggcaccgagggtacgtttcatctgcccgtagacacggggaccgaaaatcgtacttatcaggccagttccgccgctttccgctataccgccggcaccccctataaggtaccacccacccaatctaacacagcacctccgccatacagtcctagcccaaacccttaccaaacagctatgtaccccattcgatcagcctacccacagcagaatctgtacgcacagggcgcttactatactcagccagtgtatgccgcccagccacacgtaatacaccacacgacagtagtgcaacccaactctatacccagcgctatctatcccgcacctgttgcagcaccgcgtaccaatggggttgccatgggcatggttgccggaaccaccatggctatgtccgcaggaacactcctcaccactcctcagcacactgcaattggcgcccacccagtcagcatgcccacctatagagctcaaggcacgccggcttattcatatgtgcccccgcactggtag

SEQ ID NO: 104130 - DNA, 7296 bp, Artificial Sequence
  derived and/or modified sequence
ccttctgagcggtcccccgcctcctccctccgcctcctcctccctcgcccgcagccgagcgtcccctccccccacccgtcgggctcctcggcggctactgcagaggattcagagccgagtcgctgaggaggaggctccggtccccgcgcgccatccgccaccctactggacacgggcgagagcgtcgccgccgtagcctccggagaagacaagggcatcgccgcctcagccgccgccgccgccgttttcgcctgcagctgctcaccggatcctcagtcttccacaatgaaccctgtttacagccccgtgcagcctggggctccttatggcaaccctaagaacatggcctacacgggttaccccacagcctatccagcagctgcccctgcctacaatcccagcctgtaccccaccaatagtcccagttatgctccagagtttcagttcctgcattcagcttatgcaactctgctgatgaaacaggcctggccacagaactcgtcttcctgtggcactgaaggcaccttccacctcccagtggacaccgggaccgagaaccgaacttaccaagcatcctctgcggctttcagatatactgcggggacaccatacaaggtcccaccgacccagagtaacactgctccacccccctactccccatcacccaacccctatcagacggccatgtatccaatcagaagtgcctacccccagcagaatctgtatgcccagggagcctactacacacagccggtgtatgctgcccagcctcatgtcatccaccataccacggtcgtccagcccaacagcattccctctgctatctacccagcacctgttgccgccccgaggaccaacggtgtggccatgggcatggtggcaggcaccaccatggcaatgtcagcaggtaccctgctgactacaccccagcacacggcgattggggcacaccctgtctccatgccaacatatagggcccaaggaacccctgcgtacagctacgtgcccccacactggtaaagcctgcagcccatccaaatctggagtcacacattgtatgcaactactcaagtcttacaccggtgctggagcagttccctagcagcaccacctctatttgcaagaagagacaacggaagtgcaagggtcactttatgcatctttaatggttttgatttttatttttggtttttgtaaaagctgctttttctaatctcctgcctctccccaactgtccccctcttagcccctgcccttccagctctatccccttcctcctacctgaccaggccatgtcctctctgctcttccctaagtgtcctgtccctggggatcccagtctagaggcaagcagagagtagggtttattgcagtggttcatctgaaggctggattccatttgaagagcataaacagatgtggtccagggtaggaactcagagctgttgagcaggctacatctctaggggagtgttctggttgttttttcttaagcaagattagttcaggacattcccatgtcccagacacaaatgaaatgtctcctgagaaccattgcaacagaccaagaacaaaaccacctgagtatgtaggcgtgttattagcagcttaataccccaggctgagaacctggggaaaaaagtctttagaatttgggggagggtggggggagggagggcattgtggggaaggagagggaagaagggaggagcggtgcttgcctcatggctttggtttgaaaggtctctggccaaagcatctggccctggaccttctgatttgcacagtgatgttaactgacctggcacttcctcaaaaggtgattttgtccttagacctgccaagcggctgcagggtggtaggatcccagcatcccgaggccttggaaggccggatgccctgtgtcatccagacttcagcctctgagctgtcatggacccactctgatgaggagcttcctcctgattggagtgggaacctagggcatttctctcccttttcttttgcccttcccagtgccaggactcacctgtctgaccatagagcttgcaggcaggccaagctcttggttacctgtgccattcatggcccaagtgaaggaaccacattccaggtgggtgctggcagctctgaaggtgaggatagtgaaggaaaagcaatagcaataaacatttcatagactcatggaactgaagggaccttagcaatcatctcatccatttccctatttggcagatgaggaaactgaggcccagagaagcggaaaggacttccctagaccttacagtaaattagcattaaatgcagccttcctacctagtgggcaccttgcttacaaaaatttacctagggacggattggcttggttttgtaaaaattaagtcggcagcgcccatacctggtgagtctggaatggtctctgggctcctgtttctgctcttttcctccacggactccaaaggcgggggttgaagactgggcagaggctacatgggggcggatggcaggaacagaaattgcaaatgaagaaatagcatttggaaattctgtgaagacatctggaacttccgtcctgtacctgactccacctccaggagaaggagcaggtggactggccgaaaaggagaggccatgcttttaggacagtagcccctcatcccgagaggagaggaagaggaggaagacagtgggagtcatcaggagaggagaatgaggatgaggcccaggagacaggctcatctgggagaagagggacccctgggacgaggaggtccctgctagtctcagccaggagcctggattgcccagcagcagcctccggcacccagcgcttggctgggccagcagcccctctgggggtggggcacgaacattttattgtaaaaaatgggatcattgacaacatttgggactttaaaaaactgctttcatttaaaattcatgcaaacttggacatatccttaccccaacctcccatgtctccctaagggagggaaaaatcaggaaacccttgggttggaaggagctcagaagctgtctagccattcccaggagggtaaagcccatcagcctccttggcctagagccaggagtttgggggcccaccttcctgggcttccaaggaactttaggaccagtaagaaaaaattcagctgttctaaattatctgttctgggtgctgatgaggtttcactttaaaacaatagaaagttttccagtgttaattcactttttgcaaatacctccttccaccctctttggttttgtaaaggtgggtgaaggttgttctagattatgtcatacgtgtttgaaaaatgccaaaataataataatgataataataatagaaacctttggatttgtcaggtgcatcacagaggtcaaagcacttcacggcctttcatgtactcgccctgagagggacagggttagagttattacagtcaattgacaaatgaggaaacaggttatggaagggaacaggcccacagtgagcagcatgctggtatccgctaggcttcccagaaccctgctgcctccatgtgggctggggtggaaccacagagaggagaaaggaagaagaggagacctaggaatgaccttgtaacttttgttctttcaacaccagtaagtaaaactaacagctggacctcacagttcacagaacagttgaacataaattatctggtttaacccgatgaaatagaggttatttctcctatttgatccataaggaaatcaaggcttggaaaagtcaagtgacttgctaataagtgacagagccactcgaatcccaggctgtctgctgtctcgttcccctccatctgatccccacacaggctcacgtactgaagcatctgtgctctgtgccctatcttagcacctactatgtaattcaagagcaaaggggggccccaaggtgaaaataaggcactgaaaggctgtggtctggaagagcccaggtccagcacccctttttcagtatgagccccagttcagccggcctcagcctcttgctgtgatggagatccacaagcctagccaagcttggggagtcactgcaaaaggactgagcccaggagagcggggacagtcatgtgcctctggtaggatgggcacagttactggtaaggtcacagagatctagtgggaggtaccataggtagatacctccaaagattctagatggcacggtggtcaagctagacaaaaagtcagagctggaagggccgtctcattgaaggcaggcaagcaagagaggacaagggatgtagccgcctgacagtgagctacagcactggccccaggatgcaaacccctctctcctcctcatgccactgcctctccccaagtgcaacacctatggccaggatcaggggtacagatggctcgttaccagccaacccttttgaattcttctacttctacctgaccccctctcctcactggcctggggtcaagaagtttgagtctgggagctggattgcctgcaaatagtgaaagcctgaaacataatggtttgccatgttttgaaaaaaaatgcatatttaatttcttcctcatgagataggacagttgctgttctttcttacctggcaatgaccctaaaatgtatatcctctttcctgaatatttagcagagacacacacacctgtccagagcgtttttggtatgcaaagtactttgacattggttgccaaagtcctccattttatagatgaaaaaactaaggctcaggaggcttgagacttgctaaaaggtcacacagcttggaagtgattcttcaaatcctctgctctttctgctgccacctgctgggtctcttggcaagcatggagggaggggctaactgtactttatagagctgggaagcccagtctctgagctgagcagatttgtatgaactgctttgggccaggacctgtaatgagccctggggagggacccagaggcacatctaactggcagcacaaggaggatgagaatttgcaactaaaggcctcacttggacaaaacactttggggtcacaatgcccaggaccgaagacatgttcaaggacagcacgaggcatctttctattgggagacccatgtccttggtaagcctgcacacctggcttcctaatccctgagagcctgcccactgtccagatccagtgagttggtacaaaacgtacagactgaagtccctgggcttgcttttcccatgggtgaggaccagaaccagactctgagcatccttacccctggccacccgaattgttccaagtttgaggtaccccgttcccagagatctgggggtccttctttggagggcttgctttgttctgatggccttcagaaaggaatcacatgaagtataaaaggacaggccccttggtcaccaagttttggctcctcatacagataggactcatccaggttcccagcgaggcactgactaagcgaggctcagagcttccatatcaaattcctcagctttgttctgtgcccagagggggtgggccccattctgggccctgtgaactttgtcttatatatcaccatctgtatcagaattcctcctcaattgcagttaagtgaaaatacgtggaagtctgcttttccatcctgtattctcccacatcactactggctgtgcggcccccgctgcttgccaagcttgggaatccagagaggggcagtagtagagtgggccagttgggacccacccgcagagctgaagaaacacgccagactaactgatgggattccacaccggagcctctgagcgcacaggcaggcatgccaagggggctgcagggtttgtcctttacttatctgcccctttcctagaaaactcctcgtttctgaaattaggcattatatggttccaggacccagccttcaaaattcctggcaggccagcttcaacattccatggccagccctgcctaagccagacttgggtcccagtccctcagtctctccagtggatatcttctgtggtgcatgctgttgagtccaacccaaaggccaaccgaggcacacaggagttgggactggctgccacaaagctagaaagggacaaaacagcacttgcttccctatggccacatggatagtccctggatatccttgctgtggtagaggtcctctacccattccagccactgatagcagggggattttccttcctaaggagaacagatgtaacagctttgcaaagtaccggcccataggaatcaaatgggtgagatcagctttgggcctgaccccagcaagaccagcatctccagaccccagcctttctcctcaggcctaagagagtcagggaaagagaggagactgtcccagagaccttctcctcgggtcagccagatagtctggatctatggtgtgactcaagctcctccttacccagggggggtaaggccaggcctctagctacttggagttgtctgtaataatcttgaaaggcccaagggcctgtccccatcctgacttaaaggcatctgcttccctgtttcatatcacatgacagagaaacctgttctcatggcatgtaacatccctgtgaagagagcgttgtatatgattttgtattttttaattcattttaatctacaggttggaatctaatttttaaattttattggaactcacattttaaaaagaaataaaatttaaaataataataataataataataataataataaacctttgaccagtgtcttccaagtagtttgatcaaagaatttataggtgttttcaaaacacagtccggagtgtaaagattggaaagccccatggccttgcctgtgtgtatgaagtgtaaatctggttttgttttgttgttttggattcttttgggtttttgttttgttttgaagatcagacagtgatcactctgaaagattgaagccaagaatttgtaactatggtatttactgtaagctgtagaacactcaataactattaaaaaaaaaaattcccccccaaaaaaaagtcttaggtgactagactgagtggttcttggggagggaggcacagaggactgtcctgggccagtgagtcccttgggcgtctccccaagttgatgctaaatttgttctcagtagtcaagaaaaacctatggtacatcttacagctgatctgacaggggtctgccctaagggtctcacagctgctggggagctttaagtggcaacttcagcacccaccctaagtgtgtgatgtgggagcacagtgaggccattcagagttgaaatccattgagccatccgcgcaataaagctgacatctattgtgtg

SEQ ID NO: 104131 - DNA, 735 bp, Artificial Sequence
  derived and/or modified sequence
atgaaccctgtgtacagccctgtgcagcccggggccccctacggcaaccccaagaacatggcctacacaggctaccccacagcctacccagctgctgccccagcctacaaccccagcctgtaccccaccaacagccccagctatgcccctgagttccagttcctgcacagcgcctatgccaccctgctgatgaagcaggcctggccccagaacagcagcagctgtggcacagagggcaccttccacctgcctgtggacacaggaacagagaacagaacctaccaggccagcagcgctgccttccgctacacagctggcaccccctacaaggtgccccccacccagagcaacacagcccccccaccctacagccccagccccaacccctaccagacagccatgtaccccatccgcagcgcctacccccagcagaacctgtatgcccagggcgcctactacacccagcctgtgtatgctgcccagccccacgtgatccaccacaccaccgtggtgcagcccaacagcatccccagcgccatctacccagcccctgtggccgcccccaggaccaatggagtggccatgggcatggtggccggcaccaccatggccatgtctgctggcaccctgctgaccaccccccagcacacagccatcggggcccaccctgtgtccatgcccacctaccgggcccagggcaccccagcctacagctatgtgcccccccactggtag

SEQ ID NO: 104132 - DNA, 735 bp, Artificial Sequence
  derived and/or modified sequence
atgaaccccgtgtacagccccgtgcagcccggcgccccctacggcaatcccaagaatatggcgtatacaggctatcctacagcttatcctgcagcggctcctgcctacaacccctctctataccccactaactctccttcttacgcccccgaattccagttcctgcatagcgcctacgcaaccctcttaatgaagcaagcctggccccagaactccagcagctgtggtacagaaggtacctttcatctgcctgtggacactggcacagaaaatcgcacgtaccaggcaagctcggctgcatttcgttacacagccggtactccatacaaagtaccccccacgcaaagcaacacggccccacctccatactcaccaagccccaacccataccaaacggctatgtacccgattcgttccgcctacccccagcaaaatctgtatgctcagggtgcttactacacacagccagtgtatgctgcccaacctcatgttatacaccatactaccgtagtgcagcctaacagcatcccctccgccatatatcccgctccagtcgccgcaccaagaactaacggggtggccatgggaatggtggctggcactacaatggcgatgtccgcggggaccttgctgactacaccacaacataccgcaatcggggcccaccccgtaagcatgcctacatatcgggctcagggcacccccgcatacagttatgtgccaccacactggtag

SEQ ID NO: 104133 - DNA, 735 bp, Artificial Sequence
  derived and/or modified sequence
atgaacccagtttattcacctgtgcagcccggagccccttacggaaatcctaaaaatatggcatacaccgggtatcccactgcgtacccggctgccgctcccgcttataaccctagtctgtatcctacaaattccccaagctatgcacctgagttccaattcctccacagcgcctacgctactttgctaatgaagcaagcttggccacagaattcctcttcctgcgggacagaaggtacattccatctccctgtggacactggaactgaaaataggacttaccaggcatcatcagcagcttttcggtacaccgctggcactccatataaagtgcctcccacgcaaagcaatacagcccctcctccttactctccttcacccaacccataccagactgccatgtatcccatccgctccgcctaccctcaacagaatctgtatgcccagggggcatattacacacagcctgtgtacgcggctcaacctcacgttattcatcacaccactgtcgttcagcctaatagcatccctagcgccatttatcccgctcccgtggcagcgccaagaaccaatggagtggccatgggtatggtcgctggtaccaccatggctatgtccgctggcacccttctcacgacccctcagcacactgcaataggcgctcaccccgtcagcatgccaacataccgggcacaaggtacaccagcatattcctacgtgccaccacactggtag

SEQ ID NO: 104134 - DNA, 735 bp, Artificial Sequence
  derived and/or modified sequence
atgaaccccgtgtacagtcctgtgcagcctggagcaccctacggcaaccccaagaatatggcatacacaggctatccaactgcctacccagccgccgcgccagcctataacccaagtctgtaccctaccaattcaccctcatacgctcctgagtttcagttcctccacagcgcctacgccaccctcctgatgaagcaagcttggcctcagaattccagttcctgtgggaccgagggcacgtttcatttgcctgtcgatactggaaccgaaaaccgtacctatcaggcttcttctgctgcattccgctacactgcaggtacaccctacaaagtccccccgactcagagcaatacagcgccaccaccctattctccaagcccaaatccataccagaccgccatgtaccccatacggagcgcctaccctcagcagaatctctacgctcagggcgcctattatacccaaccggtatacgccgctcagccacacgtaattcaccataccacagttgtacaaccaaatagtatcccatccgccatttaccccgccccggttgcagctccgagaacaaacggggtggccatgggcatggttgctgggaccacgatggctatgtcagccgggaccctcctcacaacaccacagcacacggccattggagcccaccctgtttcgatgcctacttaccgcgcccaagggaccccagcctattcctacgttccaccgcactggtag

SEQ ID NO: 104135 - DNA, 735 bp, Artificial Sequence
  derived and/or modified sequence
atgaaccctgtttactctccagtccagccaggcgccccatatggcaacccaaagaatatggcatacacaggatatcctacagcctacccagcggcagcaccggcgtacaatccctctctctatccaacaaatagcccttcttacgccccagagttccagttcctccattctgcctatgcaaccctcttaatgaagcaggcatggccccaaaactcatcctcctgcggaacggagggtacctttcacttaccagtggacaccggcacggaaaatagaacataccaggcttcatcggcagcgtttcgttacactgccgggacaccctataaagttccccccacacaaagcaacacagcacctccaccgtattctccttcccccaacccttaccagaccgccatgtacccgatacggtcagcttacccccaacagaatctgtacgctcaaggggcatactacacacagccagtctacgccgcgcaaccgcatgtaattcaccacacgaccgttgtccagccgaattccattccatccgccatctatcccgctcctgtcgccgcacccagaaccaacggagttgccatgggaatggtggcagggacgacaatggccatgtcagccggaactctcctcactacaccgcagcataccgccatcggagcgcatcccgtatcaatgcctacctacagagcccaagggacacccgcatattcatacgtacctccgcattggtag

SEQ ID NO: 104136 - protein, 129 aa, Artificial Sequence
  derived and/or modified sequence
MNPVYSPVQPGAPYGNPKNMAYTGYPTAYPAAAPAYNPSLYPTNSPSYAPATLLMKQAWPQNSSSCGTEGTFHLPVDTGTENRTYQASSAAFSTLLTTPQHTAIGAHPVSMPTYRAQGTPAYSYVPPHW

SEQ ID NO: 104137 - DNA, 390 bp, Artificial Sequence
  derived and/or modified sequence
atgaaccccgtgtacagccccgtgcagcccggcgccccctacggcaaccccaagaacatggcctacaccggctaccccaccgcctaccccgccgccgcccccgcctacaaccccagcctgtaccccaccaacagccccagctacgcccccgccaccctgctgatgaagcaggcctggccccagaacagcagcagctgcggcaccgagggcaccttccacctgcccgtggacaccggcaccgagaacagaacctaccaggccagcagcgccgccttcagcaccctgctgaccaccccccagcacaccgccatcggcgcccaccccgtgagcatgcccacctacagagcccagggcacccccgcctacagctacgtgcccccccactggtag

SEQ ID NO: 104138 - DNA, 390 bp, Artificial Sequence
  derived and/or modified sequence
atgaaccctgtatattcgcccgtacaacccggtgccccctacggtaacccaaagaatatggcctacacaggatacccgaccgcgtatccagcagccgcgcccgcctacaatccttccctatacccaacaaattccccttcctatgctccggcaactttgctcatgaagcaggcatggccccagaacagtagctcttgcgggaccgaagggacattccacctccccgtagacacggggaccgagaaccgcacgtatcaggcttcatccgctgcattctccactcttcttaccacccctcagcacactgcaattggggcccatcccgttagcatgccgacctaccgggcacaggggactcccgcgtatagctacgtcccccctcactggtag

SEQ ID NO: 104139 - DNA, 1364 bp, Artificial Sequence
  derived and/or modified sequence
cggctactgcagaggattcagagccgagtcgctgaggaggaggctccggtccccgcgcgccatccgccaccctactggacacgggcgagagcgtcgccgccgtagcctccggagaagacaagggcatcgccgcctcagccgccgccgccgccgttttcgcctgcagctgctcaccggatcctcagtcttccacaatgaaccctgtttacagccccgtgcagcctggggctccttatggcaaccctaagaacatggcctacacgggttaccccacagcctatccagcagctgcccctgcctacaatcccagcctgtaccccaccaatagtcccagttatgctccagcaactctgctgatgaaacaggcctggccacagaactcgtcttcctgtggcactgaaggcaccttccacctcccagtggacaccgggaccgagaaccgaacttaccaagcatcctctgcggctttcagtaccctgctgactacaccccagcacacggcgattggggcacaccctgtctccatgccaacatatagggcccaaggaacccctgcgtacagctacgtgcccccacactggtaaagcctgcagcccatccaaatctggagtcacacattgtatgcaactactcaagtcttacaccggtgctggagcagttccctagcagcaccacctctatttgcaagaagagacaacggaagtgcaagggtcactttatgcatctttaatggttttgatttttatttttggtttttgtaaaagctgctttttctaatctcctgcctctccccaactgtccccctcttagcccctgcccttccagctctatccccttcctcctacctgaccaggccatgtcctctctgctcttccctaagtgtcctgtccctggggatcccagtctagaggcaagcagagagtagggtttattgcagtggttcatctgaaggctggattccatttgaagagcataaacagatgtggtccagggtaggaactcagagctgttgagcaggctacatctctaggggagtgttctggttgttttttcttaagcaagattagttcaggacattcccatgtcccagacacaaatgaaatgtctcctgagaaccattgcaacagaccaagaacaaaaccacctgagtatgtaggcgtgttattagcagcttaataccccaggctgagaacctggggaaaaaagtctttagaatttgggggagggtggggggagggagggcattgtggggaaggagagggaagaagggaggagcggtgcttgcctcatggctttggtttgaaaggtctctggccaaagcatctggccctggaccttctgatttgcacagtgatgttaactga

SEQ ID NO: 104140 - DNA, 390 bp, Artificial Sequence
  derived and/or modified sequence
atgaaccctgtgtacagccctgtgcagcccggggccccctacggcaaccccaagaacatggcctacacaggctaccccacagcctacccagctgctgccccagcctacaaccccagcctgtaccccaccaacagccccagctatgccccagccaccctgctgatgaagcaggcctggccccagaacagcagcagctgtggcacagagggcaccttccacctgcctgtggacaccggcacagaaaatagaacctaccaggccagcagcgctgccttcagcaccctgctgaccaccccccagcacacagccatcggggcccaccctgtgtccatgcccacctaccgggcccagggcaccccagcctacagctatgtgcccccccactggtag

SEQ ID NO: 104141 - DNA, 390 bp, Artificial Sequence
  derived and/or modified sequence
atgaaccccgtgtacagccccgtgcagcccggcgccccctacggcaaccctaagaatatggcatacactggttacccaactgcctacccggcagctgcccctgcctataacccctctctttacccaacaaattccccatcatacgcacccgctactttactcatgaagcaagcctggccacagaatagtagctcctgtgggaccgaaggaaccttccacctgccagtcgatactggaaccgaaaaccgcacatatcaggcaagctccgctgcgttctcaacattgctcaccaccccacagcacaccgccattggcgcacaccccgtgagcatgcccacttatagggcccaaggaactccggcctacagctatgttcctcctcactggtag

SEQ ID NO: 104142 - DNA, 390 bp, Artificial Sequence
  derived and/or modified sequence
atgaatccagtgtactccccagtccagcctggagccccatatgggaatcccaagaacatggcatataccggctaccccaccgcgtaccccgcagctgctcccgcttacaaccccagtctgtacccaacaaactccccgtcttacgccccagctactctcctgatgaagcaggcttggccacagaactcaagttcatgcggcaccgaagggacttttcacctgcctgttgatactggcactgagaaccggacttaccaggctagttcagcagctttctcgactctcctcacaacaccccagcatacggcaattggagcccatcccgtgagcatgcctacttatcgagctcaggggaccccagcatatagctatgtacctccccactggtag

SEQ ID NO: 104143 - protein, 1895 aa, Artificial Sequence
  derived and/or modified sequence
MGPGCDLLLRTAATITAAAIMSDTDSDEDSAGGGPFSLAGFLFGNINGAGQLEGESVLDDECKKHLAGLGALGLGSLITELTANEELTGTDGALVNDEGWVRSTEDAVDYSDINEVAEDESRRYQQTMGSLQPLCHSDYDEDDYDADCEDIDCKLMPPPPPPPGPMKKDKDQDSITGVSENGEGIILPSIIAPSSLASEKVDFSSSSDSESEMGPQEATQAESEDGKLTLPLAGIMQHDATKLLPSVTELFPEFRPGKVLRFLRLFGPGKNVPSVWRSARRKRKKKHRELIQEEQIQEVECSVESEVSQKSLWNYDYAPPPPPEQCLSDDEITMMAPVESKFSQSTGDIDKVTDTKPRVAEWRYGPARLWYDMLGVPEDGSGFDYGFKLRKTEHEPVIKSRMIEEFRKLEENNGTDLLADENFLMVTQLHWEDDIIWDGEDVKHKGTKPQRASLAGWLPSSMTRNAMAYNVQQGFAATLDDDKPWYSIFPIDNEDLVYGRWEDNIIWDAQAMPRLLEPPVLTLDPNDENLILEIPDEKEEATSNSPSKESKKESSLKKSRILLGKTGVIKEEPQQNMSQPEVKDPWNLSNDEYYYPKQQGLRGTFGGNIIQHSIPAVELRQPFFPTHMGPIKLRQFHRPPLKKYSFGALSQPGPHSVQPLLKHIKKKAKMREQERQASGGGEMFFMRTPQDLTGKDGDLILAEYSEENGPLMMQVGMATKIKNYYKRKPGKDPGAPDCKYGETVYCHTSPFLGSLHPGQLLQAFENNLFRAPIYLHKMPETDFLIIRTRQGYYIRELVDIFVVGQQCPLFEVPGPNSKRANTHIRDFLQVFIYRLFWKSKDRPRRIRMEDIKKAFPSHSESSIRKRLKLCADFKRTGMDSNWWVLKSDFRLPTEEEIRAMVSPEQCCAYYSMIAAEQRLKDAGYGEKSFFAPEEENEEDFQMKIDDEVRTAPWNTTRAFIAAMKGKCLLEVTGVADPTGCGEGFSYVKIPNKPTQQKDDKEPQPVKKTVTGTDADLRRLSLKNAKQLLRKFGVPEEEIKKLSRWEVIDVVRTMSTEQARSGEGPMSKFARGSRFSVAEHQERYKEECQRIFDLQNKVLSSTEVLSTDTDSSSAEDSDFEEMGKNIENMLQNKKTSSQLSREREEQERKELQRMLLAAGSAASGNNHRDDDTASVTSLNSSATGRCLKIYRTFRDEEGKEYVRCETVRKPAVIDAYVRIRTTKDEEFIRKFALFDEQHREEMRKERRRIQEQLRRLKRNQEKEKLKGPPEKKPKKMKERPDLKLKCGACGAIGHMRTNKFCPLYYQTNAPPSNPVAMTEEQEEELEKTVIHNDNEELIKVEGTKIVLGKQLIESADEVRRKSLVLKFPKQQLPPKKKRRVGTTVHCDYLNRPHKSIHRRRTDPMVTLSSILESIINDMRDLPNTYPFHTPVNAKVVKDYYKIITRPMDLQTLRENVRKRLYPSREEFREHLELIVKNSATYNGPKHSLTQISQSMLDLCDEKLKEKEDKLARLEKAINPLLDDDDQVAFSFILDNIVTQKMMAVPDSWPFHHPVNKKFVPDYYKVIVNPMDLETIRKNISKHKYQSRESFLDDVNLILANSVKYNGPESQYTKTAQEIVNVCYQTLTEYDEHLTQLEKDICTAKEAALEEAELESLDPMTPGPYTPQAKPPDLYDTNTSLSMSRDASVFQDESNMSVLDIPSATPEKQVTQEGEDGDGDLADEEEGTVQQPQASVLYEDLLMSEGEDDEEDAGSDEEGDNPFSAIQLSESGSDSDVGSGGIRPKQPRMLQENTRMDMENEESMMSYEGDGGEASHGLEDSNISYGSYEEPDPKSNTQDTSFSSIGGYEVSEEEEDEEEEEQRSGPSVLSQVHLSEDEEDSEDFHSIAGDSDLDSDE

SEQ ID NO: 104144 - protein, 298 aa, Artificial Sequence
  derived and/or modified sequence
MTEEQEEELEKTVIHNDNEELIKVEGTKIVLGKQLIESADEVRRKSLVLKFPKQQLPPKKKRRVGTTVHCDYLNRPHKSIHRRRTDPMVTLSSILESIINDMRDLPNTYPFHTPVNAKVVKDYYKIITRPMDLQTLRENVRKRLYPSREEFREHLELIVKNSATYNGPKHSLTQISQSMLDLCDEKLKEKEDKLARLEKAINPLLDDDDQVAFSFILDNIVTQKMMAVPDSWPFHHPVNKKFVPDYYKVIVNPMDLETIRKNISKHKYQSRESFLDDVNLILANSVKYNGYMCTTCRF

SEQ ID NO: 104145 - DNA, 5688 bp, Artificial Sequence
  derived and/or modified sequence
atgggccccggctgcgacctgctgctgagaaccgccgccaccatcaccgccgccgccatcatgagcgacaccgacagcgacgaggacagcgccggcggcggccccttcagcctggccggcttcctgttcggcaacatcaacggcgccggccagctggagggcgagagcgtgctggacgacgagtgcaagaagcacctggccggcctgggcgccctgggcctgggcagcctgatcaccgagctgaccgccaacgaggagctgaccggcaccgacggcgccctggtgaacgacgagggctgggtgagaagcaccgaggacgccgtggactacagcgacatcaacgaggtggccgaggacgagagcagaagataccagcagaccatgggcagcctgcagcccctgtgccacagcgactacgacgaggacgactacgacgccgactgcgaggacatcgactgcaagctgatgcccccccccccccccccccccggccccatgaagaaggacaaggaccaggacagcatcaccggcgtgagcgagaacggcgagggcatcatcctgcccagcatcatcgcccccagcagcctggccagcgagaaggtggacttcagcagcagcagcgacagcgagagcgagatgggcccccaggaggccacccaggccgagagcgaggacggcaagctgaccctgcccctggccggcatcatgcagcacgacgccaccaagctgctgcccagcgtgaccgagctgttccccgagttcagacccggcaaggtgctgagattcctgagactgttcggccccggcaagaacgtgcccagcgtgtggagaagcgccagaagaaagagaaagaagaagcacagagagctgatccaggaggagcagatccaggaggtggagtgcagcgtggagagcgaggtgagccagaagagcctgtggaactacgactacgcccccccccccccccccgagcagtgcctgagcgacgacgagatcaccatgatggcccccgtggagagcaagttcagccagagcaccggcgacatcgacaaggtgaccgacaccaagcccagagtggccgagtggagatacggccccgccagactgtggtacgacatgctgggcgtgcccgaggacggcagcggcttcgactacggcttcaagctgagaaagaccgagcacgagcccgtgatcaagagcagaatgatcgaggagttcagaaagctggaggagaacaacggcaccgacctgctggccgacgagaacttcctgatggtgacccagctgcactgggaggacgacatcatctgggacggcgaggacgtgaagcacaagggcaccaagccccagagagccagcctggccggctggctgcccagcagcatgaccagaaacgccatggcctacaacgtgcagcagggcttcgccgccaccctggacgacgacaagccctggtacagcatcttccccatcgacaacgaggacctggtgtacggcagatgggaggacaacatcatctgggacgcccaggccatgcccagactgctggagccccccgtgctgaccctggaccccaacgacgagaacctgatcctggagatccccgacgagaaggaggaggccaccagcaacagccccagcaaggagagcaagaaggagagcagcctgaagaagagcagaatcctgctgggcaagaccggcgtgatcaaggaggagccccagcagaacatgagccagcccgaggtgaaggacccctggaacctgagcaacgacgagtactactaccccaagcagcagggcctgagaggcaccttcggcggcaacatcatccagcacagcatccccgccgtggagctgagacagcccttcttccccacccacatgggccccatcaagctgagacagttccacagaccccccctgaagaagtacagcttcggcgccctgagccagcccggcccccacagcgtgcagcccctgctgaagcacatcaagaagaaggccaagatgagagagcaggagagacaggccagcggcggcggcgagatgttcttcatgagaaccccccaggacctgaccggcaaggacggcgacctgatcctggccgagtacagcgaggagaacggccccctgatgatgcaggtgggcatggccaccaagatcaagaactactacaagagaaagcccggcaaggaccccggcgcccccgactgcaagtacggcgagaccgtgtactgccacaccagccccttcctgggcagcctgcaccccggccagctgctgcaggccttcgagaacaacctgttcagagcccccatctacctgcacaagatgcccgagaccgacttcctgatcatcagaaccagacagggctactacatcagagagctggtggacatcttcgtggtgggccagcagtgccccctgttcgaggtgcccggccccaacagcaagagagccaacacccacatcagagacttcctgcaggtgttcatctacagactgttctggaagagcaaggacagacccagaagaatcagaatggaggacatcaagaaggccttccccagccacagcgagagcagcatcagaaagagactgaagctgtgcgccgacttcaagagaaccggcatggacagcaactggtgggtgctgaagagcgacttcagactgcccaccgaggaggagatcagagccatggtgagccccgagcagtgctgcgcctactacagcatgatcgccgccgagcagagactgaaggacgccggctacggcgagaagagcttcttcgcccccgaggaggagaacgaggaggacttccagatgaagatcgacgacgaggtgagaaccgccccctggaacaccaccagagccttcatcgccgccatgaagggcaagtgcctgctggaggtgaccggcgtggccgaccccaccggctgcggcgagggcttcagctacgtgaagatccccaacaagcccacccagcagaaggacgacaaggagccccagcccgtgaagaagaccgtgaccggcaccgacgccgacctgagaagactgagcctgaagaacgccaagcagctgctgagaaagttcggcgtgcccgaggaggagatcaagaagctgagcagatgggaggtgatcgacgtggtgagaaccatgagcaccgagcaggccagaagcggcgagggccccatgagcaagttcgccagaggcagcagattcagcgtggccgagcaccaggagagatacaaggaggagtgccagagaatcttcgacctgcagaacaaggtgctgagcagcaccgaggtgctgagcaccgacaccgacagcagcagcgccgaggacagcgacttcgaggagatgggcaagaacatcgagaacatgctgcagaacaagaagaccagcagccagctgagcagagagagagaggagcaggagagaaaggagctgcagagaatgctgctggccgccggcagcgccgccagcggcaacaaccacagagacgacgacaccgccagcgtgaccagcctgaacagcagcgccaccggcagatgcctgaagatctacagaaccttcagagacgaggagggcaaggagtacgtgagatgcgagaccgtgagaaagcccgccgtgatcgacgcctacgtgagaatcagaaccaccaaggacgaggagttcatcagaaagttcgccctgttcgacgagcagcacagagaggagatgagaaaggagagaagaagaatccaggagcagctgagaagactgaagagaaaccaggagaaggagaagctgaagggcccccccgagaagaagcccaagaagatgaaggagagacccgacctgaagctgaagtgcggcgcctgcggcgccatcggccacatgagaaccaacaagttctgccccctgtactaccagaccaacgccccccccagcaaccccgtggccatgaccgaggagcaggaggaggagctggagaagaccgtgatccacaacgacaacgaggagctgatcaaggtggagggcaccaagatcgtgctgggcaagcagctgatcgagagcgccgacgaggtgagaagaaagagcctggtgctgaagttccccaagcagcagctgccccccaagaagaagagaagagtgggcaccaccgtgcactgcgactacctgaacagaccccacaagagcatccacagaagaagaaccgaccccatggtgaccctgagcagcatcctggagagcatcatcaacgacatgagagacctgcccaacacctaccccttccacacccccgtgaacgccaaggtggtgaaggactactacaagatcatcaccagacccatggacctgcagaccctgagagagaacgtgagaaagagactgtaccccagcagagaggagttcagagagcacctggagctgatcgtgaagaacagcgccacctacaacggccccaagcacagcctgacccagatcagccagagcatgctggacctgtgcgacgagaagctgaaggagaaggaggacaagctggccagactggagaaggccatcaaccccctgctggacgacgacgaccaggtggccttcagcttcatcctggacaacatcgtgacccagaagatgatggccgtgcccgacagctggcccttccaccaccccgtgaacaagaagttcgtgcccgactactacaaggtgatcgtgaaccccatggacctggagaccatcagaaagaacatcagcaagcacaagtaccagagcagagagagcttcctggacgacgtgaacctgatcctggccaacagcgtgaagtacaacggccccgagagccagtacaccaagaccgcccaggagatcgtgaacgtgtgctaccagaccctgaccgagtacgacgagcacctgacccagctggagaaggacatctgcaccgccaaggaggccgccctggaggaggccgagctggagagcctggaccccatgacccccggcccctacaccccccaggccaagccccccgacctgtacgacaccaacaccagcctgagcatgagcagagacgccagcgtgttccaggacgagagcaacatgagcgtgctggacatccccagcgccacccccgagaagcaggtgacccaggagggcgaggacggcgacggcgacctggccgacgaggaggagggcaccgtgcagcagccccaggccagcgtgctgtacgaggacctgctgatgagcgagggcgaggacgacgaggaggacgccggcagcgacgaggagggcgacaaccccttcagcgccatccagctgagcgagagcggcagcgacagcgacgtgggcagcggcggcatcagacccaagcagcccagaatgctgcaggagaacaccagaatggacatggagaacgaggagagcatgatgagctacgagggcgacggcggcgaggccagccacggcctggaggacagcaacatcagctacggcagctacgaggagcccgaccccaagagcaacacccaggacaccagcttcagcagcatcggcggctacgaggtgagcgaggaggaggaggacgaggaggaggaggagcagagaagcggccccagcgtgctgagccaggtgcacctgagcgaggacgaggaggacagcgaggacttccacagcatcgccggcgacagcgacctggacagcgacgagtag

SEQ ID NO: 104146 - DNA, 5688 bp, Artificial Sequence
  derived and/or modified sequence
atggggccagggtgcgacttgctcctgcggacggccgcaacaatcacagctgcggccatcatgtcagacaccgactccgatgaggatagtgcaggaggtggtccattctctctggccggctttttattcgggaatattaacggagccgggcagttggaaggcgaaagcgttttggatgacgagtgtaaaaagcacttggccgggttaggggccctggggttgggctcactgatcactgagctgacagcgaacgaagagctgaccggtaccgacggcgctctcgttaacgatgagggttgggtccgatccacggaagatgcagtggattactcggacattaatgaagtggctgaggacgagagtcgccgatatcagcagaccatgggctcgcttcaaccactgtgccattccgattatgacgaggatgactatgatgcggattgcgaggacattgactgtaaactgatgcctcctccaccccccccccctggcccaatgaagaaggacaaggaccaggatagcatcactggcgtctccgagaatggagaaggaatcatcttgcccagtatcatcgcccccagcagtttggcgagtgaaaaggtcgattttagtagctcatcggattccgaaagcgagatgggacctcaagaggcaacacaggctgaatctgaagacggcaaacttactttgccgttggcaggtattatgcagcatgacgccacaaaactactgccatccgtgaccgagttgttccccgagttccgccccggtaaagttctcagatttcttagactgttcgggcccggcaaaaatgtgcccagcgtctggcgcagcgcccgaaggaagaggaaaaaaaagcatcgcgagttaattcaagaggagcagattcaggaggttgagtgctcagttgagtctgaggtctcacagaagagtctgtggaattacgactacgcacccccccccccacctgaacagtgcttaagcgacgacgaaatcacaatgatggcccccgtggagtccaaattctctcagagcaccggcgatatagacaaagtcactgatacgaagccacgcgtcgctgaatggagatacggcccagccaggctgtggtatgatatgctgggcgtgccagaagatggatccggatttgattatgggttcaaacttaggaagactgaacatgagccggtgattaagagcagaatgatcgaggaattcagaaaattggaggagaacaacggaacagacctgttagccgacgagaacttcctcatggtcacccaattgcattgggaagacgacattatctgggacggtgaggatgtcaagcataaggggacgaagccccagcgagcaagtctggcagggtggctcccaagttccatgacacgtaacgccatggcgtataacgtacaacagggtttcgcggccacattagacgacgataaaccctggtattcaatttttccaatcgataatgaggatttagtgtatggaagatgggaagataatatcatttgggacgctcaggcaatgccacgattactggagcctccagtgctgaccctggatcccaatgacgaaaacctcatcttggaaatccctgacgaaaaggaggaggccacatctaactcaccctcaaaggaatcgaagaaagagagcagtctgaagaagtccaggatcctgctgggcaaaaccggcgtaatcaaagaagagccccaacagaacatgagccagccagaggtcaaggatccgtggaacctgagcaacgacgagtactactaccctaaacagcagggtctacgtggcacttttggtggcaacattatccagcacagcatccccgcagtcgagctgaggcagccattttttcccacccacatgggtcccatcaagttaaggcagttccaccgcccgcctctgaagaagtatagcttcggggcgctgagccaacctggaccccactctgtccagcccctcctcaagcacattaaaaaaaaagcaaagatgagggagcaagagcgtcaggcctctggcggcggagaaatgttttttatgcggaccccccaggacctcacaggaaaggacggagacctcatcctggctgagtattccgaagagaatgggcccctgatgatgcaggtagggatggcgactaagatcaaaaattattataaaaggaaacccgggaaagaccctggggcgcccgactgcaaatatggtgagactgtctattgtcatacaagcccgttcttgggttctcttcaccctggacagttactccaagctttcgagaacaatctttttcgggcaccaatctacctgcataagatgcccgaaacagactttctcataataagaactaggcaaggctattatatccgggagcttgtggacatctttgtggttgggcagcagtgcccactgttcgaggtccctgggcctaacagcaagcgcgcgaacactcatatacgcgactttcttcaggtgtttatatataggctgttttggaaaagcaaagaccgacctcgccgaattcgtatggaagacatcaagaaagcatttccctctcacagcgagtccagcataaggaagagactgaagttatgcgccgattttaagcgcacagggatggacagcaactggtgggttttgaagtctgacttccgcttgccgactgaggaggagatccgagccatggtttctccagaacaatgctgcgcttattatagtatgatcgcagcggagcagcggttgaaggatgccggttatggagaaaagtcattctttgcccctgaagaggaaaacgaggaagattttcagatgaaaatcgacgatgaagtgcgcactgctccctggaacactaccagggcatttatcgccgctatgaaaggaaaatgcttattggaggtgacaggggtagctgatcctacaggctgtggggaagggtttagctacgtgaagattcccaataagcctacacagcagaaggacgacaaggaacctcaacctgtcaaaaaaacagttaccggaaccgacgccgaccttcgccggctctctctaaagaatgcaaaacagctgttgaggaagttcggagtcccagaggaagagattaaaaagctgagcagatgggaagtgatcgacgtggttcggaccatgtcgactgagcaggcgagatcaggcgaaggccccatgtctaagttcgctcgaggatcaagattttccgtagccgagcaccaggagcggtacaaagaggaatgtcagaggatattcgacctacagaacaaggtgctgagttcaacggaggtattaagcaccgatacggacagctcttccgccgaagacagtgacttcgaggagatgggcaaaaacatcgagaacatgctgcaaaacaaaaagacatccagccagctgagcagagaacgcgaggaacaggagaggaaagagctgcagcggatgctgttggcggccgggtcagcggcatctggcaacaatcatcgtgatgacgataccgcctcagtgacaagtcttaactcctccgcaaccggccgatgtctgaagatctatcggactttccgcgacgaggaaggcaaagagtatgtcaggtgcgaaacagtccgcaagcctgccgtcatcgatgcatatgtgcgaataagaacaacaaaagacgaggagttcattcggaagtttgccctgttcgacgagcaacacagggaagagatgagaaaagagaggaggcgaatacaggagcaattaagacggctaaagcgtaaccaggaaaaagaaaagctcaaaggtccacccgagaagaagccaaagaaaatgaaagaaagacccgatcttaaactcaaatgtggagcttgtggagctatcggccatatgcgcaccaacaagttctgccctttatattaccaaaccaacgctcccccgagcaaccccgtggcgatgaccgaagagcaggaagaggagctggaaaagaccgtaattcacaatgacaacgaggaactcattaaggtcgaagggactaagatagtgctcggcaagcagctaatcgagagcgcagatgaggttcggcggaagagtctcgtgcttaaattcccaaaacagcagctaccacccaaaaagaaaagacgtgtgggcactaccgtgcattgtgactacctgaatcgtcctcacaaaagtattcaccgaaggcgtacagacccaatggtgaccctgagttccatcctcgaatcaatcataaatgacatgcgggatttgcccaatacatatccatttcataccccagtcaatgccaaagtcgtgaaagattattataaaataattaccagacccatggatctccagactctgcgcgaaaatgtccggaagcggctgtatccatctagagaggagtttcgagaacacctagaattaatcgtgaaaaattcggcgacttacaatgggcccaagcactctctgacgcagatctctcaatctatgcttgacttatgtgatgagaagcttaaggagaaggaggacaaattagcccgcttggagaaagcaatcaaccccctgcttgacgatgacgatcaggtggcgttcagtttcatactggacaatatagtcacccaaaaaatgatggccgtgcccgattcgtggccattccatcaccccgtgaacaagaagtttgttcccgactactataaagtaattgtcaatccgatggaccttgagacaatacggaaaaacatctctaaacacaaatatcaatcgagagagtctttcctggatgatgtcaatctgatcctcgccaattccgtgaagtacaacggtcccgaatctcagtatacaaagactgctcaagagatcgtcaatgtgtgttatcagaccctgacagagtatgatgagcatctgactcagctcgagaaggacatatgtaccgcaaaggaagccgcgctggaggaggcagagttggagtccttggatccaatgaccccaggaccatatactccgcaggcgaagccgcccgacttatacgatacaaataccagcctcagtatgtcccgagacgcgtctgtcttccaggatgagtccaatatgtcggtcctcgatattccatcagcaacacctgagaaacaagtgacacaagaaggtgaagatggtgatggagatctagcagacgaggaggagggcacagtgcagcaacctcaagcatctgttttatatgaggacctgctgatgtccgagggcgaggatgacgaggaagacgcgggctcagatgaggagggagataacccgttttctgcaatccagctgtccgaatcaggatccgactccgacgttgggagcgggggtattagaccaaaacagcccagaatgctgcaggaaaatactcgaatggatatggaaaatgaggagagcatgatgtcatacgagggagacggaggagaagcttcccacggtcttgaagacagcaatataagctacggtagttatgaagagcctgatccaaaatccaatacgcaggatacaagtttcagctctataggtggttacgaagtttccgaagaggaagaggacgaggaggaagaagagcaaaggagcggccccagcgtgcttagccaagttcatctctccgaggatgaagaggattctgaagattttcactccatcgccggcgacagcgacctggatagcgacgagtag

SEQ ID NO: 104147 - DNA, 5688 bp, Artificial Sequence
  derived and/or modified sequence
atgggccctggctgtgacctgctgctgaggacagctgccaccatcacagctgctgccatcatgtctgacacagacagtgatgaggacagcgctgggggcggccccttcagcctggccggcttcctgtttggaaacatcaatggagctggccagctggagggggagagcgtgctggatgatgagtgcaagaagcacctggccggcctgggcgccctgggcctgggcagcctcatcacagagctgacagccaatgaggagctgaccggcacagatggagccctggtgaatgatgagggctgggtgcgcagcacagaagatgctgtggactacagcgacatcaatgaggtggccgaggatgagagccgccgctaccagcagaccatgggcagcctgcagcccctgtgccacagcgactatgatgaagatgattatgatgctgactgtgaagatattgactgcaagctgatgcctcctcctcctcctcctcctggccccatgaagaaggacaaggaccaggacagcatcaccggggtgtctgaaaatggagagggcatcatcctgcccagcatcatcgcccccagcagcctggccagcgagaaggtggacttcagcagcagcagtgacagcgagagcgagatgggcccccaggaggccacccaggccgagagtgaagatggcaagctgaccctgcccctggccggcatcatgcagcatgatgccaccaagctgctgcccagcgtgacagagctgtttcctgagttccggcctgggaaggtgctgcgcttcctgcggctgtttggacctgggaagaatgtgcccagcgtgtggaggtctgcccggaggaagaggaagaagaagcaccgggagctgatccaggaggagcagatccaggaggtggagtgcagcgtggagagcgaggtgtcccagaagagcctgtggaactatgactatgcccctcctcctcctcctgagcagtgcctgagtgatgatgagatcaccatgatggcccctgtggagagcaagttcagccagagcactggagacatcgacaaggtgacagacaccaagccccgggtggccgagtggaggtatggccctgcccggctgtggtatgacatgctgggcgtgcctgaagatggcagcggctttgattatggcttcaagctgaggaagacagagcacgagcccgtcatcaagagcaggatgattgaggagttcaggaagctggaggagaacaatggaacagacctgctggctgatgagaacttcctgatggtgacccagctgcactgggaggatgacatcatctgggatggagaagatgtgaagcacaagggcaccaagccccagagggccagcctggccggctggctgcccagctccatgaccagaaatgccatggcctacaacgtgcagcagggctttgctgccaccctggatgatgacaagccctggtacagcatcttccccatcgacaatgaagacctggtgtatggccgctgggaggacaacatcatctgggatgcccaggccatgccccggctgctggagccccctgtgctgaccctggaccccaatgatgagaacctgatcctggagatcccagatgagaaggaggaggccaccagcaacagccccagcaaggagagcaagaaggagagcagcctgaagaagagccgcatcctgctgggcaagacaggagtcatcaaggaggagccccagcagaacatgagccagcctgaggtgaaggacccctggaacctgagcaatgatgagtactactaccccaagcagcagggcctgcggggcacctttggaggcaacatcatccagcacagcatcccagctgtggagctgcggcagcccttcttccccacccacatgggccccatcaagctgcggcagttccacaggcctcccctgaagaagtacagctttggagccctgagccagcccggcccccacagcgtgcagcccctgctgaagcacatcaagaagaaggccaagatgagggagcaggagcggcaggccagcggcggcggggagatgttcttcatgaggaccccccaggacctgaccgggaaggatggagacctgatcctggccgagtacagtgaagaaaatggccccctgatgatgcaggtgggcatggccaccaagatcaagaactactacaagaggaagccaggcaaggaccccggggccccagactgcaagtacggggagaccgtgtactgccacaccagccccttcctgggcagcctgcaccctggccagctgctgcaggcctttgagaacaacctcttccgggcccccatctacctgcacaagatgcctgagacagacttcctgatcatccgcacccggcagggctactacatccgggagctggtggacatctttgtggtgggccagcagtgccccctgtttgaggtgcccggccccaacagcaagagggccaacacccacatccgggacttcctgcaggtgttcatctaccgcctcttctggaagagcaaggaccggccccggcgcatccgcatggaggacatcaagaaggccttccccagccacagcgagagcagcatcaggaagaggctgaagctgtgtgccgacttcaagaggacaggcatggacagcaactggtgggtgctgaagagtgacttccggctgcccacagaggaggagatccgggccatggtgtccccagagcagtgctgtgcctactacagcatgattgctgctgagcagaggctgaaggatgctggctacggggagaagagcttctttgcccctgaggaggagaatgaggaggacttccagatgaagattgatgatgaggtgaggacagccccctggaacaccacccgggccttcatcgccgccatgaagggcaagtgcctgctggaggtgactggagtggccgaccccaccggctgtggggagggcttctcctatgtgaagatccccaacaagcccacccagcagaaggatgacaaggagccccagcctgtgaagaagacagtgactggaacagatgctgacctgcggcggctgagcctgaagaatgccaagcagctgctgaggaagtttggagtgcctgaggaggagatcaagaagctgagccgctgggaggtgattgatgtggtgaggaccatgagcacagagcaggcccggagcggggagggccccatgagcaagtttgcccggggcagccgcttctctgtggccgagcaccaggagcgctacaaggaggagtgccagaggatctttgacctgcagaacaaggtgctgagcagcacagaggtgctgagcacagacacagacagcagcagcgctgaggacagcgactttgaggagatgggcaagaacatcgagaacatgctgcagaacaagaagaccagcagccagctgagccgggagcgggaggagcaggagaggaaggagctgcagaggatgctgctggccgccggcagcgctgccagcggcaacaaccacagagatgatgacacagcctctgtgaccagcctgaacagcagcgccaccggccgctgcctgaagatctaccgcaccttcagagatgaggagggcaaggagtatgtgcgctgtgaaacagtgaggaagccagctgtgattgatgcctacgtgcgcatccgcaccaccaaggatgaggagttcatcaggaagtttgccctgtttgatgagcagcaccgggaggagatgaggaaggagcggcggcgcatccaggagcagctgcggcggctgaagaggaaccaggagaaggagaagctgaagggccccccagagaagaagcccaagaagatgaaggagaggccagacctgaagctgaagtgtggggcctgtggggccatcggccacatgaggaccaacaagttctgccccctgtactaccagaccaatgccccacccagcaaccctgtggccatgacagaggagcaggaggaggagctggagaagacagtcatccacaatgacaatgaggagctgatcaaggtggagggcaccaagatcgtgctgggcaagcagctgattgaatctgcagatgaggtgcggaggaagagcctggtgctgaagttccccaagcagcagctgccccccaagaagaagagaagagtgggcaccaccgtgcactgtgactacctgaaccggccccacaagagcatccacagaagaagaacagaccccatggtgaccctgagcagcatcctggagagcatcatcaatgacatgagggacctgcccaacacctaccccttccacacccctgtgaatgccaaggtggtgaaggactactacaagatcatcacccggcccatggacctgcagaccctgagagaaaatgtgaggaagaggctgtaccccagccgggaggagttccgggagcacctggagctgattgtgaagaacagcgccacctacaacggccccaagcacagcctgacccagatcagccagagcatgctggacctgtgtgatgagaagctgaaggagaaggaggacaagctggcccggctggagaaggccatcaaccccctgctggatgatgatgaccaggtggccttctccttcatcctggacaacatcgtgacccagaagatgatggctgtgcctgacagctggcccttccaccaccctgtgaacaagaagtttgtgcctgactactacaaggtgattgtgaaccccatggacctggagaccatcaggaagaacatcagcaagcacaagtaccagagccgggagagcttcctggatgatgtgaacctgatcctggccaacagcgtgaagtacaacggccctgagagccagtacaccaagacagcccaggagatcgtgaatgtgtgctaccagaccctgacagaatatgatgagcacctgacccagctggagaaggacatctgcacagccaaggaggccgccctggaggaggccgagctggagagcctggaccccatgaccccaggcccctacaccccccaggccaagcccccagacctgtatgacaccaacaccagcctgtccatgagcagagatgccagcgtcttccaggatgagagcaacatgtctgtgctggacatccccagcgccaccccagagaagcaggtgacccaggagggagaagatggagatggagacctggctgatgaggaggagggcaccgtgcagcagccccaggcctctgtgctgtatgaggacctgctgatgtctgaaggagaagatgatgaagaagatgctggcagtgatgaggagggggacaaccccttcagcgccatccagctgtctgagagcggcagtgacagtgatgtgggcagcggcggcatccggcccaagcagcccaggatgctgcaggagaacaccaggatggacatggagaatgaggagagcatgatgtcctatgaaggagatggaggagaggccagccacggcctggaggacagcaacatctcctatggcagctatgaggagccagaccccaagagcaacacccaggacaccagcttcagcagcattggaggctatgaggtgtctgaggaggaggaggatgaggaggaggaggagcagaggagcggccccagcgtgctgagccaggtgcacctgtctgaagatgaagaagattctgaggacttccacagcattgctggggacagcgacctggacagtgatgaatag

SEQ ID NO: 104148 - DNA, 5688 bp, Artificial Sequence
  derived and/or modified sequence
atgggccccggctgcgacctgctgctgcggaccgccgccaccatcaccgcagcagctatcatgtccgacaccgactctgacgaagactccgcaggcgggggcccattctctctggccgggttcctgtttggcaatatcaacggggcaggtcagctcgaaggcgaaagcgtgctggacgatgaatgcaagaagcacctggccggcctgggcgctcttggactgggcagcctgatcacggaactcaccgcgaatgaagagctcaccgggactgatggggctctggtcaatgacgaggggtgggtcaggtcaacagaagacgccgtagactattctgatattaatgaagtggccgaagacgaaagtcggcgataccagcaaacgatgggaagcctgcagccgctttgccactcagattacgatgaggacgactatgacgccgattgtgaggatatagactgcaagctgatgccccctcctcctcctccaccggggcctatgaaaaaggacaaggaccaggactccatcaccggggttagcgaaaacggcgagggtattatcctaccatcaattattgctccctcttcacttgccagcgagaaagttgatttctcatcttcatcagatagcgaaagtgagatgggcccacaggaggcgacccaggcggagagtgaggacggtaaactcacgcttcccctagccggcataatgcaacacgatgctaccaaattgttaccatctgtcactgagctgttccccgaatttcgacccggcaaggtgctgcgctttctcaggctttttgggcctggcaaaaatgtgccttccgtgtggagatcggcacgccgcaaaagaaagaaaaagcaccgagaattgatacaagaagagcagatccaggaggtcgaatgttcagtggagagtgaagttagccaaaagtctctgtggaattacgattatgcgccccccccacctccagagcaatgcctttccgatgacgaaattacgatgatggcgcctgtggaatctaaattctctcaatctaccggcgacattgataaggtgactgacactaaacccagggtggccgagtggcggtacggtcctgctaggctgtggtatgatatgctgggggtcccagaagacggaagtgggttcgactacggcttcaaactgaggaagacagagcatgagcctgttattaagtcgcgcatgatcgaagaatttcggaaacttgaggagaacaatggcactgatctgctggcggacgagaactttctcatggtcactcagctccattgggaggatgacattatttgggatggggaggacgtgaagcacaaaggtaccaaacctcaaagagcatccctggcggggtggctgcccagtagcatgacgagaaacgccatggcttataacgtccagcaaggttttgcagcaacccttgatgacgacaaaccctggtacagcatatttccaattgacaatgaggaccttgtgtacgggaggtgggaagataatataatttgggatgcccaggcaatgccccgactgctagagccccctgtccttacgctagatcctaacgatgagaacctgatcctggagatacctgacgagaaagaggaagctacatcaaattccccaagcaaggaatcaaaaaaagagagctctctcaaaaagtctcgcatacttctggggaaaaccggggtaatcaaagaggagcctcagcaaaatatgtcacagccagaagtgaaggacccttggaacctgtctaacgacgaatattattatcctaagcaacaaggattgagagggactttcggaggaaatatcatccagcattccattccagcagtcgagctgagacaacccttcttccccactcacatgggaccgattaaactccgccagttccatcgaccaccattgaagaagtattcattcggagctctgtcgcagccaggcccacacagcgttcagcccctgctaaagcacatcaagaagaaggcgaaaatgcgagaacaggaaagacaggccagcggtggaggggaaatgttcttcatgcgaactccacaggatttaacagggaaggacggagatctgatcctggcagaatactccgaagagaatgggccactgatgatgcaggtcggtatggctactaagattaagaattattacaaaagaaaacctgggaaagatccgggtgcacctgattgtaaatacggggagacggtatactgccacacatcgccctttttgggcagcctgcaccctggacaactgctgcaggcattcgaaaacaatctatttcgggcccccatctatctccacaagatgcccgaaactgattttctgatcatccggacccggcaaggttactacatcagggaactggttgacatatttgtggtcggacagcagtgtcctctgttcgaggttcctggccctaactcaaaacgagctaatacccacatccgcgacttcttgcaggtattcatttaccgtctcttctggaaatctaaagatcgccctcgacgcattcgaatggaagatataaaaaaggcattcccgagccatagcgagtccagcatacggaagagactcaagctctgcgctgacttcaaacgaacagggatggatagcaattggtgggtgcttaaaagcgactttcgactgcccaccgaggaagagatccgcgcaatggtcagtcctgagcagtgttgtgcttattacagcatgattgctgccgagcagcggttaaaggatgccggttacggagaaaaaagctttttcgcccccgaagaggaaaatgaagaagatttccaaatgaaaatcgacgacgaggtgcgcacagcaccatggaacacgaccagagccttcatcgccgccatgaaagggaagtgcttactcgaagttaccggggtagctgatcctacgggctgcggggaagggttttcctacgtgaaaatcccaaataaacctacccagcagaaagacgataaggagccacaaccggtcaaaaagaccgtcaccggcacggatgccgatctgcgacggctgagcctcaagaatgccaagcagttgttacgaaaattcggtgtcccggaggaggaaattaagaagctgtcacgctgggaggtgatcgatgttgtgcgaaccatgagcaccgagcaggcccgctccggcgaagggcccatgtcaaagttcgcgcgtggatcccgtttttcggtggccgagcatcaggaacggtataaagaagaatgtcagcggatcttcgacctgcaaaataaggtgttatcttcaactgaggttctgtccactgataccgacagtagctcggcagaggattccgacttcgaggagatgggcaaaaacatcgagaatatgttgcaaaacaagaaaacctcgagccagttgtctcgagaaagggaagaacaagagcgtaaggagctgcaacggatgctgctggcagccggctcagctgcatctggaaacaatcatcgggatgacgacactgcctccgtgacctctttgaatagcagtgcaacagggagatgcctgaagatttataggaccttccgtgatgaggagggaaaggagtacgtgaggtgtgaaacagttcggaagccagcagtaattgacgcatatgtacgcatccgtaccacaaaggacgaagagttcatccgtaagtttgccctgttcgacgagcaacatcgagaggagatgcggaaggaacggagacggatccaggaacagttgcgaaggcttaagagaaatcaagagaaggagaaactgaagggccctcctgaaaaaaaacctaaaaagatgaaggaaaggccagaccttaaactgaagtgcggggcctgtggtgccattggccacatgcggaccaacaaattttgtcctttgtattatcagaccaatgcaccgccctccaaccctgtggcgatgactgaggaacaagaggaggaactggaaaaaacagtgatacacaacgataatgaggagctgattaaggtggaagggacaaaaatcgttctgggcaaacagctaattgaatctgctgacgaagttcggcgcaagtcgctggtgctgaaatttccaaagcaacagctcccgcccaaaaagaagaggcgcgtcggaactacagttcattgtgattatctcaatagaccccacaagagcatacacagaaggagaacagatccaatggtaacgctttccagcattcttgagtctattatcaacgacatgcgggacctgccaaacacatatccgtttcacactccggttaacgccaaggtagtcaaagattactacaagattatcacgagacccatggatctacaaaccttgcgggagaatgtccgcaagcgcctctatcccagcagggaagaattccgggagcatctggaattaatcgtgaagaacagtgccacctataacgggccaaaacacagcctaacccagatctcccaaagtatgttggacctgtgtgatgagaagctcaaggagaaggaagataagcttgccaggctcgagaaagcaattaatcccctgctggacgatgacgaccaggtggccttcagcttcatccttgacaacattgtcacccaaaaaatgatggccgtgcctgactcctggccgttccatcaccccgtaaacaagaagtttgttcccgattactacaaggtgatcgttaaccctatggacctcgagacgattcggaagaatatctcaaagcataagtatcagtctcgggagtcttttttggatgatgtgaacctcatactagccaattccgtgaagtacaatggaccggaatcccaatacactaaaaccgcccaggaaattgtgaatgtgtgctaccaaacgctcacagagtacgacgagcacctgactcagctggagaaggacatttgtacggctaaagaggctgctttggaagaggctgaactggagtcactggatcccatgactcctgggccatacaccccacaggctaagccaccagacctgtacgatactaacacctcactgtccatgtccagggatgcgagcgtgttccaggacgaatctaacatgtctgtgttggatattcccagtgcaacgccagagaaacaggtgacccaggagggcgaagatggcgatggcgatttggctgatgaagaggaggggacagttcaacagcctcaggctagtgtactatacgaagacctccttatgtccgagggcgaggacgatgaggaggacgcagggtctgatgaagagggtgacaaccccttttctgctattcagttgtcagagagtggcagtgactcagatgtcggcagcgggggaatccggcctaagcagcctcggatgctgcaggaaaacacccggatggatatggagaacgaagaatccatgatgagctatgagggagatggcggtgaagcctcccatgggctggaagactccaacatctcttatggctcatatgaggagccggatccaaagagcaacacacaggatacatccttcagcagtatcgggggatacgaggtctcagaggaggaggaggatgaggaagaggaggaacagcgcagcggcccatccgtgttgagccaagtccacctcagtgaagacgaagaagattctgaagacttccatagtatcgcaggggacagtgatctggacagtgatgaatag

SEQ ID NO: 104149 - DNA, 5687 bp, Artificial Sequence
  derived and/or modified sequence
atgggaccaggatgcgatttgctgttacgcactgctgcaacaattacagctgctgccattatgtccgacaccgacagtgacgaggactctgctggcggtggaccgttctctctcgctggctttctctttggtaacattaatggcgctggccagctggaaggagagagcgttcttgacgatgaatgtaaaaaacacttagctggcctcggcgcactgggcctgggctctcttattactgaacttacggcgaacgaggaattaactggcacagacggtgccctggtgaatgatgagggctgggtgcggagcaccgaggacgccgtggactactccgacatcaatgaggttgcagaagacgagtccaggcgctaccagcaaacaatgggatctttgcagccgctgtgccattccgattatgatgaggacgattatgatgcagactgtgaggacatcgactgcaagctgatgccgccacccccacctccacccggaccgatgaaaaaggacaaagaccaagattctattactggagtatcagaaaacggggaaggcattattctcccgtctattatcgccccaagttctttagcatccgagaaagtcgactttagctcaagttctgatagcgagtcggagatgggaccgcaggaagccactcaggcagaatctgaggacgggaagttgaccctgcctctggcgggaatcatgcagcacgacgcgactaaattacttcccagcgtcactgagttgttccctgagttccgacccggtaaagtcctccggtttctccgattgttcgggcctgggaaaaacgtgccctcagtttggcgctcagcccgacgtaaaagaaagaagaagcatcgcgagctgatccaggaggaacagatccaggaagtcgaatgttctgttgagtccgaggtctctcaaaagtctttgtggaattacgactatgcaccccctcctccacctgagcagtgtcttagcgacgacgagataaccatgatggcccctgtggaaagtaagttttcgcaatctaccggtgatatcgataaggtgaccgacaccaagccccgtgtagccgagtggagatatgggcctgcaaggctgtggtatgatatgctgggtgtgcctgaagatgggtctggatttgactacggtttcaagctgaggaaaacagagcatgaaccagtcatcaaatccaggatgatcgaggagttccgaaaactggaagagaacaatggcaccgacctactagctgacgaaaactttctgatggtcactcaactgcactgggaggatgacatcatatgggatggcgaagacgtaaaacacaaaggcacaaagccccagagggcctccttggcaggttggctccctagttccatgacccgcaacgctatggcttacaacgtccagcagggtttcgctgctacactcgatgacgataagccctggtactcaattttcccgatagataacgaagacctggtatatgggaggtgggaagataatataatctgggacgcccaagccatgcctaggctcctggagcccccagtgctgacgcttgaccccaacgacgaaaacctgattctcgaaatacctgatgagaaggaagaggcgacctctaatagcccctctaaagagtcaaagaaggaatctagtctgaagaaatctcggatcctgctgggtaaaactggcgtcattaaagaggagcctcagcagaatatgtcacagcccgaggtaaaggatccatggaacctgtccaacgacgaatactactacccaaaacaacaggggctgaggggaactttcggaggcaacattattcagcactcaatcccagcagttgagctgagacagcccttctttccaactcacatgggccctatcaaactcagacagttccatcggcctccccttaaaaaatactcttttggagctctctcgcagcccggacctcactctgttcagcccctgctgaaacatatcaaaaagaaggctaaaatgagggaacaggagaggcaggcttcaggcggaggagagatgttttttatgcggacaccgcaggacctgaccgggaaggacggagaccttattctggctgagtattccgaggaaaatggtcccctcatgatgcaagtggggatggccaccaaaattaagaattactacaaaagaaaacccggtaaggatcctggagcccctgactgcaaatatggggaaacggtgtattgtcataccagcccgttcctcggcagtcttcaccccggtcagctgctccaggctttcgaaaacaatcttttccgcgcacctatatatttgcataaaatgccagagaccgatttcttgataatccggacgcgccaaggctattatattcgggaactcgtcgatattttcgttgtgggacagcaatgcccgttattcgaagtccctggccctaattccaaacgagcgaatactcatatccgcgattttcttcaggtttttatttaccgactgttctggaagtcaaaggacagaccgcgacggatcaggatggaggatattaagaaagcatttccatctcactcagagtctagcatccggaaaaggttaaagctgtgcgcggacttcaagagaactggcatggattccaactggtgggttctgaagtccgactttcggctcccgacagaagaagaaattcgggcaatggtgtcacctgagcagtgttgcgcctactattcaatgattgctgccgagcaaagactgaaggacgccggatatggcgaaaagagtttcttcgcccctgaggaagaaaatgaagaagatttccagatgaagattgatgacgaggtccgaactgcaccctggaacacaacccgggcatttatagccgctatgaaaggtaaatgcctgctggaagttacaggagtggccgaccctacaggttgtggcgagggatttagttatgttaagatccctaacaagccaacacagcaaaaggatgataaggagccccagccagtgaagaaaactgtgactggcacggatgccgacctgaggcgactgagcctcaagaatgccaaacagctgctcaggaaatttggggtcccggaggaagaaatcaagaagctgtcccggtgggaggtgattgatgtcgtgaggacgatgtcaacagaacaggcacggagcggcgaaggacctatgagcaaatttgccagaggcagcagattctccgtggctgaacatcaagaacggtacaaggaagagtgtcagagaatatttgacctccagaacaaggtgctgtcgagcaccgaggtattgtctaccgacaccgactcctctagtgccgaggattccgattttgaagagatgggaaagaacattgagaacatgcttcaaaacaagaagacaagcagtcagctttctcgcgagcgcgaggagcaggagcgaaaggagcttcagcgtatgctgcttgcagctggatccgccgcttccggaaacaatcacagagacgacgatacagctagcgtgacttccctgaattctagcgccactggacggtgcctgaagatttacaggacatttagggacgaggagggcaaggagtatgttcgctgtgagactgttaggaaaccagccgttatcgatgcttacgtccgcattcggaccacgaaggatgaagaattcatccgcaaatttgctctattcgacgagcaacatcgcgaggaaatgcgcaaagaaaggagaagaatacaggaacaattgcgacggttaaaacgcaatcaggagaaagaaaaactcaaaggtccaccggagaagaagcccaagaagatgaaggaacgcccagacctgaagctcaaatgtggcgcttgtggagcaattggacacatgaggaccaacaagttttgtccactgtactaccagactaatgcccctcctagtaaccccgtggccatgacagaagaacaggaggaagagctggagaagacagtgattcataatgacaacgaggagctgatcaaggttgaagggaccaagattgtgcttggcaagcagctgattgagtccgcggacgaggtgcgtcgtaaaagccttgtgcttaaatttccaaagcagcaacttccaccaaagaagaaacgaagagtgggtaccacggtacactgcgattacttaaacaggccccataaatccatccaccggagaaggaccgaccccatggtgacacttagctccatcctagaaagcataatcaacgacatgagagatctgcccaacacttacccgttccacaccccagttaacgctaaagtcgtaaaagattattacaaaattataacgaggccaatggatctgcagaccctgcgcgagaatgtgaggaaacgtctctatccatccagagaggaattcagagagcatctagaactgatcgttaagaattccgcaacttacaatggcccaaagcacagcctgacacagatatcccagtccatgctggatctatgcgatgaaaaactaaaagaaaaggaggataagttagcccgtcttgagaaggccatcaacccgctgctggacgatgatgatcaagtagcattcagttttattctcgacaacatcgtgactcagaaaatgatggcagtcccagatagttggcccttccaccaccctgtgaacaaaaaatttgtgccagattattacaaggtcattgtgaatcctatggatctagaaaccattcgcaagaacataagcaagcataagtaccagagcagggagagttttctggacgatgttaacttaattcttgccaattccgtgaagtacaacggccctgagtcccagtataccaagaccgcccaggaaatagttaacgtctgttaccaaacactgacagagtacgacgaacacctgactcagcttgagaaagacatttgtacagctaaggaagcagccctggaggaggcggagctggagagtctggacccaatgacacccggaccctatactccccaggcaaagccacccgacctgtatgatactaacacctccctttcaatgagcagagacgcttcagtctttcaggatgagtctaacatgtctgtcctggacattccctctgcgacccccgagaaacaggtgactcaggagggggaagatggagacggcgacctggccgatgaggaggaagggaccgtgcaacaaccacaagccagtgtgctgtacgaggatctgcttatgtccgaaggtgaggacgatgaagaagacgccggtagtgatgaagagggtgataatccattttctgccattcagctgagcgagtctgggtcagatagcgacgtcgggagtggcggaataagaccgaaacagcctcgcatgctgcaagagaacaccaggatggatatggaaaatgaggagtccatgatgagctatgaaggagacggcggagaagcatctcacggactggaggacagcaacatttcatacgggagctatgaggaacctgaccccaagagtaatacacaggacacatcattctccagtatcgggggatatgaggtgtctgaggaagaggaggatgaggaggaggaggagcagcgatctggaccttccgtattgtctcaggtacacctgagtgaagatgaggaggactcagaagattttcactccattgccggagacagcgaccttgattcagatgaata

SEQ ID NO: 104150 - DNA, 7675 bp, Artificial Sequence
  derived and/or modified sequence
aagggagctcagtaagtcacttctgggcgactgttgttttatttccggtctatgggacccggctgcgatttgctgctgcggacagcagctaccatcactgctgccgccatcatgtcagacacggacagcgacgaagattccgctggaggcggcccattttctttagcgggtttccttttcggcaacatcaatggagccgggcagctggagggggaaagcgtcttggatgatgaatgtaagaagcacttggcaggcttgggggctttggggctgggcagcctgatcactgaactcacggcaaatgaagaattgaccgggactgacggtgccttggtaaatgatgaagggtgggttaggagtacagaagatgctgtggactattcagacatcaatgaggtggcagaagatgaaagccgaagataccagcagacgatggggagcttgcagcccctttgccactcagattatgatgaagatgactatgatgctgattgtgaagacattgattgcaagttgatgcctcctccacctccacccccgggaccaatgaagaaggataaggaccaggattctattactggtgtgtctgaaaatggagaaggcatcatcttgccctccatcattgccccttcctctttggcctcagagaaagtggacttcagtagttcctctgactcagaatctgagatgggacctcaggaagcaacacaggcagaatctgaagatggaaagctgacccttccattggctgggattatgcagcatgatgccaccaagctgttgccaagtgtcacagaactttttccagaatttcgacctggaaaggtgttacgttttctacgtctttttggaccagggaagaatgtcccatctgtttggcggagtgctcggagaaagaggaagaagaagcaccgtgagctgatacaggaagagcagatccaggaggtggagtgctcagtagaatcagaagtcagccagaagtctttgtggaactacgactacgctccaccaccacctccagagcagtgtctctctgatgatgaaatcacgatgatggctcctgtggagtccaaattttcccaatcaactggagatatagataaagtgacagataccaaaccaagagtggctgagtggcgttatgggcctgcccgactgtggtatgatatgctgggtgtccctgaagatggcagtgggtttgactatggcttcaaactgagaaagacagaacatgaacctgtgataaaatctagaatgatagaggaatttaggaaacttgaggaaaacaatggcactgatcttctggctgatgaaaacttcctgatggtgacacagctgcattgggaggatgatatcatctgggatggggaggatgtcaaacacaaagggacaaaacctcagcgtgcaagcctggcaggctggcttccttctagcatgactaggaatgcgatggcttacaatgttcagcaaggttttgcagccactcttgatgatgacaaaccttggtactccatttttcccattgacaatgaggatctggtatatggacgctgggaggacaatatcatttgggatgctcaggccatgccccggctgttggaacctcctgttttgacacttgatcccaatgatgagaacctcattttggaaattcctgatgagaaggaagaggccacctctaactccccctccaaggagagtaagaaggaatcatctctgaagaagagtcgaattctcttagggaaaacaggagtcatcaaggaggaaccacagcagaacatgtctcagccagaagtgaaagatccatggaatctctccaatgatgagtattattatcccaagcaacagggtcttcgaggcacctttggagggaatattatccagcattcaattcctgctgtggaattacggcagcccttctttcccacccacatggggcccatcaaactccggcagttccatcgcccacctctgaaaaagtactcatttggtgcactttctcagccaggtccccactcagtccaacctttgctaaagcacatcaaaaaaaaggccaagatgagagaacaagagaggcaagcttcaggtggtggagagatgttttttatgcgcacacctcaggacctcacaggcaaagatggtgatcttattcttgcagaatatagtgaggaaaatggacccttaatgatgcaggttggcatggcaaccaagataaagaactattataaacggaaacctggaaaagatcctggagcaccagattgtaaatatggggaaactgtttactgccatacatctcctttcctgggttctctccatcctggccaattgctgcaagcatttgagaacaacctttttcgtgctccaatttatcttcataagatgccagaaactgatttcttgatcattcggacaagacagggttactatattcgggaattagtggatatttttgtggttggccagcagtgtcccttgtttgaagttcctgggcctaactccaaaagggccaatacgcatattcgagactttctacaggtttttatttaccgccttttctggaaaagtaaagatcggccacggaggatacgaatggaagatataaaaaaagcctttccttcccattcagaaagcagcatccggaagaggctaaagctctgcgctgacttcaaacgcacagggatggactcaaactggtgggtgcttaagtctgattttcgtttaccaacggaagaagagatcagagctatggtgtcaccagagcagtgctgtgcttattatagcatgatagctgcagagcaacgactgaaggatgctggctatggtgagaaatccttttttgctccagaagaagaaaatgaggaagatttccagatgaagattgatgatgaagttcgcactgccccttggaacaccacaagggccttcattgctgccatgaagggcaagtgtctgctagaggtgactggggtggcagatcccacggggtgtggtgaaggattctcctatgtgaagattccaaacaaaccaacacagcagaaggatgataaagaaccgcagccagtgaagaagacagtgacaggaacagatgcagaccttcgtcgcctttccctgaaaaatgccaagcaacttctacgtaaatttggtgtgcctgaggaagagattaaaaagttgtcccgctgggaagtgattgatgtggtgcgcacaatgtcaacagaacaggctcgttctggagaggggcccatgagtaaatttgcccgtggatcaaggttttctgtggctgagcatcaagagcgttacaaagaggaatgtcagcgcatctttgacctacagaacaaggttctgtcatcaactgaagtcttatcaactgacacagacagcagctcagctgaagatagtgactttgaagaaatgggaaagaacattgagaacatgttgcagaacaagaaaaccagctctcagctttcacgtgaacgggaggaacaggagcggaaggaactacagcgaatgctactggcagcaggctcagcagcatccggaaacaatcacagagatgatgacacagcttccgtgactagccttaactcttctgccactggacgctgtctcaagatttatcgcacgtttcgagatgaagaggggaaagagtatgttcgctgtgagacagtccgaaaaccagctgtcattgatgcctatgtgcgcatacggactacaaaagatgaggaattcattcgaaaatttgccctttttgatgaacaacatcgggaagagatgcgaaaagaacggcggaggattcaagagcaactgaggcggcttaagaggaaccaggaaaaggagaagcttaagggtcctcctgagaagaagcccaagaaaatgaaggagcgtcctgacctaaaactgaaatgtggggcatgtggtgccattggacacatgaggactaacaaattctgccccctctattatcaaacaaatgcgccaccttccaaccctgttgccatgacagaagaacaggaggaggagttggaaaagacagtcattcataatgataatgaagaacttatcaaggttgaagggaccaaaattgtcttggggaaacagctaattgagagtgcggatgaggttcgcagaaaatctctggttctcaagtttcctaaacagcagcttcctccaaagaagaaacggcgagttggaaccactgttcactgtgactatttgaatagacctcataagtccatccaccggcgccgcacagaccctatggtgacgctgtcgtccatcttggagtctatcatcaatgacatgagagatcttccaaatacataccctttccacactccagtcaatgcaaaggttgtaaaggactactacaaaatcatcactcggccaatggacctacaaacactccgcgaaaacgtgcgtaaacgcctctacccatctcgggaagagttcagagagcatctggagctaattgtgaaaaatagtgcaacctacaatgggccaaaacactcattgactcagatctctcaatccatgctggatctctgtgatgaaaaactcaaagagaaagaagacaaattagctcgcttagagaaagctatcaaccccttgctggatgatgatgaccaagtggcgttttctttcattctggacaacattgtcacccagaaaatgatggcagttccagattcttggccatttcatcacccagttaataagaaatttgttccagattattacaaagtgattgtcaatccaatggatttagagaccatacgtaagaacatctccaagcacaagtatcagagtcgggagagctttctggatgatgtaaaccttattctggccaacagtgttaagtataatggacctgagagtcagtatactaagactgcccaggagattgtgaacgtctgttaccagacattgactgagtatgatgaacatttgactcaacttgagaaggatatttgtactgctaaagaagcagctttggaggaagcagaattagaaagcctggacccaatgaccccagggccctacacgcctcaggctaagcctcctgatttgtatgataccaacacatccctcagtatgtctcgagatgcctctgtatttcaagatgagagcaatatgtctgtcttggatattcccagtgccactccagaaaagcaggtaacacaggaaggtgaagatggagatggtgatcttgcagatgaagaggaaggaactgtacaacagcctcaagccagtgtcctgtatgaggatttgcttatgtctgaaggagaagatgatgaggaagatgctgggagtgatgaagaaggagacaatcctttctctgctatccagctgagtgaaagtggaagtgactctgatgtgggatctggtggaataagacccaaacaaccccgcatgcttcaggagaacacaaggatggacatggaaaatgaagaaagcatgatgtcctatgagggagacggtggggaggcttcccatggtttggaggatagcaacatcagttatgggagctatgaggagcctgatcccaagtcgaacacccaagacacaagcttcagcagcatcggtgggtatgaggtatcagaggaggaagaagatgaggaggaggaagagcagcgctctgggccgagcgtactaagccaggtccacctgtcagaggacgaggaggacagtgaggatttccactccattgctggggacagtgacttggactctgatgaatgaggcttcctttgggcctccttggtcagccttccctgttctccagcctaggtggttcacctttccccaatttgttcatatttgtacagtatctgatcctgaaatcatgaaattaactaacaccttagcctttttaaaagtagtaagtaaatgataataaatcacctctcctaatcttcctggggcaatgtcaccctttgatttaaaacaaagcaaccccctttcccctaccactacggaaaagagcaagctcatttttccgtgtcctcctttatttaactccatttattgcttttggtataatttttccctggggaaggaggggaaattatgaaagaactagtaactttatgtcctcttgatgtattaggaaatttccggccaggcgtggtggctcacacctgtaatctcagcactctgggaggccgaggcgggcagatcacctgaggtcagaagttcgagaccagcttggccaacatggcgaaaccgcatctctactaaaaatacaaaaattagccaggtgtggtggcgtatgcctgttaatcctagctactcgggaggctgaggcaggagaattacttgaacccgggaggcagaggttgcagtgagtggaggtcacgccactgcactccagcctgggcgaaagagtgagattcagtctcaaaaaaaaaaaaatttccaagcatggtatcatctcacttttctaatttacaggctggagcagatgagagccctcctgctgggacagagaattgggttctagtggactctgtgctacacttaaacctgtgagacaaaccgcccattattttattatttaattatgcaatgcctagttcctaaatggattggaggcaaattaccgtaaattttgaaacagcctatatgtcagaaatgataatgttgccacctaaatgttttctgtcccccccaccctccccaggggaaatggtaggaaaatggtaagtttcttagggcaaagactgtgtcttctgtttcttttcatgcttaggatatggttctgtgcatagtaggtactcagtaaatgttcctagaatcataaaatcctcaacagatatgttactgagcatctgcttttcatgataagcactctatcagatccttgggatgcaaaggtaaataagacaaatcccttttacccaaagagctcaccatcaagttgggggagggaaagtggaattcaaaacatgttaataaatcatcatagtactgtgagataagtgcaattaagaagctagttataaagtataggggaaatagaggagtaatcatgtctgaaaagtcaggaaagtcttcctagaggtaatttttaagctgattgttttagaattagtagaagcttgccagatggaaaagtccaggcaaagtgtaacatgaatgggaaaggccacagtctagaaatggcagagtgtgttcctagtttgtttgtttgtttgtttgtacctgccttgttccaggaaggatttaatgtggtttatattccagtcctttaatgctggaagggctgagatgagactgaaagatgggcaggaagtatatcatcacaagctttgtgtttgatgttaatgtgtatgatttttatattatgggaaataagctcttagaggagtgatataatcaggtttgtgttttagaaatctgtgtaatgaatgaatgaagaaagaaattgaagaatcatgtaacatatgtgatcgcatttttgtaaaagaaccatgtgtgtttatatgtgtttatatatatacttgtgtatgcaaaggtaaaagtctgaaaggatatatgctaactgttcacaatgataaccccccaggaatgggattggaggggagggggcttctgtgtttgttatgtatgctgggtgggatattgtgcttttatttctatattgtttgaatttttttacagtatgtattatttttgt

SEQ ID NO: 104151 - DNA, 2610 bp, Artificial Sequence
  derived and/or modified sequence
atgggaaaagtttatcgcgcggaccggaaatctgtgcaacgcatcaaggctagagatatagtgcctggggatattgttgaggtagccgtgggcgataaagtccctgcagatatccgcatcttggctatcaagtccactacacttagagtcgatcagtcaatattgacaggagaatccgtaagcgtgatcaagcatacagagcctgtccctgacccgcgggcagtgaaccaggataaaaaaaatatgctcttcagcggaacaaacatcgctgccggaaaggctttaggcatagtggcaactaccggggtgggcacagagatcggcaagatccgggaccaaatggctgccacggaacaggataaaacccctctccagcaaaaactggatgagttcggtgagcagttaagcaaggtcatttctttaatctgtgtggcagtgtggctgatcaatatcggacacttcaacgatcccgtacacggtggcagctggtttcgcggtgctatctattattttaagatcgctgttgcactggccgtggcagccattcccgagggtttacccgccgtcatcaccacctgcctggctcttgggacacgccgaatggccaagaaaaacgctattgttaggtctctaccctccgtggaaactctgggctgcacttccgttatatgcagcgataagactgggactctgaccacaaatcaaatgtcagtgtgcaaaatgttcataattgataaggtcgacggggatatatgtctcctcaatgaattcagcatcactgggagcacctacgcgccggagggtgaggttctgaagaacgataaacccgttcgtcccggtcagtacgatggcctggttgagctcgcaactatttgcgcactctgtaatgactccagcctagacttcaacgaagcaaagggggtgtatgagaaagttggcgaggccaccgaaactgctctgaccacattggtcgagaagatgaacgtttttaataccgacgtacgttcactaagcaaagtcgaacgggccaacgcctgtaactcagtcattcgccaacttatgaaaaaagaatttaccttggagttctctagagataggaagtctatgtcagtgtactgttccccagccaaatcatcacgagcagcggtgggtaataaaatgtttgtaaagggcgccccagagggcgtgattgatcgttgtaactatgtgagggttggcacgactcgagtgcctctgactggtcctgtgaaggaaaagatcatggccgtcattaaagagtgggggacgggaagagatacacttcgatgtctcgcattggctactcgcgacacccctccaaagcgagaggagatggtcttagacgattccgctcgatttttggagtatgagactgacctgacttttgtcggagtcgtgggaatgctagaccccccacgcaaagaggtcacgggaagcatacagctctgtcgggacgcaggaattcgagtcattatgatcacaggagataacaaaggaaccgcgatcgctatctgccggcggattggaatcttcggcgagaatgaagaggtggccgatagggcatatactgggcgcgagtttgatgacctccccctcgccgagcagcgcgaggcatgtcgaagggcgtgttgcttcgcgcgcgtcgaaccaagtcataagagcaagatcgtggagtatctccaatcctatgatgagataaccgccatgaccggcgatggcgtaaatgatgcccccgctcttaagaaagcagaaatcgggattgccatggggagtggaactgcagtggccaaaacggccagcgaaatggttttagctgatgacaatttctcaacaattgtcgccgccgttgaggagggtagagctatttacaacaacatgaaacaattcattcgttacttgataagcagtaacgtcggagaggtggtctgtatatttctaactgctgctctggggctgcccgaagcattaattccagtacagctgctgtgggtgaatctggtgaccgatgggctgccagcaacagccttagggttcaacccccccgatctcgatataatggacagaccccctcgaagccctaaggagcccctaattagcggatggctcttttttcggtacatggcaattggcggctacgtcggcgccgcaactgttggtgcagcagcctggtggtttctgtatgctgaggacggcccacatgttaattattcccagctcacccatttcatgcagtgtacagaggataatacccactttgagggcatagattgcgaagtgtttgaagccccggaacctatgaccatggccctctccgttctcgtcactattgaaatgtgtaacgccctcaattctctgtcagagaaccagagcctacttagaatgccgccctgggtaaatatttggctgctaggatctatctgtctgtctatgtcactgcactttctgattctgtacgtggatccgctccccatgattttcaaactccgcgccctcgacttgacccagtggctgatggtgctgaaaatttcactgcctgtgatcggactggacgagattttaaagttcgttgccaggaactatctggagggctag

SEQ ID NO: 104152 - DNA, 2610 bp, Artificial Sequence
  derived and/or modified sequence
atgggcaaggtgtacagagctgacaggaagtctgtgcagaggatcaaggcccgggacatcgtgcctggggacatcgtggaggtggccgtgggggacaaggtgcctgctgacatccgcatcctggccatcaagagcaccaccctgcgggtggaccagagcatcctgaccggggagagcgtgtctgtcatcaagcacacagagcctgtgcctgaccccagggctgtgaaccaggacaagaagaacatgctgttcagcggcaccaacattgctgctgggaaggccctgggcatcgtggccaccactggagtgggcacagaaattggcaagatccgggaccagatggccgccacagagcaggacaagacccccctgcagcagaagctggatgaatttggagagcagctgagcaaggtgatcagcctcatctgtgtggccgtgtggctgatcaacatcggccacttcaatgaccctgtgcatggaggctcctggttccggggggccatctactacttcaagattgctgtggccctggccgtggccgccatccctgagggcctgcctgctgtgatcaccacctgcctggccctgggcaccaggaggatggccaagaagaatgccatcgtgcgcagcctgcccagcgtggagaccctgggctgcaccagcgtcatctgcagcgacaagacaggcaccctgaccaccaaccagatgtctgtgtgcaagatgttcatcatcgacaaggtggatggagacatctgcctgctgaatgagttcagcatcaccggcagcacctacgcccctgagggggaggtgctgaagaatgacaagcctgtgcggcccggccagtatgatggcctggtggagctggccaccatctgtgccctgtgcaatgacagcagcctggacttcaatgaggccaagggcgtgtatgagaaggtgggggaggccacagaaacagccctgaccaccctggtggagaagatgaatgtgttcaacacagatgtgcgcagcctgagcaaggtggagcgggccaatgcctgcaacagcgtcatccggcagctgatgaagaaggagttcaccctggagttcagccgggacaggaagtccatgtctgtgtactgcagccctgccaagagcagcagagctgctgtgggcaacaagatgtttgtgaagggggcccctgagggcgtgattgaccgctgcaactacgtgcgggtgggcaccaccagggtgcccctgactggacctgtgaaggagaagatcatggccgtcatcaaggagtggggcaccggccgggacaccctgcgctgcctggccctggccacccgggacaccccacccaagcgggaggagatggtgctggatgacagcgcccgcttcctggagtatgaaacagacctgacctttgtgggcgtggtgggcatgctggacccccccaggaaggaggtgacaggcagcatccagctgtgcagagatgctggcatccgggtcatcatgatcaccggggacaacaagggcacagccatcgccatctgccgccgcatcggcatctttggagaaaatgaggaggtggccgaccgggcctacacaggccgggagtttgatgacctgcccctggccgagcagcgggaggcctgccggcgggcctgctgctttgcccgggtggagcccagccacaagagcaagatcgtggagtacctgcagagctatgatgagatcacagccatgactggagatggagtgaatgatgccccagccctgaagaaggccgagattggaattgccatgggcagcggcacagctgtggccaagacagccagcgagatggtgctggctgatgacaacttcagcaccatcgtggccgctgtggaggagggccgggccatctacaacaacatgaagcagttcatccgctacctgatcagcagcaatgtgggggaggtggtgtgcatcttcctgacagctgccctgggcctgcctgaggccctgatccctgtgcagctgctgtgggtgaacctggtgacagatggcctgcctgccacagccctgggcttcaaccccccagacctggacatcatggacaggcctcccaggagccccaaggagcccctcatcagcggctggctgttcttccgctacatggccatcggcggctacgtgggcgccgccaccgtgggcgctgctgcctggtggttcctgtatgcagaagatggcccccacgtgaactacagccagctgacccacttcatgcagtgcacagaggacaacacccactttgagggcatcgactgtgaggtgtttgaggcccctgagcccatgaccatggccctgtctgtgctggtgaccatcgagatgtgcaatgccctgaacagcctgtctgagaaccagagcctgctgaggatgccaccctgggtgaacatctggctgctgggcagcatctgcctgtccatgagcctgcacttcctgatcctgtatgtggaccccctgcccatgatcttcaagctgcgggccctggacctgacccagtggctgatggtgctgaagatcagcctgcctgtgattggcctggatgagatcctgaagtttgtggccaggaactacctggagggctag

SEQ ID NO: 104153 - DNA, 2610 bp, Artificial Sequence
  derived and/or modified sequence
atgggcaaggtgtaccgggccgaccggaagagcgtgcagcggatcaaggcacgtgacattgtccctggcgatattgtggaagtggctgtcggcgacaaagtgcccgccgatatccgaatcctggcaatcaagtccaccacactgagagtcgaccagtccatcctgacgggagaaagtgtatccgtcattaagcacacagagcccgttccagatccccgtgctgttaaccaggataagaaaaacatgctgttctccggtactaacattgctgccggaaaagcccttgggatcgtggcgacgaccggagtcggtacagagattgggaaaataagggatcaaatggccgcaactgagcaggataagacacccctccaacagaagctggatgagttcggtgagcagctctcaaaggtgatctcactgatatgtgtggcagtgtggttaattaatatcggccacttcaacgatcccgtacatgggggtagttggttccgtggggcaatttactattttaaaattgcagtagcacttgctgtggcagccatcccagagggtctgcccgccgtgatcacaacgtgtctggccttgggtacccggagaatggcgaagaagaacgctatcgtgcggagtctgcccagcgtggagaccctaggttgtaccagcgttatttgtagtgacaaaacaggtacactgactacgaaccagatgtcagtctgcaaaatgtttattatcgacaaggtagatggtgatatctgccttctgaacgagttcagcatcaccggatcaacttacgcgcctgagggagaggtcctgaagaacgataagccggtgaggcccgggcagtacgatggattggtagagctggctacaatttgtgccctttgcaacgattcgagtctggatttcaacgaggcgaagggcgtttacgagaaagtgggcgaggccaccgagactgctctgacaacacttgtagaaaagatgaacgtgttcaacactgatgtacgctctctgtccaaagtggagagggcaaatgcgtgtaacagtgttattaggcagctgatgaaaaaggagttcaccctcgagttttctcgagaccggaaaagtatgtcagtgtattgctcaccagcaaaatccagcagggcagccgtcggcaataaaatgtttgttaaaggagccccagaaggagtgatcgacagatgtaattatgtacgggtaggcacgaccagagtgcccctgacgggccctgtgaaagaaaaaatcatggccgtgataaaggagtggggaacgggtagggacacattgaggtgtttagccctagctacaagggacacacctccaaaacgagaggagatggttctcgatgattcagccagatttctcgagtatgagacagacttgactttcgttggcgtcgtcggcatgctggacccgccgcgcaaggaggtgaccggctctatacagctgtgtcgcgacgcgggaattagggttattatgattacaggagataacaaggggacagccatcgcaatctgccgaagaatcggcatctttggggaaaacgaggaagtggcggacagggcgtacaccggcagggaatttgacgaccttccactggccgagcagcgggaggcttgcaggagagcttgttgttttgcgcgagtggagcctagccataagagcaaaatcgtggagtacctccagtcatacgatgaaataacagccatgacgggcgacggtgttaatgatgcgcctgcacttaagaaagctgaaattggcatagcaatgggatcaggaacagctgtcgctaagacagcctctgaaatggtgctggctgacgataatttctctacaatagtggccgccgtcgaagaaggccgggcaatatacaacaacatgaagcaatttattagatatctcatctcatctaacgtgggcgaagtagtgtgtatcttcttgactgctgccctaggattgccagaagcactgatcccagtgcagctcctgtgggtcaacctggtgacagacggcctgccagctacggccctgggattcaacccaccagatctggatatcatggatcggcctccccgctcgcctaaagagcctttgatctcaggatggctattctttagatacatggcaatcgggggatacgtgggtgctgccacggtcggtgccgctgcatggtggttcctgtacgccgaagacggccctcacgtgaactatagccagcttacccacttcatgcagtgtactgaggacaatacgcactttgaaggcatagattgcgaggtcttcgaggcccccgagcctatgactatggccctgtccgtgttggtgactatcgagatgtgcaatgcgctgaatagcctctctgagaatcagagtctgctcaggatgcccccctgggttaacatatggctgctcgggagtatctgtctgtctatgtcccttcactttttgattctttacgtggacccgctgcccatgatcttcaaattgagggctctcgacctaactcagtggcttatggtactcaagatttccctgcccgtaattgggctcgatgaaattctgaagttcgtagcccgaaactacctcgaggggtag

SEQ ID NO: 104154 - DNA, 2610 bp, Artificial Sequence
  derived and/or modified sequence
atggggaaagtgtaccgagcggaccgcaagagcgtccagaggatcaaagccagggacattgtgcctggtgatatcgtcgaggtggccgtcggggataaggtgccggcagatatcagaatcttggcaatcaagtcaaccaccttgcgggttgatcagtctattttaactggtgagagcgtgtccgtgataaagcacacagaaccagtgcccgacccaagagctgtgaaccaagacaagaaaaacatgctgttcagcggcaccaatattgctgccggaaaggctctgggcatcgttgctactacaggtgtggggacggaaattggcaagatcagggatcagatggcagccacagagcaggataaaacacccctccagcagaagcttgatgaatttggcgaacagctcagtaaagtgatcagcctgatctgtgtggctgtctggctcattaacattggccacttcaacgatccagttcacggcggtagctggttcaggggcgcaatatactatttcaaaatcgctgttgccctcgccgtcgccgcaattcccgaaggtctacctgcggtcatcactacatgtttagcactaggcacacgcaggatggccaaaaaaaatgccatcgtacgctccctgccttccgtggaaactctgggatgcaccagcgtcatatgctccgacaagaccggcactctgacaaccaatcaaatgagcgtttgcaaaatgtttatcattgacaaagtggatggtgacatctgcttactcaacgaattttctattacaggatcaacatacgccccagagggggaggttctcaaaaacgacaagccagtccgaccaggccaatatgatgggctggtggagctggccaccatttgcgcattgtgcaacgattcatctctggatttcaatgaagctaagggggtgtacgagaaagtgggtgaggcaactgagacggcacttacaacgctagtggaaaagatgaatgtgttcaacaccgacgtccgcagcctgtctaaagttgagcgggctaacgcttgtaacagtgtaatccgccagttaatgaagaaggagttcactttggaattttcccgcgaccggaaaagtatgtctgtctattgttcaccagctaagagcagcagggcagccgtgggcaataagatgtttgtcaagggcgcaccagaaggggtaatcgataggtgcaattacgtgcgcgtcggaactacgcgggtccccctgactgggccagtgaaagaaaaaattatggccgtaattaaagagtggggcaccggacgcgacaccctccggtgcctggccctcgctacccgcgacacccctcccaaaagagaggaaatggtactcgacgactctgcgagatttttagaatacgaaaccgatttgactttcgtcggcgtggtcgggatgctcgacccacccagaaaggaagttacgggatcaatccagttgtgtcgagacgccggaattcgtgtgattatgataaccggcgataacaagggcacagcaatcgccatctgtagaagaataggaattttcggcgaaaacgaggaagtcgccgatagggcgtatactggaagagagtttgatgatttgcctctggctgagcaaagagaggcatgcagaagggcctgttgcttcgccagggtcgagccttcccacaagagcaaaattgtcgagtacctccaatcatacgacgaaattactgccatgactggcgacggtgtaaacgatgcaccagctcttaagaaagcagaaatcgggatcgccatggggtccggtacggccgtggcaaaaactgctagcgaaatggtgcttgctgacgacaatttttcaaccatcgttgcggctgtggaagagggcagagccatatacaacaacatgaaacagttcattcgttacctgataagctcaaacgttggggaggtggtgtgtatcttcctgacggctgcattaggcctgcctgaggcactaatcccagtgcaactgctgtgggtcaatttggtcacagatgggcttcctgctactgccctgggcttcaatcctccagaccttgacatcatggatcgtccccctagatctcctaaagaacccctgatctctggctggctgttcttccgctacatggccatcggtggctatgtcggtgcagcaacagtgggcgcagccgcttggtggttcctgtatgctgaagatgggcctcatgtaaactattcccagctgacccatttcatgcagtgtacggaggataatactcatttcgaggggatcgactgcgaagtctttgaggctcccgagcctatgactatggccctgtctgtcctcgttaccatcgaaatgtgcaacgctctgaacagcctttcagaaaatcagtccctgttgaggatgcccccttgggttaacatctggctcctgggcagcatatgtctatctatgtcactgcacttccttatactgtacgttgaccctctgccaatgattttcaagctaagggccctggatctgacccagtggcttatggtgctgaagataagcttgcctgtgatcggccttgatgagattttaaagttcgtggccagaaattaccttgagggatag

SEQ ID NO: 104155 - DNA, 2610 bp, Artificial Sequence
  derived and/or modified sequence
atgggcaaggtgtacagagccgacagaaagagcgtgcagagaatcaaggccagagacatcgtgcccggcgacatcgtggaggtggccgtgggcgacaaggtgcccgccgacatcagaatcctggccatcaagagcaccaccctgagagtggaccagagcatcctgaccggcgagagcgtgagcgtgatcaagcacaccgagcccgtgcccgaccccagagccgtgaaccaggacaagaagaacatgctgttcagcggcaccaacatcgccgccggcaaggccctgggcatcgtggccaccaccggcgtgggcaccgagatcggcaagatcagagaccagatggccgccaccgagcaggacaagacccccctgcagcagaagctggacgagttcggcgagcagctgagcaaggtgatcagcctgatctgcgtggccgtgtggctgatcaacatcggccacttcaacgaccccgtgcacggcggcagctggttcagaggcgccatctactacttcaagatcgccgtggccctggccgtggccgccatccccgagggcctgcccgccgtgatcaccacctgcctggccctgggcaccagaagaatggccaagaagaacgccatcgtgagaagcctgcccagcgtggagaccctgggctgcaccagcgtgatctgcagcgacaagaccggcaccctgaccaccaaccagatgagcgtgtgcaagatgttcatcatcgacaaggtggacggcgacatctgcctgctgaacgagttcagcatcaccggcagcacctacgcccccgagggcgaggtgctgaagaacgacaagcccgtgagacccggccagtacgacggcctggtggagctggccaccatctgcgccctgtgcaacgacagcagcctggacttcaacgaggccaagggcgtgtacgagaaggtgggcgaggccaccgagaccgccctgaccaccctggtggagaagatgaacgtgttcaacaccgacgtgagaagcctgagcaaggtggagagagccaacgcctgcaacagcgtgatcagacagctgatgaagaaggagttcaccctggagttcagcagagacagaaagagcatgagcgtgtactgcagccccgccaagagcagcagagccgccgtgggcaacaagatgttcgtgaagggcgcccccgagggcgtgatcgacagatgcaactacgtgagagtgggcaccaccagagtgcccctgaccggccccgtgaaggagaagatcatggccgtgatcaaggagtggggcaccggcagagacaccctgagatgcctggccctggccaccagagacaccccccccaagagagaggagatggtgctggacgacagcgccagattcctggagtacgagaccgacctgaccttcgtgggcgtggtgggcatgctggacccccccagaaaggaggtgaccggcagcatccagctgtgcagagacgccggcatcagagtgatcatgatcaccggcgacaacaagggcaccgccatcgccatctgcagaagaatcggcatcttcggcgagaacgaggaggtggccgacagagcctacaccggcagagagttcgacgacctgcccctggccgagcagagagaggcctgcagaagagcctgctgcttcgccagagtggagcccagccacaagagcaagatcgtggagtacctgcagagctacgacgagatcaccgccatgaccggcgacggcgtgaacgacgcccccgccctgaagaaggccgagatcggcatcgccatgggcagcggcaccgccgtggccaagaccgccagcgagatggtgctggccgacgacaacttcagcaccatcgtggccgccgtggaggagggcagagccatctacaacaacatgaagcagttcatcagatacctgatcagcagcaacgtgggcgaggtggtgtgcatcttcctgaccgccgccctgggcctgcccgaggccctgatccccgtgcagctgctgtgggtgaacctggtgaccgacggcctgcccgccaccgccctgggcttcaacccccccgacctggacatcatggacagaccccccagaagccccaaggagcccctgatcagcggctggctgttcttcagatacatggccatcggcggctacgtgggcgccgccaccgtgggcgccgccgcctggtggttcctgtacgccgaggacggcccccacgtgaactacagccagctgacccacttcatgcagtgcaccgaggacaacacccacttcgagggcatcgactgcgaggtgttcgaggcccccgagcccatgaccatggccctgagcgtgctggtgaccatcgagatgtgcaacgccctgaacagcctgagcgagaaccagagcctgctgagaatgcccccctgggtgaacatctggctgctgggcagcatctgcctgagcatgagcctgcacttcctgatcctgtacgtggaccccctgcccatgatcttcaagctgagagccctggacctgacccagtggctgatggtgctgaagatcagcctgcccgtgatcggcctggacgagatcctgaagttcgtggccagaaactacctggagggctag

SEQ ID NO: 104156 - protein, 297 aa, Artificial Sequence
  derived and/or modified sequence
MAELTALESLIEMGFPRGRAEKALALTGNQGIEAAMDWLMEHEDDPDVDEPLETPLGHILGREPTSSEQGGLEGSGSAAGEGKPALSEEERQEQTKRMLELVAQKQREREEREEREALERERQRRRQGQELSAARQRLQEDEMRRAAEERRREKAEELAARQRVREKIERDKAERAKKYGGSVGSQPPPVAPEPGPVPSSPSQEPPTKREYDQCRIQVRLPDGTSLTQTFRAREQLAAVRLYVELHRGEELGGGQDPVQLLSGFPRRAFSEADMERPLQELGLVPSAVLIVAKKCPS

SEQ ID NO: 104157 - protein, 290 aa, Artificial Sequence
  derived and/or modified sequence
MAELTALESLIEMGFPRGRAEKALALTGNQGIEAAMDWLMEHEDDPDVDEPLETPLGHILGREPTSSEQGGLEGSGSAAGEGKPALSEEERQEQTKRMLELVAQKQREREEREEREALERERQRRRQGQELSAARQRLQEDEMRRAAEERRREKAEELAARQRVREKIERDKAERAKKYGGSVGSQPPPVAPEPGPVPSSPSQEPPTKREYDQCRIQVRLPDGTSLTQTFRAREQLAAVRLYVELHRGEELGGGQDPVQLLSGFPRRAFSEADMERPLQELGLVPSAVLI

SEQ ID NO: 104158 - protein, 200 aa, Artificial Sequence
  derived and/or modified sequence
MLELVAQKQREREEREEREALERERQRRRQGQELSAARQRLQEDEMRRAAEERRREKAEELAARQRVREKIERDKAERAKKYGGSVGSQPPPVAPEPGPVPSSPSQEPPTKREYDQCRIQVRLPDGTSLTQTFRAREQLAAVRLYVELHRGEELGGGQDPVQLLSGFPRRAFSEADMERPLQELGLVPSAVLIVAKKCPS

SEQ ID NO: 104159 - DNA, 873 bp, Artificial Sequence
  derived and/or modified sequence
atggccgagctgaccgccctggagagcctgatcgagatgggcttccccagaggcagagccgagaaggccctggccctgaccggcaaccagggcatcgaggccgccatggactggctgatggagcacgaggacgaccccgacgtggacgagcccctggagacccccctgggccacatcctgggcagagagcccaccagcagcgagcagggcggcctggagggcagcggcagcgccgccggcgagggcaagcccgccctgagcgaggaggagagacaggagcagaccaagagaatgctggagctggtggcccagaagcagagagagagagaggagagagaggagagagaggccctggagagagagagacagagaagaagacagggccaggagctgagcgccgccagacagagactgcaggaggacgagatgagaagagccgccgaggagagaagaagagagaaggccgaggagctggccgccagacagagagtgagagagaagatcgagagagacaaggccgagagagccaagaagtacggcggcagcgtgggcagccagcccccccccgtggcccccgagcccggccccgtgcccagcagccccagccaggagccccccaccaagagagagtacgaccagtgcagaatccaggtgagactgcccgacggcaccagcctgacccagaccttcagagccagagagcagctggccgccgtgagactgtacgtggagctgcacagaggcgaggagctgggcggcggccaggaccccgtgcagctgctgagcggcttccccagaagagccttcagcgaggccgacatggagagacccctgcaggagctgggcctggtgcccagcgccgtgctgatctag

SEQ ID NO: 104160 - DNA, 894 bp, Artificial Sequence
  derived and/or modified sequence
atggccgagctaacggccctcgaatcactcattgagatggggtttccccgcgggcgggcggagaaggccctggcgctgacggggaaccagggaatagaggcagctatggattggcttatggagcacgaagatgatcccgacgtcgacgaacccttggagacaccactagggcacatcctgggcagggaacccacttcttcagagcaggggggcctcgaggggtctggaagcgccgctggcgagggcaaaccagccctgagcgaggaggagcgccaggaacagacgaaacggatgctcgaactggtcgctcaaaagcagagggagagggaggagagggaggagagggaggccctagagagggaacggcaacgtcgtcgtcagggacaggaactctccgcagcacggcagagactgcaggaagacgagatgcgccgggcagcggaagagcggcgccgagaaaaagccgaggaactggccgcaaggcaaagggtacgggagaagatcgagcgagataaagctgagagggcaaagaaatatggaggcagtgtcggcagccaaccccctcccgtcgcacctgagcctggcccagttccatcttcacctagccaagaaccaccgacgaaaagagaatatgaccagtgtaggatccaggtccgcttaccagatggcacctctcttacacagaccttcagggctcgggagcagctggcggccgtaagactgtatgtcgaactgcacagaggtgaggagctgggcgggggccaggaccccgtccagctgctgagcggattcccaaggcgggcgttcagcgaagcggatatggagcgcccccttcaggaactgggactcgtcccatccgccgtgttaatcgtggctaaaaagtgccctagttag

SEQ ID NO: 104161 - DNA, 873 bp, Artificial Sequence
  derived and/or modified sequence
atggcagagcttacggctcttgagtcattgattgaaatggggttcccacgcggacgggcggagaaggcattggctctgaccggcaatcaaggcattgaagccgccatggactggttgatggagcacgaggatgatccagatgttgacgagcccttggaaacacccctggggcatattctgggtcgggagcctacctcttccgagcaaggtggcctcgagggcagtgggagcgccgccggagagggaaagcccgcattatccgaggaggaacggcaagaacaaaccaagagaatgcttgagctggtagctcaaaaacaaagggagagggaagagagagaggaaagagaggcactcgaacgtgaaaggcagagaagaagacagggacaagagcttagcgccgcgaggcagaggctacaggaggatgagatgaggcgggccgccgaagagcggcgcagagaaaaagccgaggagctggcggcccgacagcgcgtgcgggagaagatcgagagggacaaggcggaaagggcaaaaaaatatggtggctctgtcggctctcaacctcctcctgtggcccccgaacccgggccagtaccgtcctctcctagtcaggagcctccaaccaaacgcgagtacgaccagtgtcgcattcaggttcggttacccgatgggacatccctcacacagaccttccgggcccgcgaacagttggctgccgtccggctgtacgtggagctccatcggggagaagaactcggtggaggccaggatccagtacagctcctgtctggttttcctcggcgagctttttcagaggcagacatggaacgtcctctacaggaactgggcctggttccttccgcggtcctgatctag

SEQ ID NO: 104162 - DNA, 894 bp, Artificial Sequence
  derived and/or modified sequence
atggccgagctgacagccctggagagcctgattgagatgggcttcccccggggccgggcagagaaggccctggccctgactggaaaccagggcatcgaggccgccatggactggctgatggagcatgaagatgatcctgatgtggatgagcccctggagacccccctgggccacatcctgggccgggagcccaccagcagcgagcagggcggcctggagggcagcggcagcgctgctggggagggcaagccagccctgtctgaggaggagcggcaggagcagaccaagaggatgctggagctggtggcccagaagcagcgggagcgggaggagcgggaggagcgggaggccctggagcgggagcggcagaggcggcggcagggccaggagctgtctgctgcccggcagaggctgcaggaggatgagatgagaagagctgctgaggagaggagaagagagaaggccgaggagctggccgcccggcagagggtgcgggagaagattgaaagagacaaggccgagcgggccaagaagtatggaggctctgtgggcagccagcccccacctgtggcccctgagcccggccctgtgcccagcagccccagccaggagccccccaccaagcgggagtatgaccagtgccgcatccaggtgcggctgcctgatggcaccagcctgacccagaccttccgggcccgggagcagctggccgctgtgcggctgtatgtggagctgcacagaggagaggagctgggcggcggccaggaccctgtgcagctgctgagcggcttcccccggcgggccttcagcgaggccgacatggagcggcccctgcaggagctgggcctggtgcccagcgctgtgctgattgtggccaagaagtgccccagctag

SEQ ID NO: 104163 - DNA, 873 bp, Artificial Sequence
  derived and/or modified sequence
atggccgagctgacagccctggagagcctgattgagatgggcttcccccggggccgggcagagaaggccctggccctgactggaaaccagggcatcgaggccgccatggactggctgatggagcatgaagatgatcctgatgtggatgagcccctggagacccccctgggccacatcctgggccgggagcccaccagcagcgagcagggcggcctggagggcagcggcagcgctgctggggagggcaagccagccctgtctgaggaggagcggcaggagcagaccaagaggatgctggagctggtggcccagaagcagcgggagcgggaggagcgggaggagcgggaggccctggagcgggagcggcagaggcggcggcagggccaggagctgtctgctgcccggcagaggctgcaggaggatgagatgagaagagctgctgaggagaggagaagagagaaggccgaggagctggccgcccggcagagggtgcgggagaagattgaaagagacaaggccgagcgggccaagaagtatggaggctctgtgggcagccagcccccacctgtggcccctgagcccggccctgtgcccagcagccccagccaggagccccccaccaagcgggagtatgaccagtgccgcatccaggtgcggctgcctgatggcaccagcctgacccagaccttccgggcccgggagcagctggccgctgtgcggctgtatgtggagctgcacagaggagaggagctgggcggcggccaggaccctgtgcagctgctgagcggcttcccccggcgggccttcagcgaggccgacatggagcggcccctgcaggagctgggcctggtgcccagcgctgtgctgatctag

SEQ ID NO: 104164 - DNA, 894 bp, Artificial Sequence
  derived and/or modified sequence
atggccgagctgaccgccctggagagcctgatcgagatgggcttccctcgtggtcgagctgagaaagctctggccttgacaggcaaccagggcatcgaggccgcaatggactggctcatggagcacgaggatgatcccgatgtagacgaacccctggagaccccactggggcacatattggggagagaaccaacatcctccgagcagggaggattggagggcagcggcagtgcagcaggagagggtaaacctgccctgtccgaagaggaacgacaggaacagaccaagaggatgctggaactcgtcgcccagaagcagcgggagagagaggaaagggaggagcgggaggccttagagcgcgaacgacagagacggcgacagggacaagaactcagtgcagcaaggcagagactccaggaggatgagatgagaagggccgccgaagagcgcaggcgagagaaagccgaagagctggccgcccggcagagagttagagaaaagatcgaaagagacaaagccgaacgggccaaaaaatatggtggctctgtaggttcacagcccccacccgtggcccccgagcccggcccagtgccttccagtccaagtcaagagcctccaacaaaaagggaatatgatcagtgccgaattcaagttaggttgccggacggcacttcgctcacccagactttccgggcaagggaacagctcgctgctgtgaggctatacgtggagttgcacaggggcgaggaacttggaggcggccaagatcctgttcagctgttatcaggtttcccacgcagagccttctcagaagccgacatggagaggcctctccaagaattgggccttgtgccatccgcggtccttatcgtcgctaaaaaatgtccatcctag

SEQ ID NO: 104165 - DNA, 873 bp, Artificial Sequence
  derived and/or modified sequence
atggccgagctgaccgccctggagagcctgatcgagatgggcttccccagagggagggccgaaaaagcactagccttgaccggcaaccagggcattgaggcagccatggattggttgatggagcacgaggacgatcctgatgttgacgaaccactcgagacgccccttggtcatattttggggagggaacccacatcttctgaacagggtggcctggagggatcgggatctgctgctggggagggaaagcccgctctctccgaggaggagcgccaggagcagactaagcgtatgctggaactcgtagcccagaaacaaagggagagagaggagagagaggagcgcgaggccctggagagagagaggcagcgccgcaggcagggccaggagttatctgcagccaggcaaaggcttcaggaggatgagatgcgcagagctgccgaggagaggcgacgcgaaaaggctgaggagttggcagccaggcagagagtccgagaaaagatagaacgggacaaggctgagagagcaaaaaaatacggcgggtcagttgggagccagccaccccccgtggctcctgaacctggccctgtgccatcatctccctcccaggagcctccaacgaagcgagaatacgatcaatgtcgtatacaagtccggttacccgatggtacaagcctgacacagaccttccgggctcgcgaacagctggccgcagtgcgcctttatgtggagttgcatcggggagaggagttgggcggcggacaggacccagtccagctgctgtccggatttccaagaagggccttctctgaggccgatatggagagaccacttcaggaactgggtctagtcccttccgctgttctcatctag

SEQ ID NO: 104166 - DNA, 894 bp, Artificial Sequence
  derived and/or modified sequence
atggccgaactgacagccctggagagcctgattgagatgggctttccgcgaggtagggcggagaaagcactggctctgacaggtaaccagggaatcgaggctgcaatggattggctcatggagcacgaggacgaccctgatgtggacgagcccttggagactcctttgggtcacatattgggcagggagccaacatcctcagagcaaggcggactcgaaggtagcggcagcgctgctggcgagggcaagcctgctctgagcgaagaagagcgtcaggagcagaccaagcgtatgctcgagcttgtggcccagaaacagagggaaagagaggagcgggaggagcgggaggctttggaaagagaaagacagcggagaaggcagggacaggagctttccgcagcaaggcaaagactgcaagaagacgagatgaggcgagcagctgaggagaggaggagggaaaaggctgaagagctggccgcaagacagcgtgtcagagagaaaatcgaaagagataaagctgaacgtgcaaaaaagtacggaggaagcgtggggtcacagcctccccctgtggcgccagagccaggccctgtcccttcctccccctcccaggagccgccaacgaaaagggagtacgaccaatgtaggatacaggtcagactaccggatggtaccagcctgacacagactttccgcgctagggaacaactggccgctgtgagactgtatgtggagcttcataggggtgaggagctggggggaggacaagaccccgtccagttgctcagcggatttccaaggagggcattcagtgaggcagacatggagcgtccattacaagaactcgggctggtgccctcagcagtgctgatcgtcgcaaagaagtgcccttcttag

SEQ ID NO: 104167 - DNA, 873 bp, Artificial Sequence
  derived and/or modified sequence
atggccgaattgaccgctttagagagtttgatcgagatgggcttcccaaggggacgagcagaaaaggctctggccttgacaggaaatcaggggatagaagctgcaatggactggctgatggagcatgaagatgaccctgatgtggacgaaccattggaaacacctctggggcacatcctgggccgtgagcctacctcctccgagcagggtggtctggagggctccgggtctgccgcaggcgaaggcaagccagccctgtctgaagaagaacgacaggaacagacaaaaaggatgctggagttagtggctcagaagcagagagagagagaggaaagggaggagagagaggccctggagagggaaagacagaggcgccgacaggggcaagagctcagtgctgccagacaaagactgcaggaagacgaaatgcggagagctgcggaagagaggcggagggaaaaggctgaggagctagctgctcgtcaaagggtgcgagaaaagattgagcgagacaaggccgaaagggctaagaagtatgggggaagcgtggggagtcagcccccaccagtggcacccgaacccggtccagtcccctcaagtccttcacaggagcctcctaccaagagggaatatgaccaatgtaggatacaggtgaggttgcccgatggtacttccctcacccagacgtttagggctcgggagcagttagccgctgtccggctgtacgtggaattgcaccgtggagaagagctgggaggcggtcaggaccctgttcaactcctgagtggttttcccagaagggccttcagtgaggccgatatggagcggcctctgcaggaacttggactggtaccgtcggcagttttgatctag

SEQ ID NO: 104168 - DNA, 943 bp, Artificial Sequence
  derived and/or modified sequence
tcggctttcttctcgtcggtgttcccggctgctatagagccgggtccccgcggaagccgcggtgtcggcgccatggcggagctgacggctcttgagagtctcatcgagatgggcttccccaggggacgcgcggagaaggctctggccctcacagggaaccagggcatcgaggctgcgatggactggctgatggagcacgaagacgaccccgatgtggacgagcctttagagactccccttggacatatcctgggacgggagcccacttcctcagagcaaggcggccttgaaggatctggttctgctgccggagaaggcaaacccgctttgagtgaagaggaaagacaggaacaaactaagaggatgttggagctggtggcccagaagcagcgggagcgtgaagaaagagaggaacgggaggcattggaacgggaacggcagcgcaggagacaagggcaagagttgtcagcagcacgacagcggctacaggaagatgagatgcgccgggctgctgaggagaggcggagggaaaaggccgaggagttagcagccagacaaagagttagagaaaagatcgagagggacaaagcagagagagccaagaagtatggtggcagtgtgggctctcagccacccccagtggcaccagagccaggtcctgttccctcttctcccagccaggagcctcccaccaagcgggagtatgaccagtgtcgcatacaggtcaggctgccagatgggacctcactgacccagacgttccgggcccgggaacagctggcagctgtgaggctctatgtggagctccaccgtggggaggaactaggtgggggccaggaccctgtgcaattgctcagtggcttccccagacgggccttctcagaagctgacatggagcggcctctgcaggagctgggactcgtgccttctgctgttctcattg

SEQ ID NO: 104169 - DNA, 1037 bp, Artificial Sequence
  derived and/or modified sequence
cttctcgtcggtgttcccggctgctatagagccgggtgagagagcgagcgcccgtcggcgggtgtcgagggcgggttgcctcgcgctgacccttcccgccctccttctcgtcacacaccaggtccccgcggaagccgcggtgtcggcgccatggcggagctgacggctcttgagagtctcatcgagatgggcttccccaggggacgcgcggagaaggctctggccctcacagggaaccagggcatcgaggctgcgatggactgtttgtttgtaggatctggttctgctgccggagaaggcaaacccgctttgagtgaagaggaaagacaggaacaaactaagaggatgttggagctggtggcccagaagcagcgggagcgtgaagaaagagaggaacgggaggcattggaacgggaacggcagcgcaggagacaagggcaagagttgtcagcagcacgacagcggctacaggaagatgagatgcgccgggctgctgaggagaggcggagggaaaaggccgaggagttagcagccagacaaagagttagagaaaagatcgagagggacaaagcagagagagccaagaagtatggtggcagtgtgggctctcagccacccccagtggcaccagagccaggtcctgttccctcttctcccagccaggagcctcccaccaagcgggagtatgaccagtgtcgcatacaggtcaggctgccagatgggacctcactgacccagacgttccgggcccgggaacagctggcagctgtgaggctctatgtggagctccaccgtggggaggaactaggtgggggccaggaccctgtgcaattgctcagtggcttccccagacgggccttctcagaagctgacatggagcggcctctgcaggagctgggactcgtgccttctgctgttctcattgtggccaagaaatgtcccagctgagggcctttgtcccattgtccctctgtgaccccttcatctttgataaagcactgacatctccttcctaataaatagaccctgagttctgt

SEQ ID NO: 104170 - DNA, 1153 bp, Artificial Sequence
  derived and/or modified sequence
cgcttcccctcggctttcttctcgtcggtgttcccggctgctatagagccgggtgagagagcgagcgcccgtcggcgggtgtcgagggcgggttgcctcgcgctgacccttcccgccctccttctcgtcacacaccaggtccccgcggaagccgcggtgtcggcgccatggcggagctgacggctcttgagagtctcatcgagatgggcttccccaggggacgcgcggagaaggctctggccctcacagggaaccagggcatcgaggctgcgatggactggctgatggagcacgaagacgaccccgatgtggacgagcctttagagactccccttggacatatcctgggacgggagcccacttcctcagagcaaggcggccttgaaggatctggttctgctgccggagaaggcaaacccgctttgagtgaagaggaaagacaggaacaaactaagaggatgttggagctggtggcccagaagcagcgggagcgtgaagaaagagaggaacgggaggcattggaacgggaacggcagcgcaggagacaagggcaagagttgtcagcagcacgacagcggctacaggaagatgagatgcgccgggctgctgaggagaggcggagggaaaaggccgaggagttagcagccagacaaagagttagagaaaagatcgagagggacaaagcagagagagccaagaagtatggtggcagtgtgggctctcagccacccccagtggcaccagagccaggtcctgttccctcttctcccagccaggagcctcccaccaagcgggagtatgaccagtgtcgcatacaggtcaggctgccagatgggacctcactgacccagacgttccgggcccgggaacagctggcagctgtgaggctctatgtggagctccaccgtggggaggaactaggtgggggccaggaccctgtgcaattgctcagtggcttccccagacgggccttctcagaagctgacatggagcggcctctgcaggagctgggactcgtgccttctgctgttctcattgtggccaagaaatgtcccagctgagggcctttgtcccattgtccctctgtgaccccttcatctttgataaagcactgacatctccttcctaataaatagaccctgagttctgtaca

SEQ ID NO: 104171 - DNA, 894 bp, Artificial Sequence
  derived and/or modified sequence
atggccgagctgaccgccctggagagcctgatcgagatgggcttccccagaggcagagccgagaaggccctggccctgaccggcaaccagggcatcgaggccgccatggactggctgatggagcacgaggacgaccccgacgtggacgagcccctggagacccccctgggccacatcctgggcagagagcccaccagcagcgagcagggcggcctggagggcagcggcagcgccgccggcgagggcaagcccgccctgagcgaggaggagagacaggagcagaccaagagaatgctggagctggtggcccagaagcagagagagagagaggagagagaggagagagaggccctggagagagagagacagagaagaagacagggccaggagctgagcgccgccagacagagactgcaggaggacgagatgagaagagccgccgaggagagaagaagagagaaggccgaggagctggccgccagacagagagtgagagagaagatcgagagagacaaggccgagagagccaagaagtacggcggcagcgtgggcagccagcccccccccgtggcccccgagcccggccccgtgcccagcagccccagccaggagccccccaccaagagagagtacgaccagtgcagaatccaggtgagactgcccgacggcaccagcctgacccagaccttcagagccagagagcagctggccgccgtgagactgtacgtggagctgcacagaggcgaggagctgggcggcggccaggaccccgtgcagctgctgagcggcttccccagaagagccttcagcgaggccgacatggagagacccctgcaggagctgggcctggtgcccagcgccgtgctgatcgtggccaagaagtgccccagctag

SEQ ID NO: 104172 - DNA, 309 bp, Artificial Sequence
  derived and/or modified sequence
atgagatacggcttcgtgagaaagaagcacagaggcctgttcctgaccaccgtggccgccctgcccatctggaaccccatcagcgagttcgtgaagtggtacaagagccacaagctgagccagcactgcatcagaatctgcggccacctgtgccagaagcacctggacatgttcctgagcgtgatcggccagagatggcccatcgacgtgttcagcagcgtgttcgaccaccaggtgagcgccatcggcagcgacatcatctggtggttcctgaagctgttcctggtgagcttcttcttcttcttctag

SEQ ID NO: 104173 - DNA, 603 bp, Artificial Sequence
  derived and/or modified sequence
atgctggagctggtggcccagaagcagagagagagagaggagagagaggagagagaggccctggagagagagagacagagaagaagacagggccaggagctgagcgccgccagacagagactgcaggaggacgagatgagaagagccgccgaggagagaagaagagagaaggccgaggagctggccgccagacagagagtgagagagaagatcgagagagacaaggccgagagagccaagaagtacggcggcagcgtgggcagccagcccccccccgtggcccccgagcccggccccgtgcccagcagccccagccaggagccccccaccaagagagagtacgaccagtgcagaatccaggtgagactgcccgacggcaccagcctgacccagaccttcagagccagagagcagctggccgccgtgagactgtacgtggagctgcacagaggcgaggagctgggcggcggccaggaccccgtgcagctgctgagcggcttccccagaagagccttcagcgaggccgacatggagagacccctgcaggagctgggcctggtgcccagcgccgtgctgatcgtggccaagaagtgccccagctag

SEQ ID NO: 104174 - DNA, 603 bp, Artificial Sequence
  derived and/or modified sequence
atgctggaactggtggctcaaaagcaacgggaaagagaggaacgagaggagagagaggcattagagagagagcgccagcggagaagacagggacaggagctgagtgccgcgcgacagcgactgcaggaggacgagatgagacgcgcggcggaagagcggcgacgtgagaaggccgaagagctggctgcaagacagagggtacgggagaagatagagcgggacaaggctgaaagggcaaaaaagtacggcgggtccgtcggctcccagcctccccctgtcgccccagaaccgggacctgtgccaagctctccctcacaggagccacctactaaaagagagtacgaccagtgcagaatccaggttaggctacccgacgggacatccctcacccaaaccttcagggcaagagaacagctggccgcggtgcgcttgtacgtcgaattgcaccgaggggaggaactggggggaggacaggatcctgtgcagcttctgagtgggttcccgagacgggcgttctcagaggcggacatggagagacctctgcaggagcttggcctcgtgccaagtgcagtactgattgtagccaagaagtgtccaagctag

SEQ ID NO: 104175 - DNA, 603 bp, Artificial Sequence
  derived and/or modified sequence
atgctggagctggtggcccagaagcagcgggagcgggaggagcgggaggagcgggaggccctggagcgggagcggcagaggcggcggcagggccaggagctgtctgctgcccggcagaggctgcaggaggatgagatgagaagagctgctgaggagcggcggcgggagaaggccgaggagctggccgcccggcagagggtgcgggagaagattgagcgggacaaggccgagcgggccaagaagtatggaggctctgtgggcagccagcccccacctgtggcccctgagcccggccctgtgcccagcagccccagccaggagccccccaccaagcgggagtatgaccagtgccgcatccaggtgcggctgcctgatggcaccagcctgacccagaccttccgggcccgggagcagctggccgctgtgcggctgtatgtggagctgcacagaggagaggagctgggcggcggccaggaccctgtgcagctgctgagcggcttcccccggcgggccttcagcgaggccgacatggagcggcccctgcaggagctgggcctggtgcccagcgctgtgctgattgtggccaagaagtgccccagctag

SEQ ID NO: 104176 - DNA, 603 bp, Artificial Sequence
  derived and/or modified sequence
atgctggagctggtggcccagaagcagcgggagcgggaggagcgggaggaacgcgaagcgctagaaagagagcgtcaacgccgcaggcagggacaggaattgtctgcggcccggcaacggctgcaggaagacgagatgcgccgggcggctgaagagcgtcggagggagaaagccgaggagctcgcagcccgtcaaagggtgcgagaaaaaatagagcgcgacaaagccgaaagggctaaaaaatatggaggatccgtgggatcccagccgccgccagtcgctcctgagcctgggcccgtgccatcatccccaagtcaggaacctccaactaagcgagaatatgaccagtgtaggattcaagtaaggctccctgacggcacctctctaacacagacctttagagcaagagagcaactggctgctgttaggctttacgtagaactgcaccgcggggaggagcttggtggaggacaggaccctgtgcaactgctttctggctttcccagacgcgcatttagtgaggcggacatggagcgccccttgcaggaattaggactcgtcccatccgcagtgttgatcgtggccaaaaaatgcccatcttag

SEQ ID NO: 104177 - DNA, 603 bp, Artificial Sequence
  derived and/or modified sequence
atgctcgagctggtggcacaaaagcagcgcgagcgtgaagagcgtgaagaaagggaggcgttagagcgcgaacgacagcgtagaagacaaggccaggagctgtcagccgctcgacagcgtttacaagaggatgaaatgagacgggctgcagaggagcgtcggcgtgagaaagctgaggaactcgcagcaaggcagcgagtaagggaaaagattgaaagggacaaggcggagcgcgctaaaaaatacgggggatcggttggttcccaaccgcctcccgtggctccggagcctggcccagtgccttcttctccctctcaggagccccctaccaagcgcgaatatgatcagtgcagaatccaggtgcgactgcccgacggaacatccctaactcagacctttcgtgccagggagcagctggccgcagtgcgattgtatgttgagctacatagaggggaggagctagggggaggacaggatccagtgcagttgttatcagggtttccacggagagcattcagtgaggctgacatggaacggcctttacaggagctcgggctggtgccctctgctgtcctgatcgtggccaaaaaatgcccctcctag

SEQ ID NO: 104178 - protein, 433 aa, Artificial Sequence
  derived and/or modified sequence
MLAATVLTLALLGNAHACSKGTSHEAGIVCRITKPALLVLNHETAKVIQTAFQRASYPDITGEKAMMLLGQVKYGLHNIQISHLSIASSQVELVEAKSIDVSIQNVSVVFKGTLKYGYTTAWWLGIDQSIDFEIDSAIDLQINTQLTCDSGRVRTDAPDCYLSFHKLLLHLQGEREPGWIKQLFTNFISFTLKLVLKGQICKEINVISNIMADFVQTRAASILSDGDIGVDISLTGDPVITASYLESHHKAVLETWGFNTNQEIFQEVVGGFPSQAQVTVHCLKMPKISCQNKGVVVNSSVMVKFLFPRPDQQHSVAYTFEEDIVTTVQASYSKKKLFLSLLDFQITPKTVSNLTESSSESVQSFLQSMITAVGIPEVMSRLEVVFTALMNSKGVSLFDIINPEIITRDGFLLLQMDFGFPEHLLVDFLQSLS

SEQ ID NO: 104179 - DNA, 1302 bp, Artificial Sequence
  derived and/or modified sequence
atgctggccgccaccgttctgacactagccctgctggggaacgcccacgcttgctccaaaggcacgtctcacgaggcgggcatagtctgcagaattacgaagccagcactgctcgtcctgaaccacgagacagccaaagtcattcagactgcctttcagagagccagttaccctgatataaccggggagaaagctatgatgctactcggacaagtgaagtacggactgcacaacatccagatctcccatttatccatcgcatcgagtcaggtggaacttgtagaagccaaaagcatagatgtgtcaatccagaacgtgtccgttgttttcaaagggacactaaagtacggatacacaacggcttggtggttgggcatcgatcaaagtatagatttcgagatcgattcagctattgatttgcaaatcaatacacagcttacctgcgactctggacgcgtccggactgatgccccagattgctatctctctttccacaagctcttactgcatttgcagggcgaaagggaacctgggtggatcaaacagctctttacaaactttatttctttcacactgaaacttgttctaaaagggcagatttgcaaggagattaacgtcatctccaatataatggcagattttgtgcagacccgagccgcgagcatactgagcgacggggatataggagtggacatctctctcaccggcgaccctgtcatcactgcatcatatctggagtcacaccacaaggcggtgcttgaaacctgggggtttaacacaaaccaggagatatttcaagaggtggtggggggttttccgtcccaggcccaggtgaccgtgcattgtctaaagatgcctaagatttcttgtcagaacaagggcgtggtggtgaacagtagcgtcatggttaaattcttattcccacgtcctgatcagcaacacagtgtggcttatacgttcgaggaggatattgttaccaccgtgcaagctagttatagcaagaagaaattatttctgtctctcctggactttcaaatcacacctaaaaccgtctctaacttgaccgagtcctcctcagagagcgtgcagtccttcctccagtccatgatcactgctgttgggatccctgaggttatgtctaggctggaggtggtcttcaccgctctgatgaacagtaagggagtctctctgtttgacattattaatcctgagataatcacacgggatggcttcctcctgctccagatggactttgggtttccagaacatttgctcgtcgattttcttcagtcgctctcatag

SEQ ID NO: 104180 - DNA, 1302 bp, Artificial Sequence
  derived and/or modified sequence
atgctggccgccaccgtgctgaccctggccctgctgggcaatgcccacgcctgcagcaagggcaccagccatgaggccggcatcgtgtgccgcatcaccaagccagccctgctggtgctgaaccacgagacagccaaggtgatccagacagccttccagagggccagctacccagacatcactggagagaaggccatgatgctgctgggccaggtgaagtatggcctgcacaacatccagatcagccacctgagcatcgccagcagccaggtggagctggtggaggccaagagcattgatgtgtccatccagaatgtgtctgtggtgttcaagggcaccctgaagtatggctacaccacagcctggtggctgggcatcgaccagagcattgactttgaaattgacagcgccatcgacctgcagatcaacacccagctgacctgtgacagcggccgggtgaggacagatgccccagactgctacctgtccttccacaagctgctgctgcacctgcagggcgagcgggagcccggctggatcaagcagctgttcaccaacttcatctccttcaccctgaagctggtgctgaagggccagatctgcaaggagatcaacgtcatcagcaacatcatggctgactttgtgcagaccagggctgccagcatcctgagtgatggagacatcggcgtggacatcagcctgactggagaccccgtcatcacagccagctacctggagagccaccacaaggctgtgctggagacctggggcttcaacaccaaccaggagatcttccaggaggtggtgggcggcttccccagccaggcccaggtgacagtgcactgcctgaagatgcccaagatcagctgccagaacaagggcgtggtggtgaacagctctgtgatggtgaagttcctgttccccaggccagaccagcagcacagcgtggcctacacctttgaggaggacatcgtgaccaccgtgcaggccagctacagcaagaagaagctgttcctgagcctgctggacttccagatcacccccaagacagtgagcaacctgacagagagcagcagcgagagcgtgcagagcttcctgcagagcatgatcacagctgtgggcatccctgaggtgatgagccggctggaggtggtgttcaccgccctgatgaacagcaaaggagtgtccctgtttgacatcatcaaccctgagatcatcaccagagatggcttcctgctgctgcagatggactttggcttccctgagcacctgctggtggacttcctgcagagcctgtcctag

SEQ ID NO: 104181 - DNA, 1302 bp, Artificial Sequence
  derived and/or modified sequence
atgctggccgccaccgtgctgaccctggccctgctgggcaacgcccacgcctgttctaaaggcaccagccacgaagcagggatcgtgtgcagaatcactaagcctgccctccttgtgctcaatcatgagaccgcaaaagtgattcagaccgcctttcaacgggcctcctaccctgatataacgggcgagaaggcgatgatgttgctgggccaggtgaaatacggcctgcataacatacagatctcccatctgagtatcgcttcctctcaggtggagcttgtggaagcaaaatcaatcgacgtgagtatccagaatgtatctgtagtcttcaagggcactcttaagtacggttacactactgcctggtggcttggcattgaccagtccatcgactttgagatagattctgccatcgatctccagatcaacacacagcttacctgcgacagcggtagagttcgcaccgacgcccctgactgctatctgtccttccacaagctgctcctgcaccttcagggtgagagagaacccggttggatcaagcaacttttcactaacttcatttcatttactctcaagctggtgctgaaaggacagatttgcaaggagatcaatgtgattagcaacattatggcagattttgtgcaaactcgggcagcaagcatactgtccgatggggacatcggagttgatatcagtctcaccggggatccagtcataacagccagttacttagagtcccaccacaaggccgttttagaaacctgggggttcaatactaatcaagaaattttccaggaggtcgttggaggctttccctcccaggcccaggtgacagtgcactgtctcaaaatgccaaaaatctcatgccagaataaaggcgtcgtcgtgaatagttctgtgatggtcaaatttctgtttccgcgacctgaccaacagcatagcgtggcctacacatttgaagaagacattgtcacgaccgtccaggcatcttattctaagaaaaaactttttctaagtctcttggacttccaaatcactccaaaaaccgtgagcaatctaacggaaagctccagcgaatcagttcaaagtttccttcagtccatgatcactgccgtgggaataccagaggtgatgagtagattggaagtggtattcacagctctaatgaactcaaagggggtatccctgtttgacatcatcaatccagaaattatcactagggacggattcctgcttttacagatggacttcggctttcccgagcacctgctcgttgacttcttgcagtctctatcctag

SEQ ID NO: 104182 - DNA, 1302 bp, Artificial Sequence
  derived and/or modified sequence
atgctcgcagccactgtgttgacgctggcactgctgggcaacgctcatgcctgttccaagggcacgtcacatgaggctggcattgtatgcagaatcaccaagcccgctctgcttgtgttgaaccacgagactgctaaggtgattcagactgccttccaacgggcatcgtaccctgacataaccggagagaaagctatgatgctacttggacaagtgaagtacggattgcacaacatccagatctcacacctttccatcgcctctagccaggtggagctggtggaggccaagtctatcgacgtctccatacagaacgtaagcgtcgtattcaaagggacactgaagtatgggtacaccacggcatggtggctgggcattgaccagagcatcgacttcgagatcgatagcgctattgatctgcagataaacacacagctaacatgtgactccggccgagtgcgcactgacgcgcctgactgctacctttctttccataaactcctgctccacctccagggagaaagagagcccggatggatcaaacagctcttcacgaattttatcagttttaccctgaaattagtgctcaaggggcagatctgtaaagagatcaacgtgattagtaacataatggcagatttcgtgcagactcgggctgcctcaatactgagcgatggcgacatcggagtggatatctcactgacgggcgacccagttattacagcatcctatctggaatcacaccataaagccgtgctggaaacctggggctttaacacgaatcaggaaatctttcaggaggtggtgggcggatttcccagccaggcacaggtaacggttcattgcctgaagatgcccaagatatcttgccagaacaaaggagtggtggttaatagttccgtaatggtgaagttcctgtttcctcgccctgaccagcaacactccgtggcctatacattcgaagaggacatcgtgacgaccgtccaggcctcttattccaagaagaagctattcctgagcctcctggacttccagatcacgcctaaaacggtcagcaacctcactgaaagttccagtgaatctgtccagagctttcttcagtctatgattactgctgtgggaatacctgaggtaatgtcacggctggaggtggttttcaccgctctgatgaactcgaagggcgtgagtctcttcgatataatcaaccctgagattatcaccagggacgggtttcttcttctccagatggatttcgggtttcctgagcacctgctcgttgactttctgcagtcgttatcttag

SEQ ID NO: 104183 - DNA, 1537 bp, Artificial Sequence
  derived and/or modified sequence
atatacgggctccaggctgaacggctcgggccacttacacaccactgcctgataaccatgctggctgccacagtcctgaccctggccctgctgggcaatgcccatgcctgctccaaaggcacctcgcacgaggcaggcatcgtgtgccgcatcaccaagcctgccctcctggtgttgaaccacgagactgccaaggtgatccagaccgccttccagcgagccagctacccagatatcacgggcgagaaggccatgatgctccttggccaagtcaagtatgggttgcacaacatccagatcagccacttgtccatcgccagcagccaggtggagctggtggaagccaagtccattgatgtctccattcagaacgtgtctgtggtcttcaaggggaccctgaagtatggctacaccactgcctggtggctgggtattgatcagtccattgacttcgagatcgactctgccattgacctccagatcaacacacagctgacctgtgactctggtagagtgcggaccgatgcccctgactgctacctgtctttccataagctgctcctgcatctccaaggggagcgagagcctgggtggatcaagcagctgttcacaaatttcatctccttcaccctgaagctggtcctgaagggacagatctgcaaagagatcaacgtcatctctaacatcatggccgattttgtccagacaagggctgccagcatcctttcagatggagacattggggtggacatttccctgacaggtgatcccgtcatcacagcctcctacctggagtcccatcacaaggcagtgctggagacctggggcttcaacaccaaccaggaaatcttccaagaggttgtcggcggcttccccagccaggcccaagtcaccgtccactgcctcaagatgcccaagatctcctgccaaaacaagggagtcgtggtcaattcttcagtgatggtgaaattcctctttccacgcccagaccagcaacattctgtagcttacacatttgaagaggatatcgtgactaccgtccaggcctcctattctaagaaaaagctcttcttaagcctcttggatttccagattacaccaaagactgtttccaacttgactgagagcagctccgagtccgtccagagcttcctgcagtcaatgatcaccgctgtgggcatccctgaggtcatgtctcggctcgaggtagtgtttacagccctcatgaacagcaaaggcgtgagcctcttcgacatcatcaaccctgagattatcactcgagatggcttcctgctgctgcagatggactttggcttccctgagcacctgctggtggatttcctccagagcttgagctagaagtctccaaggaggtcgggatggggcttgtagcagaaggcaagcaccaggctcacagctggaaccctggtgtctcctccagcgtggtggaagttgggttaggagtacggagatggagattggctcccaactcctccctatcctaaaggcccactggcattaaagtgctgtatccaag

SEQ ID NO: 104184 - DNA, 1302 bp, Artificial Sequence
  derived and/or modified sequence
atgctggccgccaccgtgctgaccctggccctgctgggcaacgcccacgcctgcagcaagggcaccagccacgaggccggcatcgtgtgcagaatcaccaagcccgccctgctggtgctgaaccacgagaccgccaaggtgatccagaccgccttccagagagccagctaccccgacatcaccggcgagaaggccatgatgctgctgggccaggtgaagtacggcctgcacaacatccagatcagccacctgagcatcgccagcagccaggtggagctggtggaggccaagagcatcgacgtgagcatccagaacgtgagcgtggtgttcaagggcaccctgaagtacggctacaccaccgcctggtggctgggcatcgaccagagcatcgacttcgagatcgacagcgccatcgacctgcagatcaacacccagctgacctgcgacagcggcagagtgagaaccgacgcccccgactgctacctgagcttccacaagctgctgctgcacctgcagggcgagagagagcccggctggatcaagcagctgttcaccaacttcatcagcttcaccctgaagctggtgctgaagggccagatctgcaaggagatcaacgtgatcagcaacatcatggccgacttcgtgcagaccagagccgccagcatcctgagcgacggcgacatcggcgtggacatcagcctgaccggcgaccccgtgatcaccgccagctacctggagagccaccacaaggccgtgctggagacctggggcttcaacaccaaccaggagatcttccaggaggtggtgggcggcttccccagccaggcccaggtgaccgtgcactgcctgaagatgcccaagatcagctgccagaacaagggcgtggtggtgaacagcagcgtgatggtgaagttcctgttccccagacccgaccagcagcacagcgtggcctacaccttcgaggaggacatcgtgaccaccgtgcaggccagctacagcaagaagaagctgttcctgagcctgctggacttccagatcacccccaagaccgtgagcaacctgaccgagagcagcagcgagagcgtgcagagcttcctgcagagcatgatcaccgccgtgggcatccccgaggtgatgagcagactggaggtggtgttcaccgccctgatgaacagcaagggcgtgagcctgttcgacatcatcaaccccgagatcatcaccagagacggcttcctgctgctgcagatggacttcggcttccccgagcacctgctggtggacttcctgcagagcctgagctag

SEQ ID NO: 104185 - protein, 362 aa, Artificial Sequence
  derived and/or modified sequence
MNASAASLNDSQVVVVAAEGAAAAATAAGGPDTGEWGPPAAAALGAGGGANGSLELSSQLSAGPPGLLLPAVNPWDVLLCVSGTVIAGENALVVALIASTPALRTPMFVLVGSLATADLLAGCGLILHFVFQYLVPSETVSLLTVGFLVASFAASVSSLLAITVDRYLSLYNALTYYSRRTLLGVHLLLAATWTVSLGLGLLPVLGWNCLAERAACSVVRPLARSHVALLSAAFFMVFGIMLHLYVRICQVVWRHAHQIALQQHCLAPPHLAATRKGVGTLAVVLGTFGASWLPFAIYCVVGSHEDPAVYTYATLLPATYNSMINPIIYAFRNQEIQRALWLLLCGCFQSKVPFRSRSPSEV

SEQ ID NO: 104186 - protein, 377 aa, Artificial Sequence
  derived and/or modified sequence
MTLLAWCTRGANPAAMNASAASLNDSQVVVVAAEGAAAAATAAGGPDTGEWGPPAAAALGAGGGANGSLELSSQLSAGPPGLLLPAVNPWDVLLCVSGTVIAGENALVVALIASTPALRTPMFVLVGSLATADLLAGCGLILHFVFQYLVPSETVSLLTVGFLVASFAASVSSLLAITVDRYLSLYNALTYYSRRTLLGVHLLLAATWTVSLGLGLLPVLGWNCLAERAACSVVRPLARSHVALLSAAFFMVFGIMLHLYVRICQVVWRHAHQIALQQHCLAPPHLAATRKGVGTLAVVLGTFGASWLPFAIYCVVGSHEDPAVYTYATLLPATYNSMINPIIYAFRNQEIQRALWLLLCGCFQSKVPFRSRSPSEV

SEQ ID NO: 104187 - DNA, 1711 bp, Artificial Sequence
  derived and/or modified sequence
actcgcggagccggcacagcgacaggcgccccgcgcttgcctcctccccggcccggccgcctcctgcaggcagctgctctgtttgcgcggggagctcagcccggcgccccgcctcggcgcccatgaccagcgacttccagaagtcctgacgccccagcaccgcggacagcgtctctgctgcccagccccatggggatgtcctggtcgcgccgccacaacccaggcgggactctcccaggatgacactcctagcttggtgcactcggggtgcaaatccggccgcgatgaacgcgagcgccgcctcgctcaacgactcccaggtggtggtagtggcggccgaaggagcggcggcggcggccacagcagcaggggggccggacacgggcgaatggggaccccctgctgcggcggctctaggagccggcggcggagctaatgggtctctggagctgtcctcgcagctgtcggctgggccaccgggactcctgctgccagcggtgaatccgtgggacgtgctcctgtgcgtgtcggggacagtgatcgctggagaaaacgcgctggtggtggcgctcatcgcgtccactccggcgctgcgcacgcccatgttcgtgctggtaggcagcctggccaccgctgacctgttggcgggctgtggcctcatcttgcactttgtgttccagtacttggtgccctcggagactgtgagtctgctcacggtgggcttcctcgtggcctccttcgccgcctctgtcagcagcctgctggccattacggtggaccgctacctgtccctgtataacgcgctcacctattactcgcgccggaccctgttgggcgtgcacctcctgcttgccgccacttggaccgtgtccctaggcctggggctgctgcccgtgctgggctggaactgcctggcagagcgcgccgcctgcagcgtggtgcgcccgctggcgcgcagccacgtggctctgctctccgccgccttcttcatggtcttcggcatcatgctgcacctgtacgtgcgcatctgccaggtggtctggcgccacgcgcaccagatcgcgctgcagcagcactgcctggcgccaccccatctcgctgccaccagaaagggtgtgggtacactggctgtggtgctgggcactttcggcgccagctggctgcccttcgccatctattgcgtggtgggcagccatgaggacccggcggtctacacttacgccaccctgctgcccgccacctacaactccatgatcaatcccatcatctatgccttccgcaaccaggagatccagcgcgccctgtggctcctgctctgtggctgtttccagtccaaagtgccctttcgttccaggtctcccagcgaggtctgaagggctcgccccgtgtcctctcaccaacaccacaccccaacaagccagcctttggtaagctcggtgcctgctgacgaactctgagatcccaatggtgtgagtctgactttggaaagaaaaagggactaaagagaaatgtaacaaacttacaaggacaaagaggcttgttggcactttacatatacagtgtatacatgtgtacatatatatacaaatatttgtatcttctggaggtgttcaggatgtggagcttcctattctgtgaaaaaccaagaaaaagatatggttgtatactcaaattgtacatcacgtttgtcaaacgaagacattccaatact

SEQ ID NO: 104188 - DNA, 1134 bp, Artificial Sequence
  derived and/or modified sequence
atgaccctcctcgcgtggtgcacccggggagccaatcctgccgccatgaatgcgagtgccgctagcctcaacgactcacaagtggtggtcgtggcggccgagggagctgcggcagctgctacagcggcagggggcccggacactggggagtggggacctccggctgcggctgcattaggcgccggcggcggtgcgaatggaagcctggagcttagctcacagttgtctgccggaccccccgggctgttgctccctgcagttaatccttgggacgtgctgctgtgcgtgtctggaacggtgattgccggtgagaatgcgctcgtcgtggctctaatcgcgtcaacccccgcactgaggaccccgatgtttgtgcttgttgggagtctggcaactgctgacttactggctggatgcggcctgattctccatttcgtgtttcagtatcttgtccccagtgagactgtctccttacttacggttggatttcttgtggcgagcttcgcagcatccgtgagcagcttacttgccattacagtggaccgctacctgagtctctacaatgccttgacatattactctaggaggaccttgctcggcgtgcatctcctgttggcagctacttggaccgttagtctgggactgggcctacttcccgtcctcggatggaactgccttgctgaaagagcagcctgttctgtggtgcgtcctttagctagaagtcacgtagccctgctgtctgccgctttcttcatggtctttggcattatgcttcacttatacgtcaggatctgtcaagtcgtctggaggcacgcacatcagattgccctccagcagcactgccttgcaccccctcatttagcagcgaccagaaaaggggtcggcaccctggctgtcgtattgggaactttcggtgccagttggcttccattcgccatatattgcgtcgtgggttctcacgaggaccccgctgtgtatacttacgctactctgttgcccgcaacgtacaacagcatgatcaatccaatcatctatgcttttagaaatcaggaaattcagcgtgccctctggctcctgttgtgtggttgctttcagtcgaaggtccccttccggtcaaggagtccgtctgaggtgtag

SEQ ID NO: 104189 - DNA, 1134 bp, Artificial Sequence
  derived and/or modified sequence
atgaccctgctggcctggtgcaccaggggggccaacccagctgccatgaatgccagcgctgccagcctgaatgacagccaggtggtggtggtggccgctgagggcgctgctgctgctgccacagctgctgggggccctgacaccggggagtggggccccccagctgctgctgccctgggcgccggcggcggggccaacggcagcctggagctgagcagccagctgtctgctggccccccaggcctgctgctgcctgctgtgaacccctgggatgtgctgctgtgtgtgtctggaacagtgattgctggggagaatgccctggtggtggccctgattgccagcaccccagccctgcggacccccatgtttgtgctggtgggcagcctggccacagctgacctgctggccggctgcggcctcatcctgcactttgtgttccagtacctggtgcccagcgagaccgtgtccctgctgactgtgggcttcctggtggccagctttgctgcctctgtgagcagcctgctggccatcaccgtggaccgctacctgagcctgtacaatgccctgacctactacagcaggaggaccctgctgggcgtgcacctgctgctggccgccacctggacagtgtccctgggcctgggcctgctgcctgtgctgggctggaactgcctggccgagagagctgcctgcagcgtggtgcggcccctggcccggagccacgtggccctgctgtctgctgccttcttcatggtgtttggcatcatgctgcacctgtatgtgcgcatctgccaggtggtgtggaggcatgcccaccagatcgccctgcagcagcactgcctggccccaccccacctggccgccaccaggaaaggagtgggcaccctggccgtggtgctgggcacctttggagcctcctggctgccctttgccatctactgtgtggtgggcagccatgaggaccctgctgtgtacacctacgccaccctgctgcctgccacctacaacagcatgatcaaccccatcatctatgccttcaggaaccaggagatccagagggccctgtggctgctgctgtgtggctgcttccagagcaaggtgcccttccgcagccgcagccccagcgaggtgtag

SEQ ID NO: 104190 - DNA, 1134 bp, Artificial Sequence
  derived and/or modified sequence
atgaccctgctggcctggtgcacccggggcgccaaccccgccgccatgaatgcttcagctgctagtttgaatgattcacaggttgtcgtcgtggccgcggaaggggccgcagccgccgccactgcagccggcggcccagataccggggaatgggggcctcctgccgccgccgctctgggagccggagggggggccaacggatccctcgaactgagctctcagttgagcgccggcccccccggactacttttgcccgcggtgaacccctgggacgtgttgttgtgcgtaagtggaaccgttatcgccggggagaacgcccttgtggttgcgctaatcgcctcaacaccagctttaagaacgcccatgttcgttttggtgggatctcttgccaccgccgacctgctggcaggctgtgggctcatcctgcatttcgtcttccaatacttggtccctagtgaaactgtgtcccttctgactgtcggctttcttgtggcctcttttgccgcatctgtctcgagcctactcgccatcaccgtggaccggtatttaagcctgtacaacgccctaacatattactcaaggcggacccttcttggagttcatctcctcctcgcagcaacgtggactgtcagtctcggactcggcttattacccgtcctcgggtggaactgcctcgctgaaagagcagcatgtagcgtggttcgtccactggcgcgatctcacgttgcgctgctcagtgcagccttcttcatggtgtttgggatcatgcttcacttgtacgtgcggatatgtcaggtggtttggcgacatgcccatcagattgccctccagcagcactgtctggcgccccctcacctggccgcaacccgcaaaggggtggggacactcgccgtggtgctcggtaccttcggagcctcatggttaccatttgctatctactgcgtagtcgggagccatgaggatccagccgtgtatacttatgcaacattgctgccggctacctacaattcaatgattaatccaattatatatgcttttaggaatcaggaaattcagcgggccctatggctgttactgtgcgggtgttttcagtcaaaggtgcccttcagaagccgtagcccctcggaagtatag

SEQ ID NO: 104191 - DNA, 1134 bp, Artificial Sequence
  derived and/or modified sequence
atgactttgcttgcctggtgtaccaggggtgccaaccccgctgcaatgaacgcctcagccgcatctctgaatgattctcaggtggtggtggttgcagccgaaggcgcagcagcagctgctaccgcagccggaggccctgataccggcgaatggggccctcctgctgccgcagcccttggtgctggaggaggggctaatggtagcctggaactttccagccagctgtcagcaggccctccagggctgctgctccctgcggtgaacccttgggacgtactcttgtgcgtgtctggcaccgtaatcgcgggtgaaaacgcccttgtagttgccctgattgctagtacaccagcactgcgaacccctatgtttgttcttgtcggctccctggcaaccgccgacctcttggctggatgtgggttgattctgcactttgtcttccagtacctagtcccatccgagaccgttagcctgctcactgtgggctttcttgttgctagctttgctgcctcagtctcgtcacttctggccataaccgtcgatagatacctgagcctctataatgcacttacttactattcgagaaggaccctgctgggcgttcacttattactggcggcaacctggacagtaagccttggattgggtctcttgccggtcttaggatggaactgtctggccgaacgggcagcctgtagcgtggtgcgccctcttgctcgcagtcatgtggccctgctcagtgccgcattttttatggtgttcggaatcatgctccatctctatgttcgtatttgtcaggttgtctggcgccacgcacaccagatagctctccagcagcattgcttagctccgcctcacctcgcggctactcggaaaggggtcggaacactcgcggtggtactgggtaccttcggcgcatcctggctcccatttgcgatttactgcgtggtcggctctcacgaggatccagcagtttacacatacgcaacgctgctacctgcaacctataattctatgataaaccccataatctacgcttttcggaaccaagaaatccagcgagccctgtggttactactgtgtggttgcttccaatcaaaggtgccctttcgctctcggtcgccctctgaagtgtag

SEQ ID NO: 104192 - DNA, 1134 bp, Artificial Sequence
  derived and/or modified sequence
atgaccctgctggcctggtgcaccagaggcgccaaccccgccgccatgaacgccagcgccgccagcctgaacgacagccaggtggtggtggtggccgccgagggcgccgccgccgccgccaccgccgccggcggccccgacaccggcgagtggggcccccccgccgccgccgccctgggcgccggcggcggcgccaacggcagcctggagctgagcagccagctgagcgccggcccccccggcctgctgctgcccgccgtgaacccctgggacgtgctgctgtgcgtgagcggcaccgtgatcgccggcgagaacgccctggtggtggccctgatcgccagcacccccgccctgagaacccccatgttcgtgctggtgggcagcctggccaccgccgacctgctggccggctgcggcctgatcctgcacttcgtgttccagtacctggtgcccagcgagaccgtgagcctgctgaccgtgggcttcctggtggccagcttcgccgccagcgtgagcagcctgctggccatcaccgtggacagatacctgagcctgtacaacgccctgacctactacagcagaagaaccctgctgggcgtgcacctgctgctggccgccacctggaccgtgagcctgggcctgggcctgctgcccgtgctgggctggaactgcctggccgagagagccgcctgcagcgtggtgagacccctggccagaagccacgtggccctgctgagcgccgccttcttcatggtgttcggcatcatgctgcacctgtacgtgagaatctgccaggtggtgtggagacacgcccaccagatcgccctgcagcagcactgcctggcccccccccacctggccgccaccagaaagggcgtgggcaccctggccgtggtgctgggcaccttcggcgccagctggctgcccttcgccatctactgcgtggtgggcagccacgaggaccccgccgtgtacacctacgccaccctgctgcccgccacctacaacagcatgatcaaccccatcatctacgccttcagaaaccaggagatccagagagccctgtggctgctgctgtgcggctgcttccagagcaaggtgcccttcagaagcagaagccccagcgaggtgtag

SEQ ID NO: 104193 - protein, 422 aa, Artificial Sequence
  derived and/or modified sequence
MFRAGAEGAEKEPSPRPECRADPGPGLGFPLGSGLPWPSLLESPGGRILDIPCKVCGDRSSGKHYGVYACDGCSGFFKRSIRRNRTYVCKSGNQGGCPVDKTHRNQCRACRLKKCLEVNMNKDAVQHERGPRTSTIRKQVALYFRGHKEENGAAAHFPSAALPAPAFFTAVTQLEPHGLELAAVSTTPERQTLVSLAQPTPKYPHEVNGTPMYLYEVATESVCESAARLLFMSIKWAKSVPAFSTLSLQDQLMLLEDAWRELFVLGIAQWAIPVDANTLLAVSGMNGDNTDSQKLNKIISEIQALQEVVARFRQLRLDATEFACLKCIVTFKAVPTHSGSELRSFRNAAAIAALQDEAQLTLNSYIHTRYPTQPCRFGKLLLLLPALRSISPSTIEEVFFKKTIGNVPITRLLSDMYKSSDI

SEQ ID NO: 104194 - DNA, 1269 bp, Artificial Sequence
  derived and/or modified sequence
atgtttcgggcaggggccgagggcgctgagaaggaaccctcccctcggccggagtgtcgcgccgatcctggtcccggactgggtttcccccttgggtctggtttgccttggccatcgctgctagaaagcccgggcggaagaattctggatattccgtgcaaggtgtgtggggacaggtcgtccggaaagcattatggcgtgtatgcatgtgatggctgttccggattcttcaaacgctctattagaagaaacagaacatacgtatgcaagtccggcaaccagggcggatgtcctgtggacaaaacccatcgcaatcaatgccgcgcatgcaggctcaagaagtgcctggaagtgaatatgaacaaggacgccgtgcagcacgaaagagggccaagaacaagcaccattcggaaacaggtggcactgtacttccggggccacaaggaagaaaatggtgctgctgcccactttccttccgccgccctccctgcacccgcattcttcactgccgtcacgcagttagagccccatgggctggaactggccgctgtctctacaacaccagagaggcaaaccttggtttctttggcccagccgacccccaagtatcctcacgaggtgaacggaacccctatgtacctctacgaagtcgccacggagagtgtgtgcgagtctgctgccaggctgttattcatgtccattaaatgggccaagagcgtgccagctttttctaccctgtctctgcaagaccagctaatgctcctggaagacgcttggcgcgagcttttcgtgctggggattgcacagtgggcaatcccggtggatgctaacaccctgttggcagtgagcggcatgaatggtgataacacggactctcagaagcttaataaaataatctccgaaatacaggccttacaggaagttgttgccaggttccgtcagctgaggcttgacgccacagaattcgcatgcctcaaatgtatagtgaccttcaaggcagtccccactcacagtggcagtgaactgcgcagcttccgaaatgcggctgcaatcgcagcactgcaggacgaggctcaacttaccctaaattcatacatccacaccaggtaccctacacagccttgccgcttcgggaaattactgctcttgctgcctgccttgcggagcatttccccatctacaattgaggaggtgttttttaaaaagacaatcggcaacgtgcccatcacgagactgttgtccgatatgtacaagtcgagcgacatctag

SEQ ID NO: 104195 - DNA, 1269 bp, Artificial Sequence
  derived and/or modified sequence
atgttccgggccggggctgagggcgctgagaaggagcccagccccaggcctgagtgcagagctgaccccggccctggcctgggcttccccctgggcagcggcctgccctggcccagcctgctggagagccctgggggccgcatcctggacatcccctgcaaggtgtgtggggacaggagcagcggcaagcactatggagtgtatgcctgtgatggctgcagcggcttcttcaagaggagcatcagaagaaacagaacctacgtgtgcaagagcggcaaccagggcggctgccctgtggacaagacccacaggaaccagtgccgggcctgccgcctgaagaagtgcctggaggtgaacatgaacaaggatgctgtgcagcacgagcggggccccaggaccagcaccatcaggaagcaggtggccctgtacttccggggccacaaggaggagaatggagctgctgcccacttccccagcgctgccctgcctgccccagccttcttcaccgctgtgacccagctggagccccacggcctggagctggccgctgtgtccaccaccccagagcggcagaccctggtgtccctggcccagcccacccccaagtacccccatgaggtgaatggcacccccatgtacctgtatgaggtggccacagaatctgtgtgtgagagcgctgcccggctgctcttcatgagcatcaagtgggccaagtctgtgcctgccttcagcaccctgagcctgcaggaccagctgatgctgctggaggatgcctggagggagctgtttgtgctgggcatcgcccagtgggccatccctgtggatgccaacaccctgctggccgtgtctggcatgaatggagacaacacagacagccagaagctgaacaagatcatcagcgagatccaggccctgcaggaggtggtggcccgcttccggcagctgcggctggatgccacagaatttgcctgcctgaagtgcatcgtgaccttcaaggctgtgcccacccacagcggcagcgagctgcggagcttcagaaatgctgctgccatcgccgccctgcaggatgaggcccagctgaccctgaacagctacatccacacccgctaccccacccagccctgccgctttgggaagctgctgctgctgctgcctgccctgcggagcatcagccccagcaccatcgaggaggtgttcttcaagaagaccatcggaaatgtgcccatcacccggctgctgagtgacatgtacaagagcagtgacatctag

SEQ ID NO: 104196 - DNA, 1269 bp, Artificial Sequence
  derived and/or modified sequence
atgttccgggccggcgccgagggcgccgagaaggagcccagccccagacccgagtgccgtgcggaccccggccccggtttggggttccctcttggttccggcctgccctggccgtcgctcctcgagtctcctggcgggaggattctggacataccatgcaaagtctgcggcgacagaagcagtggcaaacactacggcgtctatgcatgtgatggatgctcagggttcttcaaacgatccataagaaggaacaggacatacgtatgcaaaagtggtaaccaaggagggtgccctgtggacaagacccaccggaaccaatgtagggcctgccgcctgaagaagtgcctggaagttaatatgaacaaggacgcagtacagcatgagcgcggaccccggacttctacaatcagaaagcaggtggccctgtacttccgcgggcataaggaggagaatggggccgcagctcacttccctagcgccgcccttcctgcgccagcattctttaccgctgtgacacagcttgagcctcatgggctcgagctggccgccgtgtccactacaccagagcggcagacgctcgtgtcacttgctcaacccaccccaaagtatcctcacgaagtgaatggaactcctatgtacctgtatgaagtagctactgaatctgtctgtgaatcagcagccagactactgttcatgtctatcaagtgggcaaaaagcgttccagcattctcaaccctgagcctccaggatcagcttatgcttctcgaggacgcatggcgcgagctgtttgtacttggaattgcccagtgggccatcccggttgacgccaacacattgctcgccgttagcggaatgaatggcgacaataccgattcacagaaactgaataagattatttccgagatccaggccctgcaagaggtggttgcccgctttaggcagctcaggctggacgccactgagtttgcttgcctgaagtgcatcgtgacattcaaggctgtgcctacccattccggttccgaacttaggtcattccggaacgccgctgcaatagccgccctgcaggacgaagcacagttgaccctgaatagctacatccatacaaggtatcctacccagccatgtagattcggtaaacttctgctcttgcttccagctttgaggtcaatctccccctctaccatcgaggaggtgttttttaaaaaaaccatagggaatgtccccattacccgacttctgtccgacatgtataagtctagcgatatttag

SEQ ID NO: 104197 - DNA, 2612 bp, Artificial Sequence
  derived and/or modified sequence
agaaatgtttcgagctggggcagagggagcagagaaggagccctcaccgcggccggaatgcagagcggaccctggcccaggactgggtttccctttaggctcgggcctaccctggccctcgctgttggaatctccaggaggccgcattttagatatcccctgcaaagtgtgtggcgaccgcagctcggggaagcactacggggtctacgcctgcgacggctgctcaggttttttcaaacggagcatccgaaggaataggacctatgtctgcaaatctggaaaccagggaggctgtccggtggacaagacgcacagaaaccagtgcagggcgtgtcggctgaagaagtgtttggaagtcaacatgaacaaagacgccgtgcagcacgagcgggggcctcggacgtccaccatccgcaagcaagtggccctctacttccgtggacacaaggaggagaacggggccgccgcgcactttccctcggcggcgctccctgcgccggccttcttcaccgcggtcacgcagctggagccgcacggcctggagctggccgcggtgtccaccactccagagcggcagaccctcgtgagcctggctcagcccacgcccaagtacccccatgaagtgaatgggaccccaatgtatctctatgaagtggccacggagtcggtgtgtgaatcagctgccagacttctcttcatgagcatcaagtgggctaagagtgtgccagccttctccacgctgtctttgcaagaccagctgatgcttttggaagatgcttggagagaactgtttgttctaggaatagcacaatgggccattccggttgatgctaacactctactggctgtatctggcatgaacggtgacaacacagattcccagaagctgaacaagatcatatctgaaatacaggctttacaagaggtggtggctcgatttagacaactccggttagatgctactgaatttgcctgtctaaaatgcatcgtcactttcaaagccgttcctacacatagtggttctgaactgagaagtttccggaatgctgccgccattgcagcccttcaagatgaggctcagctaacgctcaacagctacatccataccagatatcccactcaaccctgtcgctttggaaaactcctgttgcttttgccagctttacgttctattagcccatcaactatagaagaagtgtttttcaaaaaaaccatcggcaatgtgccaattacaagactgctttcagatatgtacaaatccagtgatatctaagctcacaagatacccacttttcaggatgggacagtatcagatgaacttcaacccatggagaacaagcctcaactaacaaacccttcaggaagcatataccggggaatgtgtagccttcaggaaaaaaatgccaattgacacaaagcattccagtagctatgacctgccgccctgaccaggatagggcgggtgggaaggagaggggtgcaacaggaccgcctgcactgaaaactcactgctgccatgccctgggagggggcaaactgggggttgccacaggccgtgccattctgcctcttacctggaagatcaggctgaacgatcaaaagctgaaacataagtagtgctttctcttcctttttagcatacaaagtttggtaaccaaatatagctctgtgtataacatcgtactgcggccttcaaaactacgttatgttggagcatttattttaaaaataatggtaggttttaaattaaaagtgttatcaaaagtttcccctctattgtaatacattattaagtggccttcagaactgagttaataagtgaaaagtagcttatgccatgtgatttgctttttctctatcttcttttttcttttctttctctttcttttgttctttcttcttcttttttaataccataggccaggcaaccttgtcaaaggaattgatggacaaaatgagattctcaccaggacttcaggttggataacatgtcaaaaagagaagagctttactaaaagaacataagtcaagggaggatgaataaaaacagcaaaaccaaataaagtggagatgagtgattgagtgaggtagattgctgtcccgttaacatagtgctgaaaccaaaggcagtgggggtccaaactcgtggtgcagcaagtcacaccagacaggaaacgaatatggacgtaattgcagaaggaacttcaaggagatgaatgaatgctaaaagggttcttgactgatccattgctaacagcctgagactcttcaatgcctttccgaaaactggtttctagtaaagccttgaatgaacacacacacacacacacacacacacacacacacacacacacacacacaccgtcctacactttaagctgctcctttggtatgactctatacttatggaaatgtagaaacaaacatttttaaatagctgctgtacttttcacattttgatttattaggtactagcactgaggaaaaaaaattcagcacttggactatcataggatgagtaaaacttttcttgtacaaagtgaattaactgatttgtgaagttaaaaggttgtactcattgtatttacaaagaataaaaatatattgaattt

SEQ ID NO: 104198 - DNA, 517 bp, Artificial Sequence
  derived and/or modified sequence
aggactgggtcgagcagacagagctgcagcccccgccttgcccggcttctcgcggctggagagcagagcgatgtcacccggagccccgcctgggtggtaacgagaccctggccagtcacccctgcagcccagactaacttctttcaacagcctctgatggccgcattttagatatcccctgcaaagtgtgtggcgaccgcagctcggggaagcactacggggtctacgcctgcgacggctgctcaggttttttcaaacggagcatccgaaggaataggacctatgtctgcaaatctggaaaccagggaggctgtccggtggacaagacgcacagaaaccagtgcagggcgtgtcggctgaagaagtgtttggaagtcaacatgaacaaagacgccgtgcagcacgagcgggggcctcggacgtccaccatccgcaagcaagtggccctctacttccgtggacacaaggaggagaacggggccgccgcgcactttccctcggcggcgctccctgcgcc

SEQ ID NO: 104199 - DNA, 1269 bp, Artificial Sequence
  derived and/or modified sequence
atgtttcgagctggggctgagggagccgagaaagaaccttccccacggccagaatgccgggctgaccccggaccaggtctgggctttcctctggggtcagggctcccatggccatcccttttagaatcgccagggggtcggatactcgacattccttgcaaagtatgcggcgacagatccagcgggaagcattatggagtctacgcctgtgacggctgtagcgggttctttaagaggtccatcagacgcaacagaacgtacgtatgtaagagtggtaatcagggtggatgtcccgtggacaaaacccatcggaaccaatgccgggcttgccgtcttaaaaaatgtcttgaggttaacatgaataaggacgctgtccaacatgaacgcggtccacgcacttccaccatccgcaaacaggtggccttgtactttcgaggacataaggaggagaatggtgctgctgcgcactttccatctgctgccttgcccgcaccagccttctttaccgcagtgactcaacttgaaccccatggactggagttggccgctgtgagtacaaccccagaaaggcagactctggtgtctctggcgcaacccacccccaagtacccgcatgaggtcaatggcacccccatgtatctgtacgaagtggcaaccgagtctgtttgcgagtctgcagctagattgctctttatgtctattaaatgggcaaaatcggtgcctgctttctctaccctgagcctgcaggatcaacttatgctgcttgaggatgcctggcgggagttgttcgtgctaggcattgcccagtgggcaatcccagttgatgctaatactttgctagccgtcagcggaatgaacggcgacaatacagactcacagaagcttaataagataattagcgagatccaggccttgcaagaggtcgtcgccaggttcaggcaactgcgattagacgccacagagtttgcctgcctgaaatgcatcgtgacatttaaggccgtccccactcactcaggcagcgagttaaggagcttcaggaacgccgcagccatcgcagccttacaggacgaggcgcagctgactctcaactcctacattcacacccgttatcccacccagccgtgtcgctttggcaagctgcttttattactgcccgctttgagatctatcagcccaagtacaatcgaagaggtgttctttaaaaaaactatcgggaatgtcccaatcacacgtctgctcagcgacatgtacaaatcgtccgatatctag

SEQ ID NO: 104200 - DNA, 1269 bp, Artificial Sequence
  derived and/or modified sequence
atgttcagagccggcgccgagggcgccgagaaggagcccagccccagacccgagtgcagagccgaccccggccccggcctgggcttccccctgggcagcggcctgccctggcccagcctgctggagagccccggcggcagaatcctggacatcccctgcaaggtgtgcggcgacagaagcagcggcaagcactacggcgtgtacgcctgcgacggctgcagcggcttcttcaagagaagcatcagaagaaacagaacctacgtgtgcaagagcggcaaccagggcggctgccccgtggacaagacccacagaaaccagtgcagagcctgcagactgaagaagtgcctggaggtgaacatgaacaaggacgccgtgcagcacgagagaggccccagaaccagcaccatcagaaagcaggtggccctgtacttcagaggccacaaggaggagaacggcgccgccgcccacttccccagcgccgccctgcccgcccccgccttcttcaccgccgtgacccagctggagccccacggcctggagctggccgccgtgagcaccacccccgagagacagaccctggtgagcctggcccagcccacccccaagtacccccacgaggtgaacggcacccccatgtacctgtacgaggtggccaccgagagcgtgtgcgagagcgccgccagactgctgttcatgagcatcaagtgggccaagagcgtgcccgccttcagcaccctgagcctgcaggaccagctgatgctgctggaggacgcctggagagagctgttcgtgctgggcatcgcccagtgggccatccccgtggacgccaacaccctgctggccgtgagcggcatgaacggcgacaacaccgacagccagaagctgaacaagatcatcagcgagatccaggccctgcaggaggtggtggccagattcagacagctgagactggacgccaccgagttcgcctgcctgaagtgcatcgtgaccttcaaggccgtgcccacccacagcggcagcgagctgagaagcttcagaaacgccgccgccatcgccgccctgcaggacgaggcccagctgaccctgaacagctacatccacaccagataccccacccagccctgcagattcggcaagctgctgctgctgctgcccgccctgagaagcatcagccccagcaccatcgaggaggtgttcttcaagaagaccatcggcaacgtgcccatcaccagactgctgagcgacatgtacaagagcagcgacatctag

SEQ ID NO: 104201 - protein, 167 aa, Artificial Sequence
  derived and/or modified sequence
MGGCAGSRRRFSDSEGEETVPEPRLPLLDHQGAHWKNAVGFWLLGLCNNFSYVVMLSAAHDILSHKRTSGNQSHPPGSRQWDLCCWKLRPGCLFSFCGDQPVCYFLLLTSPEAQDPGGEEEAESAARQPLIRTEAPESKPGSSSSLSLRERWTVFKGLLWYIVPLVV

SEQ ID NO: 104202 - DNA, 504 bp, Artificial Sequence
  derived and/or modified sequence
atgggcggctgcgccggcagcagaagaagattcagcgacagcgagggcgaggagaccgtgcccgagcccagactgcccctgctggaccaccagggcgcccactggaagaacgccgtgggcttctggctgctgggcctgtgcaacaacttcagctacgtggtgatgctgagcgccgcccacgacatcctgagccacaagagaaccagcggcaaccagagccacccccccggcagcagacagtgggacctgtgctgctggaagctgagacccggctgcctgttcagcttctgcggcgaccagcccgtgtgctacttcctgctgctgaccagccccgaggcccaggaccccggcggcgaggaggaggccgagagcgccgccagacagcccctgatcagaaccgaggcccccgagagcaagcccggcagcagcagcagcctgagcctgagagagagatggaccgtgttcaagggcctgctgtggtacatcgtgcccctggtggtgtag

SEQ ID NO: 104203 - DNA, 504 bp, Artificial Sequence
  derived and/or modified sequence
atggggggctgtgccgggtctcgaaggagattcagcgactctgagggggaggagactgtccccgagccacgattacccctcctcgaccatcagggggcccactggaaaaatgcggttggcttttggctgctgggcctctgcaataacttcagttatgtcgttatgctctcagccgcgcatgatattttatcccataagcgtaccagtgggaatcaatctcacccccccggctccaggcaatgggatctgtgctgttggaagctccgtcctggctgtctcttctcattttgtggggaccagcccgtgtgttattttctgctgctgaccagtccagaggctcaagaccccggaggcgaagaggaggctgaaagcgcggctagacagccgcttattagaaccgaggcccctgagagcaagcctggctcttcctcatctcttagtctccgcgagagatggaccgtcttcaaaggattattatggtacatcgtcccccttgtcgtctag

SEQ ID NO: 104204 - DNA, 504 bp, Artificial Sequence
  derived and/or modified sequence
atgggcggctgtgccggcagcagaagacgcttcagtgacagcgagggggaggagaccgtgcctgagccccggctgcccctgctggaccaccagggcgcccactggaagaatgctgtgggcttctggctgctgggcctgtgcaacaacttctcctatgtggtgatgctgtctgctgcccatgacatcctgagccacaagaggaccagcggcaaccagagccaccccccaggcagccggcagtgggacctgtgctgctggaagctgcggcccggctgcctcttctccttctgtggggaccagcctgtgtgctacttcctgctgctgaccagccctgaggcccaggaccccggcggggaggaggaggccgagagcgctgcccggcagcccctcatcagaacagaggcccctgagagcaagccaggcagcagcagcagcctgagcctgcgggagcgctggacagtgttcaagggcctgctgtggtacatcgtgcccctggtggtgtag

SEQ ID NO: 104205 - DNA, 504 bp, Artificial Sequence
  derived and/or modified sequence
atgggcggctgcgccggcagccggcggcggttcagcgacagcgagggagaagaaactgtgcctgagccgaggctcccccttctggatcaccagggagcacattggaagaacgctgtcgggttttggctcttggggctgtgcaacaatttcagttatgtcgtaatgctcagtgcagcccacgacattctgtcccacaagcgaactagcggaaatcagtcgcaccctccaggaagccggcagtgggatttgtgctgctggaaactccggcccggctgtttattcagcttttgtggcgatcagccggtgtgctatttcctcttgcttacgagtcccgaagcccaggatccaggtggggaggaggaagcggagtcggccgccagacagcctttgatcaggaccgaagcacccgagagcaaacctggctcctcctccagcctgtctctgcgggaaaggtggactgtttttaaggggctcttatggtacatcgttcctcttgtcgtgtag

SEQ ID NO: 104206 - DNA, 504 bp, Artificial Sequence
  derived and/or modified sequence
atgggcggttgcgcgggtagcaggagacgattttcggactcagaaggcgaggagacagtccctgagcccagactcccactgctcgaccaccaaggtgctcactggaagaacgccgtaggcttctggttgttgggattgtgcaataatttcagttatgtggtgatgctcagtgcagcacatgacatactaagccataagcggacttccggcaatcaatcccatccaccagggtctcgccagtgggacctttgttgttggaaacttaggcccggatgcctcttctctttctgcggtgaccaacctgtgtgttattttctgcttttaaccagccccgaggcacaggatccgggaggcgaagaggaagcggagtctgccgcacgtcagccactgattcgcactgaagctcccgaatcaaagccgggaagttcatccagtctcagcctgagggaacggtggactgtttttaagggtctgctctggtacatcgttcccctagtagtgtag

SEQ ID NO: 104207 - DNA, 1712 bp, Artificial Sequence
  derived and/or modified sequence
cctcagggtccctgctgtagacggggcgggggagagtacgatgggtggggcgtggtgggtcgtagggcgctcgagatggagcccccagcttccttgatggatcgcggggcgcgagtgccctagacaagccggagctgggaccggcaatcgggcgttgatccttgtcacctgtcgcagaccctcatccctcccgtgggagccccctttggacactctatgaccctggaccctcgggggacctgaacttgatgcgatgggaggctgtgcaggctcgcggcggcgcttttcggattccgagggctgctgggcctttgcaacaacttctcttatgtggtgatgctgagtgccgcccacgacatccttagccacaagaggacatcgggaaaccagagccatgctgtgctcctggcggacatcctccccacactcgtcatcaaattgttggctcctcttggccttcacctgctgccctacagcccccgggttctcgtcagtgggatttgtgctgctggaagcttcgtcctggttgccttttctcattctgtggggaccagcctgtgtggtgtggtcttcgctagcatctcatcaggccttggggaggtcaccttcctctccctcactgccttctaccccagggccgtgatctcctggtggtcctcagggactgggggagctgggctgctgggggccctgtcctacctgggcctcacccaggccggcctctcccctcagcagaccctgctgtccatgctgggtatccctgccctgctgctggccagctatttcttgttgctcacatctcctgaggcccaggaccctggaggggaagaagaagcagagagcgcagcccggcagcccctcataagaaccgaggccccggagtcgaagccaggctccagctccagcctctcccttcgggaaaggtggacagtgttcaagggtctgctgtggtacattgttcccttggtcgtagtttactttgccgagtatttcattaaccagggactttttgaactcctctttttctggaacacttccctgagtcacgctcagcaataccgctggtaccagatgctgtaccaggctggcgtctttgcctcccgctcttctctccgctgctgtcgcatccgtttcacctgggccctggccctgctgcagtgcctcaacctggtgttcctgctggcagacgtgtggttcggctttctgccaagcatctacctcgtcttcctgatcattctgtatgaggggctcctgggaggcgcagcctacgtgaacaccttccacaacatcgccctggagaccagtgatgagcaccgggagtttgcaatggcggccacctgcatctctgacacactggggatctccctgtcggggctcctggctttgcctctgcatgacttcctctgccagctctcctgatactcgggatcctcaggacgcaggtcacattcacctgtgggcagagggacaggttatcaatagtctggctgtctatcgtcatcgtgagactgactttggtgtaggagttcgagaccaccctggccaacatggcaaaaccccatctccacaaaaattggataatttgataattatcattattgggtttctgagacgttacacatttaacgttctcttctgcacaagttgcctttgtgtgagtatactaactttctgtagaggtatacttgtaatcacaaataagaataaattat

SEQ ID NO: 104208 - protein, 339 aa, Artificial Sequence
  derived and/or modified sequence
MGGCAGSRRRFSDSEGEETVPEPRLPLLDHQGAHWKNAVGFWLLGLCNNFSYVVMLSAAHDILSHKRTSGNQSHVDPGPTPIPHNSSSRFDCNSVSTAPPGSRQWDLCCWKLRPGCLFSFCGDQPVCYFLLLTSPEAQDPGGEEEAESAARQPLIRTEAPESKPGSSSSLSLRERWTVFKGLLWYIVPLVVVYFAEYFINQGLFELLFFWNTSLSHAQQYRWYQMLYQAGVFASRSSLRCCRIRFTWALALLQCLNLVFLLADVWFGFLPSIYLVFLIILYEGLLGGAAYVNTFHNIALETSDEHREFAMAATCISDTLGISLSGLLALPLHDFLCQLS

SEQ ID NO: 104209 - protein, 338 aa, Artificial Sequence
  derived and/or modified sequence
MWTQAQRRSPTTAHHDLTATLSLRLPRVLVSGICAAGSFVLVAFSHSVGTSLCGVVFASISSGLGEVTFLSLTAFYPRAVISWWSSGTGGAGLLGALSYLGLTQAGLSPQQTLLSMLGIPALLLASYFLLLTSPEAQDPGGEEEAESAARQPLIRTEAPESKPGSSSSLSLRERWTVFKGLLWYIVPLVVVYFAEYFINQGLFELLFFWNTSLSHAQQYRWYQMLYQAGVFASRSSLRCCRIRFTWALALLQCLNLVFLLADVWFGFLPSIYLVFLIILYEGLLGGAAYVNTFHNIALETSDEHREFAMAATCISDTLGISLSGLLALPLHDFLCQLS

SEQ ID NO: 104210 - DNA, 1020 bp, Artificial Sequence
  derived and/or modified sequence
atgggcggctgcgccggcagcagaagaagattcagcgacagcgagggcgaggagaccgtgcccgagcccagactgcccctgctggaccaccagggcgcccactggaagaacgccgtgggcttctggctgctgggcctgtgcaacaacttcagctacgtggtgatgctgagcgccgcccacgacatcctgagccacaagagaaccagcggcaaccagagccacgtggaccccggccccacccccatcccccacaacagcagcagcagattcgactgcaacagcgtgagcaccgccccccccggcagcagacagtgggacctgtgctgctggaagctgagacccggctgcctgttcagcttctgcggcgaccagcccgtgtgctacttcctgctgctgaccagccccgaggcccaggaccccggcggcgaggaggaggccgagagcgccgccagacagcccctgatcagaaccgaggcccccgagagcaagcccggcagcagcagcagcctgagcctgagagagagatggaccgtgttcaagggcctgctgtggtacatcgtgcccctggtggtggtgtacttcgccgagtacttcatcaaccagggcctgttcgagctgctgttcttctggaacaccagcctgagccacgcccagcagtacagatggtaccagatgctgtaccaggccggcgtgttcgccagcagaagcagcctgagatgctgcagaatcagattcacctgggccctggccctgctgcagtgcctgaacctggtgttcctgctggccgacgtgtggttcggcttcctgcccagcatctacctggtgttcctgatcatcctgtacgagggcctgctgggcggcgccgcctacgtgaacaccttccacaacatcgccctggagaccagcgacgagcacagagagttcgccatggccgccacctgcatcagcgacaccctgggcatcagcctgagcggcctgctggccctgcccctgcacgacttcctgtgccagctgagctag

SEQ ID NO: 104211 - DNA, 1017 bp, Artificial Sequence
  derived and/or modified sequence
atgtggacccaggcccagagaagaagccccaccaccgcccaccacgacctgaccgccaccctgagcctgagactgcccagagtgctggtgagcggcatctgcgccgccggcagcttcgtgctggtggccttcagccacagcgtgggcaccagcctgtgcggcgtggtgttcgccagcatcagcagcggcctgggcgaggtgaccttcctgagcctgaccgccttctaccccagagccgtgatcagctggtggagcagcggcaccggcggcgccggcctgctgggcgccctgagctacctgggcctgacccaggccggcctgagcccccagcagaccctgctgagcatgctgggcatccccgccctgctgctggccagctacttcctgctgctgaccagccccgaggcccaggaccccggcggcgaggaggaggccgagagcgccgccagacagcccctgatcagaaccgaggcccccgagagcaagcccggcagcagcagcagcctgagcctgagagagagatggaccgtgttcaagggcctgctgtggtacatcgtgcccctggtggtggtgtacttcgccgagtacttcatcaaccagggcctgttcgagctgctgttcttctggaacaccagcctgagccacgcccagcagtacagatggtaccagatgctgtaccaggccggcgtgttcgccagcagaagcagcctgagatgctgcagaatcagattcacctgggccctggccctgctgcagtgcctgaacctggtgttcctgctggccgacgtgtggttcggcttcctgcccagcatctacctggtgttcctgatcatcctgtacgagggcctgctgggcggcgccgcctacgtgaacaccttccacaacatcgccctggagaccagcgacgagcacagagagttcgccatggccgccacctgcatcagcgacaccctgggcatcagcctgagcggcctgctggccctgcccctgcacgacttcctgtgccagctgagctag

SEQ ID NO: 104212 - DNA, 1020 bp, Artificial Sequence
  derived and/or modified sequence
atgggtgggtgtgcaggtagcaggcgacgtttttctgattccgaaggggaggagaccgttcccgaaccgaggctcccccttctcgatcaccagggggcacactggaagaacgcagtgggcttttggctgctgggcttatgcaacaacttttcctacgtggtgatgctgagcgcagcacacgacatactatctcacaagaggacaagtggaaaccagtcacatgtggatcccgggcctaccccgattccccataacagctcctctcgattcgattgcaatagcgtgtcaacggccccccctggaagcaggcaatgggatctctgttgttggaaactgaggccaggatgcctgttttctttttgcggtgatcagccggtctgttacttcctgttgctgacctcgcctgaagcacaggatccaggcggcgaggaggaggctgaaagtgccgcccgacagccattgattcggactgaggcccctgaaagcaaaccaggctcaagctcctctcttagcctgcgcgaacgctggaccgtgttcaagggcctgctctggtatattgtacccctggttgtagtgtatttcgcagagtatttcattaatcaggggcttttcgagctgctgtttttctggaacaccagccttagtcatgctcagcaataccgctggtaccagatgttgtaccaggcaggcgtcttcgcgtctagaagcagcttacgctgttgtcggatccgctttacctgggcactcgcactcctgcagtgcctaaatctggtgttcctcctggcagatgtgtggtttggctttctgccatcaatctatctggtctttctgattatactctacgaagggctgctaggaggcgccgcttatgtaaacacctttcacaacatcgccctggagacttccgacgagcaccgagaattcgccatggccgctacatgcatttccgacactcttgggatatctctctcagggctcctcgcactcccactccacgattttctctgccagttgagttag

SEQ ID NO: 104213 - DNA, 1017 bp, Artificial Sequence
  derived and/or modified sequence
atgtggacacaagctcagaggcgcagccccactacagcccaccatgacttaactgccaccctaagcctccgattaccgagggtattagtctccggcatatgcgcggctggttcttttgtactggttgcttttagtcattctgtggggacgagcctttgcggcgtggtgtttgctagcatctccagtggtctgggggaggttacgttcctgtccttgaccgccttttatccaagagcggtcattagctggtggtcctcaggaacaggcggcgcaggcctgctcggcgccctgtcttatctaggattaactcaggctgggctgtcgccgcaacagactctgttaagtatgttaggtattcccgctctgctgctcgcgtcgtacttcctattgcttacctctcctgaggctcaggatccggggggagaagaagaggctgaatctgctgccagacagcccctgattcggacagaggcccctgagagcaagcccgggagctctagtagcctctccttgagagagcgttggaccgtcttcaagggattgctttggtatatagtccctttggtcgtggtatatttcgcagaatattttattaatcagggattgttcgagctgctgttcttttggaatacatctctgtctcacgcacaacagtacaggtggtatcaaatgctctaccaggctggcgtgttcgcttctagaagcagtctcaggtgttgcagaattaggttcacttgggccctggcactgctgcagtgtctgaacctggtctttctcctggctgatgtgtggtttggcttcctacccagtatatacctagtgtttttgatcattctgtacgaagggttactcggcggggcggcctacgttaatacattccataacatcgccctggagactagcgacgagcatcgggagtttgccatggcagcaacctgcatctctgatacgcttggcatttcactgagcggtctgctggccttacccctacatgactttctgtgtcagctcagctag

SEQ ID NO: 104214 - DNA, 1020 bp, Artificial Sequence
  derived and/or modified sequence
atgggcggctgtgccggcagcagaagacgcttcagtgacagcgagggggaggagaccgtgcctgagccccggctgcccctgctggaccaccagggcgcccactggaagaatgctgtgggcttctggctgctgggcctgtgcaacaacttctcctatgtggtgatgctgtctgctgcccatgacatcctgagccacaagaggaccagcggcaaccagagccacgtggaccccggccccacccccatcccccacaacagcagcagcagatttgactgcaacagcgtgtccacagcccctcctggcagccggcagtgggacctgtgctgctggaagctgcggcccggctgcctcttctccttctgtggggaccagcctgtgtgctacttcctgctgctgaccagccctgaggcccaggaccccggcggggaggaggaggccgagagcgctgcccggcagcccctcatcagaacagaggcccctgagagcaagccaggcagcagcagcagcctgagcctgcgggagcgctggacagtgttcaagggcctgctgtggtacatcgtgcccctggtggtggtgtactttgctgagtacttcatcaaccagggcctgtttgagctgctcttcttctggaacaccagcctgagccacgcccagcagtaccgctggtaccagatgctgtaccaggccggcgtgtttgccagccgcagcagcctgcgctgctgccgcatccgcttcacctgggccctggccctgctgcagtgcctgaacctggtgttcctgctggctgatgtgtggtttggcttcctgcccagcatctacctggtgttcctgatcatcctgtatgagggcctgctgggcggggccgcctacgtgaacaccttccacaacatcgccctggagaccagtgatgagcaccgggagtttgccatggccgccacctgcatcagtgacaccctgggcatcagcctgagcggcctgctggccctgcccctgcatgacttcctgtgccagctgtcctag

SEQ ID NO: 104215 - DNA, 1017 bp, Artificial Sequence
  derived and/or modified sequence
atgtggacccaggcccagaggaggagccccaccacagcccaccacgacctgacagccaccctgagcctgcggctgccccgggtgctggtgtctggcatctgtgccgccggcagctttgtgctggtggccttcagccacagcgtgggcaccagcctgtgtggggtggtgtttgccagcatcagcagcggcctgggggaggtgaccttcctgagcctgacagccttctaccccagggctgtgatctcctggtggagcagcggcaccggcggggccggcctgctgggcgccctgagctacctgggcctgacccaggccggcctgagcccccagcagaccctgctgtccatgctgggcatcccagccctgctgctggccagctacttcctgctgctgaccagccctgaggcccaggaccctggaggagaggaggaggccgagagcgctgcccggcagcccctcatcagaacagaggcccctgagagcaagccaggcagcagcagcagcctgagcctgcgggagcgctggacagtgttcaagggcctgctgtggtacatcgtgcccctggtggtggtgtactttgctgagtacttcatcaaccagggcctgtttgagctgctcttcttctggaacaccagcctgagccacgcccagcagtaccgctggtaccagatgctgtaccaggccggcgtgtttgccagccgcagcagcctgcgctgctgccgcatccgcttcacctgggccctggccctgctgcagtgcctgaacctggtgttcctgctggctgatgtgtggtttggcttcctgcccagcatctacctggtgttcctgatcatcctgtatgagggcctgctgggcggggccgcctacgtgaacaccttccacaacatcgccctggagaccagtgatgagcaccgggagtttgccatggccgccacctgcatcagtgacaccctgggcatcagcctgagcggcctgctggccctgcccctgcatgacttcctgtgccagctgtcctag

SEQ ID NO: 104216 - DNA, 1020 bp, Artificial Sequence
  derived and/or modified sequence
atgggcggctgcgccggcagccggcggcggttcagcgacagcgagggagaagagactgtcccagaacccagactgcctttgctggatcaccaaggggctcattggaaaaacgctgtcggcttctggctgctgggattatgcaacaactttagctacgtggtcatgctctctgccgcgcacgacattctgtcgcataagagaacatccgggaaccagagccacgtggaccctggacccacaccaataccacacaattcctctagtcgatttgattgcaacagtgtgagtacggcaccccccgggtcccgacagtgggacttatgttgttggaagttaagaccaggctgtctgttctcgttttgcggcgaccagccagtgtgttacttccttctcctcacctcacctgaggctcaggatccaggtggcgaggaggaagccgaatccgccgctcgccagcctctgatccggaccgaagctccggagagtaagcccggatcatcgtctagtctatctttgcgagagcgttggaccgtgtttaagggactcctgtggtacattgtgccgcttgtagtggtgtacttcgctgagtacttcatcaatcaaggactcttcgagctgctgttcttctggaacacatctctgtctcatgctcaacagtacaggtggtaccagatgctgtaccaggccggggttttcgcctctcggagcagtctgagatgctgtcgcattcggttcacttgggctctggcgttactccagtgcttgaacttagtctttcttctggcagacgtctggttcggcttccttccctcaatctacctggtgttcctgatcatcctgtacgaagggctcttaggtggcgccgcgtacgtgaacactttccataacatcgccttggagaccagcgatgagcaccgtgaatttgccatggcagctacttgcatcagcgatactctgggaatttcactttctgggttgcttgcattacccctgcacgacttcctttgtcagctctcctag

SEQ ID NO: 104217 - DNA, 1017 bp, Artificial Sequence
  derived and/or modified sequence
atgtggacccaggcccagcggcggagccccaccaccgcccaccacgacttaacagcaacgctcagcttgcggcttccaagggtgttggtgtcgggaatctgtgcggccggatcattcgtgcttgtcgcatttagccattcagtgggcacttcactgtgcggcgtggtttttgccagcatttcatccgggctaggcgaggtcaccttcctgagtctgactgcattttacccacgcgcagtgatttcttggtggtcctccggcaccggcggcgccggcttactcggcgcattgtcctacttgggtctcacacaggcgggcctgtccccacagcagactctcttaagcatgctcggcatccctgcattgctgctagcgtcctactttttgcttctcacctcccccgaagcacaggacccaggaggcgaagaggaggcagagagcgcagcaaggcagccgctcatccgcaccgaggctccagaatccaaaccaggaagctcctctagcctctctctgagagaacgctggaccgtgttcaagggcctgctgtggtacatcgtgcctctcgttgtggtttacttcgccgagtactttataaaccagggcctctttgagttgttgtttttctggaatactagcctcagtcacgctcaacagtaccgctggtatcagatgctgtaccaagccggagtgttcgcttccagatcaagcctgagatgctgtcgtatcaggtttacctgggcactagcacttctgcaatgtctgaacctcgttttcctattagcagacgtgtggtttgggttcctcccctccatctatctggtgttcttgatcatcctatatgaaggtttgttaggtggcgccgcttacgttaatacttttcataatatcgctctggaaacatctgatgagcaccgggaatttgccatggcagctacatgtattagcgacacactcggcatcagcctgtctgggttgcttgccctgcctctgcacgattttttgtgtcagctgagctag

SEQ ID NO: 104218 - DNA, 1020 bp, Artificial Sequence
  derived and/or modified sequence
atggggggatgcgccggaagtagaaggcgattcagtgatagcgaaggtgaagagacagtgccagagcctcggctaccccttttggaccaccagggagcgcactggaagaacgcagtgggattttggctgctggggctgtgtaacaacttctcgtacgtagttatgcttagcgccgcacatgatattcttagccacaaaaggacgtctgggaaccagtctcacgttgatcctggtcctactccgattcctcacaactcatcttcacgcttcgactgtaattctgtgtcaactgccccacctggatccaggcagtgggacctgtgctgttggaagctcagacctggatgcttgttcagcttttgcggggatcaaccagtctgctatttcctgctacttactagccctgaggcccaagatcctggcggagaggaggaggcagagagtgccgcaagacaacccctgatcaggactgaggccccagagtccaaacccggtagctccagttccctttcattaagagagcgttggacggtattcaaaggcctgctctggtatatagtgccactggttgtggtatattttgccgaatactttatcaaccaagggctgtttgagctgctgtttttctggaatacatcgctgtcgcacgcgcagcaatacaggtggtatcagatgttgtatcaggccggagtgtttgcgagcagaagttcgcttcgatgctgcaggatccgcttcacttgggccctggcattgctgcaatgcttgaacctggtatttctcttagccgacgtgtggtttggttttctgccctcgatatacctggtcttccttataatcctgtatgagggactcctgggaggtgccgcttacgttaacactttccacaacatcgcgcttgagacaagtgacgagcaccgggaattcgctatggctgcaacctgcattagcgacacattgggaataagtttatccgggctgctcgccttaccactgcatgatttcctttgccaattatcctag

SEQ ID NO: 104219 - DNA, 1017 bp, Artificial Sequence
  derived and/or modified sequence
atgtggacgcaagctcagagacgatcacctacaacggcccaccacgatcttaccgccactttgtccctgagactgccacgggtgctggtgagtgggatctgcgctgccggatcctttgtgctggtggcttttagtcatagtgtcggcacatctctctgtggggtcgtgttcgcgtctatcagctctggattaggcgaagtgacttttctcagcctcaccgccttttaccccagagcggtcatcagttggtggagcagcggaactggaggcgcaggccttctgggggctctttcttaccttggattaactcaagcaggattgtcccctcagcaaaccctactgtcgatgctggggattcctgccctactcctcgcgtcatactttctgctgctgacgagccctgaagctcaggaccccggaggggaggaggaggctgagtccgccgcacgacagcctcttattcggactgaggcccctgaatcgaagccgggaagttcgtcaagcctgagtctgagggaaaggtggacagtgtttaagggcttactctggtacatcgtgccactagtagtggtttactttgcagagtatttcattaatcagggcctgttcgaattgctgtttttttggaatacttccctgagtcatgctcaacagtacaggtggtaccaaatgctctatcaggccggagtgttcgcctcgagatctagtctgcggtgctgtaggatacggttcacgtgggctctggctctgttgcagtgccttaacctggttttcctgctggcggatgtctggtttgggttcctcccaagtatatatctcgtgtttctcattattctttacgagggattgctggggggagccgcttatgtcaacacctttcataatattgcactagaaacaagtgatgaacaccgagagttcgctatggcagctacgtgtatctccgatacgctcggcatatccctgtccggcctgcttgccctgccacttcacgatttcctgtgccagctgagctag

SEQ ID NO: 104220 - DNA, 1301 bp, Artificial Sequence
  derived and/or modified sequence
acggcctctgcatagtgcagaacattctgctgctcttaaagaccctcatccctcccgtgggagccccctttggacactctatgaccctggaccctcgggggacctgaacttgatgcgatgggaggctgtgcaggctcgcggcggcgcttttcggattccgagggggaggagaccgtcccggagccccggctccctctgttggaccatcagggcgcgcattggaagaacgcggtgggcttctggctgctgggcctttgcaacaacttctcttatgtggtgatgctgagtgccgcccacgacatccttagccacaagaggacatcgggaaaccagagccatcccccgggttctcgtcagtgggatttgtgctgctggaagcttcgtcctggttgccttttctcattctgtggggaccagcctgtgtgctatttcttgttgctcacatctcctgaggcccaggaccctggaggggaagaagaagcagagagcgcagcccggcagcccctcataagaaccgaggccccggagtcgaagccaggctccagctccagcctctcccttcgggaaaggtggacagtgttcaagggtctgctgtggtacattgttcccttggtcgtagtttactttgccgagtatttcattaaccagggactttttgaactcctctttttctggaacacttccctgagtcacgctcagcaataccgctggtaccagatgctgtaccaggctggcgtctttgcctcccgctcttctctccgctgctgtcgcatccgtttcacctgggccctggccctgctgcagtgcctcaacctggtgttcctgctggcagacgtgtggttcggctttctgccaagcatctacctcgtcttcctgatcattctgtatgaggggctcctgggaggcgcagcctacgtgaacaccttccacaacatcgccctggagaccagtgatgagcaccgggagtttgcaatggcggccacctgcatctctgacacactggggatctccctgtcggggctcctggctttgcctctgcatgacttcctctgccagctctcctgatactcgggatcctcaggacgcaggtcacattcacctgtgggcagagggacaggtcagacacccaggcccaccccagagaccctccatgaactgtgctcccagccttcccggcaggtctgggagtagggaagggctgaagccttgtttcccttgcaggggggccagccattgtctcccacttggggagtttcttcctggcatcatgccttctgaataaatgccgattttatccatgg

SEQ ID NO: 104221 - DNA, 1144 bp, Artificial Sequence
  derived and/or modified sequence
gcgttgatccttgtcacctgtcgcagaccctcatccctcccgtgggagccccctttggacactctatgaccctggaccctcgggggacctgaacttgatgcgatgggaggctgtgcaggctcgcggcggcgcttttcggattccgagggggaggagaccgtcccggagccccggctccctctgttggaccatcagggcgcgcattggaagaacgcggtgggcttctggctgctgggcctttgcaacaacttctcttatgtggtgatgctgagtgccgcccacgacatccttagccacaagaggacatcgggaaaccagagccatgtggacccaggcccaacgccgatcccccacaacagctcatcacgatttgactgcaactctgtctctacggctcccccgggttctcgtcagtgggatttgtgctgctggaagcttcgtcctggttgccttttctcattctgtggggaccagcctgtgtgctatttcttgttgctcacatctcctgaggcccaggaccctggaggggaagaagaagcagagagcgcagcccggcagcccctcataagaaccgaggccccggagtcgaagccaggctccagctccagcctctcccttcgggaaaggtggacagtgttcaagggtctgctgtggtacattgttcccttggtcgtagtttactttgccgagtatttcattaaccagggactttttgaactcctctttttctggaacacttccctgagtcacgctcagcaataccgctggtaccagatgctgtaccaggctggcgtctttgcctcccgctcttctctccgctgctgtcgcatccgtttcacctgggccctggccctgctgcagtgcctcaacctggtgttcctgctggcagacgtgtggttcggctttctgccaagcatctacctcgtcttcctgatcattctgtatgaggggctcctgggaggcgcagcctacgtgaacaccttccacaacatcgccctggagaccagtgatgagcaccgggagtttgcaatggcggccacctgcatctctgacacactggggatctccctgtcggggctcctggctttgcctctgcatgacttcctctgccagctctcctgatactcgggatcctcaggacgca

SEQ ID NO: 104222 - DNA, 1577 bp, Artificial Sequence
  derived and/or modified sequence
aaaggtacaggcctcagggtccctgctgtagacggggcgggggagagtacgatgggtggggcgtggtgggtcgtagggcgctcgagatggagcccccagcttccttgatggatcgcggggcgcgagtgccctagacaagccggagctgggaccggcaatcgggcgttgatccttgtcacctgtcgcagaccctcatccctcccgtgggagccccctttggacactctatgaccctggaccctcgggggacctgaacttgatgcgatgggaggctgtgcaggctcgcggcggcgcttttcggattccgagggctgctgggcctttgcaacaacttctcttatgtggtgatgctgagtgccgcccacgacatccttagccacaagaggacatcgggaaaccagagccatgtggacccaggcccaacgccgatcccccacaacagctcatcacgatttgactgcaactctgtctctacggctcccccgggttctcgtcagtgggatttgtgctgctggaagcttcgtcctggttgccttttctcattctgtggggaccagcctgtgtggtgtggtcttcgctagcatctcatcaggccttggggaggtcaccttcctctccctcactgccttctaccccagggccgtgatctcctggtggtcctcagggactgggggagctgggctgctgggggccctgtcctacctgggcctcacccaggccggcctctcccctcagcagaccctgctgtccatgctgggtatccctgccctgctgctggccagctatttcttgttgctcacatctcctgaggcccaggaccctggaggggaagaagaagcagagagcgcagcccggcagcccctcataagaaccgaggccccggagtcgaagccaggctccagctccagcctctcccttcgggaaaggtggacagtgttcaagggtctgctgtggtacattgttcccttggtcgtagtttactttgccgagtatttcattaaccagggactttttgaactcctctttttctggaacacttccctgagtcacgctcagcaataccgctggtaccagatgctgtaccaggctggcgtctttgcctcccgctcttctctccgctgctgtcgcatccgtttcacctgggccctggccctgctgcagtgcctcaacctggtgttcctgctggcagacgtgtggttcggctttctgccaagcatctacctcgtcttcctgatcattctgtatgaggggctcctgggaggcgcagcctacgtgaacaccttccacaacatcgccctggagaccagtgatgagcaccgggagtttgcaatggcggccacctgcatctctgacacactggggatctccctgtcggggctcctggctttgcctctgcatgacttcctctgccagctctcctgatactcgggatcctcaggacgcaggtcacattcacctgtgggcagagggacaggtcagacacccaggcccaccccagagaccctccatgaactgtgctcccagccttcccggcaggtctgggagtagggaagggctgaagccttgtttcccttgca

SEQ ID NO: 104223 - protein, 275 aa, Artificial Sequence
  derived and/or modified sequence
MTDDKDVLRDVWFGRIPTCFTLYQDEITEREAEPYYLLLPRVSYLTLVTDKVKKHFQKVMRQEDISEIWFEYEGTPLKWHYPIGLLFDLLASSSALPWNITVHFKSFPEKDLLHCPSKDAIEAHFMSCMKEADALKHKSQVINEMQKKDHKQLWMGLQNDRFDQFWAINRKLMEYPAEENGFRYIPFRIYQTTTERPFIQKLFRPVAADGQLHTLGDLLKEVCPSAIDPEDGEKKNQVMIHGIEPMLETPLQWLSEHLSYPDNFLHISIIPQPTD

SEQ ID NO: 104224 - DNA, 828 bp, Artificial Sequence
  derived and/or modified sequence
atgaccgacgacaaggacgtgctgagagacgtgtggttcggcagaatccccacctgcttcaccctgtaccaggacgagatcaccgagagagaggccgagccctactacctgctgctgcccagagtgagctacctgaccctggtgaccgacaaggtgaagaagcacttccagaaggtgatgagacaggaggacatcagcgagatctggttcgagtacgagggcacccccctgaagtggcactaccccatcggcctgctgttcgacctgctggccagcagcagcgccctgccctggaacatcaccgtgcacttcaagagcttccccgagaaggacctgctgcactgccccagcaaggacgccatcgaggcccacttcatgagctgcatgaaggaggccgacgccctgaagcacaagagccaggtgatcaacgagatgcagaagaaggaccacaagcagctgtggatgggcctgcagaacgacagattcgaccagttctgggccatcaacagaaagctgatggagtaccccgccgaggagaacggcttcagatacatccccttcagaatctaccagaccaccaccgagagacccttcatccagaagctgttcagacccgtggccgccgacggccagctgcacaccctgggcgacctgctgaaggaggtgtgccccagcgccatcgaccccgaggacggcgagaagaagaaccaggtgatgatccacggcatcgagcccatgctggagacccccctgcagtggctgagcgagcacctgagctaccccgacaacttcctgcacatcagcatcatcccccagcccaccgactag

SEQ ID NO: 104225 - DNA, 828 bp, Artificial Sequence
  derived and/or modified sequence
atgaccgatgataaagacgtgctacgcgatgtctggttcggacgaatacctacttgctttacactgtaccaggatgagattactgagagggaggcagaaccttattacctgctgctccccagggtttcatacctaaccctcgtgaccgacaaggtcaagaagcactttcagaaggtgatgcggcaagaagatattagtgagatatggtttgagtatgaaggaactcccctgaaatggcactaccctattggcttactgttcgacctcctggcaagttcctctgccctgccatggaacatcacggtacacttcaagtcgtttcctgaaaaagacctcctgcattgccccagcaaagacgctatcgaagcccactttatgagctgcatgaaagaggccgatgcactcaaacacaagagccaggtgatcaatgagatgcagaagaaggaccacaaacagctatggatgggcctccagaacgataggttcgatcagttctgggctatcaataggaaacttatggagtatcccgccgaggagaatggcttccggtatattcctttccgtatttatcagactactaccgagagaccgttcatccagaagctctttcggcctgtcgcagccgacggtcagttgcacacactgggagacttactaaaggaggtgtgtccatccgcaattgatccagaagacggagagaaaaagaatcaggtgatgattcatggcatagaacctatgttggagacgcctcttcaatggctgagtgaacatctcagctatccggataactttctccatatttccataatcccacaaccaacagactag

SEQ ID NO: 104226 - DNA, 828 bp, Artificial Sequence
  derived and/or modified sequence
atgactgacgacaaggatgtgcttagagacgtgtggttcggtaggatccctacctgtttcactctctaccaggacgagatcactgagcgagaagccgaaccctactacctgttactgccaagagtgtcttacttgactctcgtgacagataaagtgaaaaagcattttcagaaggtgatgcggcaagaagatatcagcgaaatttggtttgaatacgaggggaccccactgaaatggcattaccccatcggactcctgttcgatctgctggctagctcgagcgccctgccctggaacattaccgttcacttcaaaagcttccctgagaaagacctgttgcactgcccttcaaaggatgctatagaagctcacttcatgtcctgcatgaaggaggccgacgctctgaaacataagagtcaggttataaacgagatgcaaaagaaagaccataaacaactctggatgggacttcagaatgaccgttttgatcaattctgggcgattaaccggaagctgatggaatacccagctgaggagaacggattccgatacattccttttagaatttatcaaactacaaccgagagacctttcattcaaaaactgtttcgacctgtggccgctgacggccaactccatacgttgggtgacctcctcaaggaagtctgccccagcgcgatagatcctgaagatggcgagaaaaaaaatcaggtcatgattcacggaattgagcctatgttagaaacaccgctccagtggcttagtgagcaccttagttaccccgataattttctgcacatttccattattcctcagccaactgactag

SEQ ID NO: 104227 - DNA, 828 bp, Artificial Sequence
  derived and/or modified sequence
atgacagatgacaaggatgtgctgagagatgtgtggtttggccgcatccccacctgcttcaccctgtaccaggatgagatcacagagcgggaggccgagccctactacctgctgctgccccgggtgtcctacctgaccctggtgacagacaaggtgaagaagcacttccagaaggtgatgaggcaggaggacatcagcgagatctggtttgaatatgagggcacccccctgaagtggcactaccccatcggcctgctgtttgacctgctggccagcagcagcgccctgccctggaacatcaccgtgcacttcaagagcttccctgagaaggacctgctgcactgccccagcaaggatgccatcgaggcccacttcatgagctgcatgaaggaggctgatgccctgaagcacaagagccaggtgatcaatgagatgcagaagaaggaccacaagcagctgtggatgggcctgcagaatgacagatttgaccagttctgggccatcaacaggaagctgatggagtacccagcagaagaaaatggcttccgctacatccccttccgcatctaccagaccaccacagagcggcccttcatccagaagctgttccggcctgtggccgcagatggccagctgcacaccctgggggacctgctgaaggaggtgtgccccagcgccattgatcctgaagatggagagaagaagaaccaggtgatgattcatggaattgagcccatgctggagacccccctgcagtggctgtctgagcacctgagctacccagacaacttcctgcacatcagcatcatcccccagcccacagactag

SEQ ID NO: 104228 - DNA, 828 bp, Artificial Sequence
  derived and/or modified sequence
atgaccgacgacaaggacgtgctgcgggacgtgtggttcggccggatccctacctgtttcactctgtaccaagacgaaatcacagagagagaggctgagccgtactacctattactcccaagagtgtcatacctgacccttgtgactgataaagtgaagaagcactttcagaaggtgatgcggcaggaggatatttctgagatctggtttgagtacgaaggtacgcctctcaagtggcactaccctatcggcctgcttttcgacttgcttgcatcctcttcggccctgccctggaatatcacggtgcactttaaatcgtttcccgagaaggaccttttgcactgtccatccaaggatgccatcgaagcccacttcatgagttgcatgaaggaggcggacgcgctcaagcacaagagccaagttatcaacgaaatgcagaagaaggatcataaacagctctggatgggcctgcagaacgacagattcgatcagttctgggccattaatagaaagttgatggagtaccctgccgaagaaaatggtttcagatatatccccttcaggatttatcagaccacaaccgagaggccattcatacagaagctttttcgccccgtggccgcagacggccagctgcacacactgggggacctcctgaaggaagtgtgtccaagtgccatcgacccggaggatggtgagaagaagaatcaggttatgatccatggaattgagcctatgctggagaccccactccagtggttatccgagcacctgagttaccccgacaactttctacacatttccatcattcctcagcccacagattag

SEQ ID NO: 104229 - DNA, 828 bp, Artificial Sequence
  derived and/or modified sequence
atgaccgacgacaaggacgtgctgcgggacgtgtggttcggccggattccaacttgtttcactctgtatcaagacgagatcaccgaaagggaggccgagccatactatcttctgctaccgagagtctcttacttgactctagtgaccgacaaggtgaaaaaacacttccaaaaggtgatgagacaggaagatatcagcgaaatctggtttgagtacgagggcactccactcaagtggcattaccctattggcctgctctttgacctgctggcaagctccagcgcccttccttggaatattaccgtgcacttcaagtcattcccagaaaaagatttactccattgccctagcaaagatgcaatcgaagcacactttatgtcatgcatgaaagaggccgatgccctgaagcacaagagtcaggtcatcaacgaaatgcagaaaaaggaccataaacaactctggatgggccttcagaacgatagatttgaccagttttgggctatcaacagaaagcttatggaatatcccgcagaagagaatgggttccgctatatcccctttagaatctaccagacgacgacagagagacctttcattcagaaactcttcagacctgtcgccgctgatgggcagctgcacaccctcggtgatcttctgaaagaggtttgcccgagcgctatcgacccagaagacggcgagaaaaaaaaccaggtaatgatccacggcattgagccaatgttagagaccccacttcagtggctgtccgaacacttgagctaccccgataacttcctccatatcagtattattccccaaccgacggactag

SEQ ID NO: 104230 - DNA, 828 bp, Artificial Sequence
  derived and/or modified sequence
atgacagatgacaaggacgtgctgcgcgatgtctggtttgggcgaatccctacgtgctttactctgtaccaggatgagatcacggagagagaggcagaaccttactacttgctcctacctcgcgtatcctacctcaccctagtgaccgataaagtaaagaagcactttcagaaagtcatgcgccaggaagacatctctgaaatatggtttgaatatgaagggacgccattgaagtggcattatcccatcggactgctgttcgatctactcgccagctctagcgctctcccctggaacatcaccgtgcatttcaaatcatttcctgagaaggaccttctgcactgcccttccaaagacgccatcgaggcacacttcatgtcatgcatgaaagaagctgatgccctgaagcacaagtcccaagtcattaacgagatgcaaaagaaggatcacaaacaattatggatgggcctacagaatgacagatttgaccagttctgggccatcaaccgaaagttaatggaataccctgctgaagaaaacggatttcgttacattcccttccgtatataccagacaaccaccgaaaggccctttattcagaagctgttccgcccagtcgccgctgacggccagctgcacacacttggagacctactgaaggaggtctgcccaagtgcgattgaccccgaggatggagagaagaagaaccaggtgatgatccatggtatcgagcccatgctggagacaccgcttcagtggttgagtgaacaccttagttatcccgacaacttcctacacatctccatcataccacagcccaccgattag

SEQ ID NO: 104231 - DNA, 828 bp, Artificial Sequence
  derived and/or modified sequence
atgacagatgacaaagatgtcctacgggatgtatggtttgggagaatcccaacctgctttaccttgtaccaggacgaaatcacagaaagagaggccgagccctactatctcctcctccccagagtgagctaccttaccctggtaactgataaggtcaaaaagcattttcagaaagtgatgcggcaagaggatatttcagaaatctggttcgagtatgaggggacgcccctcaagtggcactatcccataggcctcttgttcgatctgcttgcatccagttctgcgctcccctggaacatcacagtacacttcaaatcatttcccgagaaggatttgctccactgccccagcaaggacgccattgaagcccattttatgagctgcatgaaggaggccgacgctttgaagcataagtcgcaggtgattaatgaaatgcaaaagaaagatcataaacagctatggatgggccttcaaaatgatagatttgaccagttttgggccatcaatcggaagctgatggaatatcccgcagaggaaaatggattccgctatattccgttccggatctatcaaaccaccaccgagcgacctttcatccagaaactttttaggcctgttgctgccgacgggcagctgcacacgctcggagatcttttgaaagaagtgtgcccatctgccatcgaccctgaggatggggagaagaaaaaccaggtgatgattcacggaattgaaccaatgcttgagacccctctccaatggttgtccgagcacctgtcttaccccgacaacttcctgcacattagcattatacctcagcctacagattag

SEQ ID NO: 104232 - DNA, 3092 bp, Artificial Sequence
  derived and/or modified sequence
gcccgcccggccgcgatggcgggtgaaggtggttcctccgggcaaggtggagttggcgagacgccggcccggagccctggggccggttggcgggtgtggcctgcggggtccctcttggggtacatgtctgttgcttactaagtttggctttggttgaaataagaatttagcctgtatgtactgctttaactcctggaagaatgacagatgacaaagatgtgcttcgagatgtgtggtttggacgaattccaacttgtttcacgctatatcaggatgagataactgaaagggaagcagaaccatactatttgcttttgccaagagtaagttatttgacgttggtaactgacaaagtgaaaaagcactttcagaaggttatgagacaagaagacattagtgagatatggtttgaatatgaaggcacaccactgaaatggcattatccaattggtttgctatttgatcttcttgcatcaagttcagctcttccttggaacatcacagtacattttaagagttttccagaaaaagaccttctgcactgtccatctaaggatgcaattgaagctcattttatgtcatgtatgaaagaagctgatgctttaaaacataaaagtcaagtaatcaatgaaatgcagaaaaaagatcacaagcaactctggatgggattgcaaaatgacagatttgaccagttttgggccatcaatcggaaactcatggaatatcctgcagaagaaaatggatttcgttatatcccctttagaatatatcagacaacgactgaaagacctttcattcagaagctgtttcgtcctgtggctgcagatggacagttgcacacactaggagatctcctcaaagaagtttgtccttctgctattgatcctgaagatggggaaaaaaagaatcaagtgatgattcatggaattgagccaatgttggaaacacctctgcagtggctgagtgaacatctgagctacccggataattttcttcatattagtatcatcccacagccaacagattgaaggatcaactatttgcctgaacagaatcatccttaaatgggatttatcagagcatgtcacccttttgcttcaatcaggtttggtggaggcaacctgaccagaaacacttcgctgctgcaagccagacaggaaaaagattccatgtcagataaggcaactgggctggtcttactttgcatcacctctgctttcctccactgccatcattaaacctcagctgtgacatgaaagacttaccggaccactgaaggtcttctgtaaaatataatgaagctgaaacctttggcctaagaagaaaatggaagtatgtgccactcgatttgtatttctgattaacaaataaacaggggtatttcctaaggtgaccatggttgaactttagctcatgaaagtggaaacattggtttaattttcaagagaattaagaaagtaaaagagaaattctgttatcaataacttgcaagtaattttttgtaaaagattgaattacagtaaacccatctttccttaacgaaaatttcctatgtttacagtctgtctattggtatgcaatcttgtaactttgataatgaacagtgagagatttttaaataaagcctctaaatatgttttgtcatttaataacatacagttttgtcacttttcaagtactttctgactcacatacagtagatcactttttactctgtgttaccattttgactggtcgtcattggcatggggtggatatagggcataggattacttgtctcagaagctgtcatagaatttcttgctgccaattaaaaaacctgtgttctttacacactacacgtataaatattgtaactgttcatctttgttgttttatcactgtaagcctgtcaaatcatagtatcctaagcatctgtaaatgctaattttgcatttttggaaaaacccattccttccaagctagtgtttttcattggctccaggtctaatttttcactgtggtccctggcagccagtcttttgaagtttaaagattacctgtctcttgactgcagtaccttttctttaatttttaccaaaaatatccagaggttactggagttcttattcaatataaggaaagtttgctgcactttattaccaagcctctgggattttaccagtcaaacatatttgtgcattacatttcatttcttgtgagctagctggctgtccatattgaatgttgacccatttgagtacgctaaaaggcttacagtatcagacacgatcatggttttagatcccataataaaaatgaatgtttttcttataaaaaattatacaaatgctgaagtgagattctactattgttcattgcttccttttctttttccttttgcgattttcactgattaatagcacatttcttcacaaaattagataaagttggtcaaagaccagatattctggaatggaaattgtaaagcttaatcaaaaagaatagccagtacagcatacaatctcagaaacttagaagcaagtagaaaataattggttgatgtaaacgaaagtgccattttagtaaaggcaggaaaaaaatagcaatatttgagttatgtaaggataaaaaatccactgacttgtatttttgcacaagaggctggtctgaatatgattgttcacattaagagtgtttattcgtcggttcattttggggattttcccccttgatgttttgacagattgaagtgagctttagtgagcaaaaggatcagaatgcagggaacactaagctgtgatgaagaaagtgtggtaaaaagccagagtagttttatacagacaaaaccagtgtcaggcctttgcagtaggcttgagtgaacttctgatctagatttgaaagtaaattttatgaagacattgcccatttttacttcctcattcattattgtaccagcatcatagctttattactctaatcccaggtaagtcaagcctacaatgccctagaggaagagtaaaaccagaaattcatgctggcttaaataatctatttttgtttcttttcatttgaatatttaaattttatggtttattaaaaaattaaataaa

SEQ ID NO: 104233 - DNA, 3216 bp, Artificial Sequence
  derived and/or modified sequence
ctggacttgtggtgcgctgccagggctccgcagcgttgccggttgtattcgctggataccagagggcggaagtgcagcagggttcagctccgacctccgcgccggtgctttttgcggctgcgcgggcttcctggagtcctgctaccgcgtccccgcaggacagtgtgtcaggcgggcagcttgccccgccgccccaccggagcgcggaatctgggcgtccccaccagtgcggggagccggaaggaggagccatagcttggagtaggtttggctttggttgaaataagaatttagcctgtatgtactgctttaactcctggaagaatgacagatgacaaagatgtgcttcgagatgtgtggtttggacgaattccaacttgtttcacgctatatcaggatgagataactgaaagggaagcagaaccatactatttgcttttgccaagagtaagttatttgacgttggtaactgacaaagtgaaaaagcactttcagaaggttatgagacaagaagacattagtgagatatggtttgaatatgaaggcacaccactgaaatggcattatccaattggtttgctatttgatcttcttgcatcaagttcagctcttccttggaacatcacagtacattttaagagttttccagaaaaagaccttctgcactgtccatctaaggatgcaattgaagctcattttatgtcatgtatgaaagaagctgatgctttaaaacataaaagtcaagtaatcaatgaaatgcagaaaaaagatcacaagcaactctggatgggattgcaaaatgacagatttgaccagttttgggccatcaatcggaaactcatggaatatcctgcagaagaaaatggatttcgttatatcccctttagaatatatcagacaacgactgaaagacctttcattcagaagctgtttcgtcctgtggctgcagatggacagttgcacacactaggagatctcctcaaagaagtttgtccttctgctattgatcctgaagatggggaaaaaaagaatcaagtgatgattcatggaattgagccaatgttggaaacacctctgcagtggctgagtgaacatctgagctacccggataattttcttcatattagtatcatcccacagccaacagattgaaggatcaactatttgcctgaacagaatcatccttaaatgggatttatcagagcatgtcacccttttgcttcaatcaggtttggtggaggcaacctgaccagaaacacttcgctgctgcaagccagacaggaaaaagattccatgtcagataaggcaactgggctggtcttactttgcatcacctctgctttcctccactgccatcattaaacctcagctgtgacatgaaagacttaccggaccactgaaggtcttctgtaaaatataatgaagctgaaacctttggcctaagaagaaaatggaagtatgtgccactcgatttgtatttctgattaacaaataaacaggggtatttcctaaggtgaccatggttgaactttagctcatgaaagtggaaacattggtttaattttcaagagaattaagaaagtaaaagagaaattctgttatcaataacttgcaagtaattttttgtaaaagattgaattacagtaaacccatctttccttaacgaaaatttcctatgtttacagtctgtctattggtatgcaatcttgtaactttgataatgaacagtgagagatttttaaataaagcctctaaatatgttttgtcatttaataacatacagttttgtcacttttcaagtactttctgactcacatacagtagatcactttttactctgtgttaccattttgactggtcgtcattggcatggggtggatatagggcataggattacttgtctcagaagctgtcatagaatttcttgctgccaattaaaaaacctgtgttctttacacactacacgtataaatattgtaactgttcatctttgttgttttatcactgtaagcctgtcaaatcatagtatcctaagcatctgtaaatgctaattttgcatttttggaaaaacccattccttccaagctagtgtttttcattggctccaggtctaatttttcactgtggtccctggcagccagtcttttgaagtttaaagattacctgtctcttgactgcagtaccttttctttaatttttaccaaaaatatccagaggttactggagttcttattcaatataaggaaagtttgctgcactttattaccaagcctctgggattttaccagtcaaacatatttgtgcattacatttcatttcttgtgagctagctggctgtccatattgaatgttgacccatttgagtacgctaaaaggcttacagtatcagacacgatcatggttttagatcccataataaaaatgaatgtttttcttataaaaaattatacaaatgctgaagtgagattctactattgttcattgcttccttttctttttccttttgcgattttcactgattaatagcacatttcttcacaaaattagataaagttggtcaaagaccagatattctggaatggaaattgtaaagcttaatcaaaaagaatagccagtacagcatacaatctcagaaacttagaagcaagtagaaaataattggttgatgtaaacgaaagtgccattttagtaaaggcaggaaaaaaatagcaatatttgagttatgtaaggataaaaaatccactgacttgtatttttgcacaagaggctggtctgaatatgattgttcacattaagagtgtttattcgtcggttcattttggggattttcccccttgatgttttgacagattgaagtgagctttagtgagcaaaaggatcagaatgcagggaacactaagctgtgatgaagaaagtgtggtaaaaagccagagtagttttatacagacaaaaccagtgtcaggcctttgcagtaggcttgagtgaacttctgatctagatttgaaagtaaattttatgaagacattgcccatttttacttcctcattcattattgtaccagcatcatagctttattactctaatcccaggtaagtcaagcctacaatgccctagaggaagagtaaaaccagaaattcatgctggcttaaataatctatttttgtttcttttcatttgaatatttaaattttatggtttattaaaaaattaaataaa

SEQ ID NO: 104234 - protein, 197 aa, Artificial Sequence
  derived and/or modified sequence
MHYPIGLLFDLLASSSALPWNITVHFKSFPEKDLLHCPSKDAIEAHFMSCMKEADALKHKSQVINEMQKKDHKQLWMGLQNDRFDQFWAINRKLMEYPAEENGFRYIPFRIYQTTTERPFIQKLFRPVAADGQLHTLGDLLKEVCPSAIDPEDGEKKNQVMIHGIEPMLETPLQWLSEHLSYPDNFLHISIIPQPTD

SEQ ID NO: 104235 - DNA, 594 bp, Artificial Sequence
  derived and/or modified sequence
atgcactaccccatcggcctgctgttcgacctgctggccagcagcagcgccctgccctggaacatcaccgtgcacttcaagagcttccccgagaaggacctgctgcactgccccagcaaggacgccatcgaggcccacttcatgagctgcatgaaggaggccgacgccctgaagcacaagagccaggtgatcaacgagatgcagaagaaggaccacaagcagctgtggatgggcctgcagaacgacagattcgaccagttctgggccatcaacagaaagctgatggagtaccccgccgaggagaacggcttcagatacatccccttcagaatctaccagaccaccaccgagagacccttcatccagaagctgttcagacccgtggccgccgacggccagctgcacaccctgggcgacctgctgaaggaggtgtgccccagcgccatcgaccccgaggacggcgagaagaagaaccaggtgatgatccacggcatcgagcccatgctggagacccccctgcagtggctgagcgagcacctgagctaccccgacaacttcctgcacatcagcatcatcccccagcccaccgactag

SEQ ID NO: 104236 - DNA, 594 bp, Artificial Sequence
  derived and/or modified sequence
atgcattatcccatcggtctgttgttcgatcttctggccagcagtagcgcccttccgtggaacattactgtgcactttaagagcttcccagagaaggatcttttgcactgtccttcgaaagatgctatagaagcacacttcatgtcttgcatgaaggaggccgacgctctgaagcacaagagtcaggtgatcaacgagatgcagaaaaaagaccataagcagttgtggatgggccttcaaaatgatagattcgaccaattctgggctatcaaccggaagctgatggagtatcctgctgaggagaatggttttcggtacatacctttcaggatatatcagactactactgaaaggccatttatccagaagctctttaggcccgtggctgccgatggccagttacacacactaggggacttgcttaaggaggtttgcccctcagccatcgacccggaagatggggagaaaaagaaccaagtgatgatccacgggatcgagccaatgttggagacgcctttacagtggctttcagaacacctttcttaccctgacaattttctgcacatctctatcatccctcagcctactgattag

SEQ ID NO: 104237 - DNA, 594 bp, Artificial Sequence
  derived and/or modified sequence
atgcactaccccatcggcctgctgtttgacctgctggccagcagcagcgccctgccctggaacatcaccgtgcacttcaagagcttccctgagaaggacctgctgcactgccccagcaaggatgccatcgaggcccacttcatgagctgcatgaaggaggctgatgccctgaagcacaagagccaggtgatcaatgagatgcagaagaaggaccacaagcagctgtggatgggcctgcagaatgacagatttgaccagttctgggccatcaacaggaagctgatggagtacccagcagaagaaaatggcttccgctacatccccttccgcatctaccagaccaccacagagcggcccttcatccagaagctgttccggcctgtggccgcagatggccagctgcacaccctgggggacctgctgaaggaggtgtgccccagcgccattgatcctgaagatggagagaagaagaaccaggtgatgattcatggaattgagcccatgctggagacccccctgcagtggctgtctgagcacctgagctacccagacaacttcctgcacatcagcatcatcccccagcccacagactag

SEQ ID NO: 104238 - DNA, 594 bp, Artificial Sequence
  derived and/or modified sequence
atgcactaccccatcggcctgctgttcgacctgctggccagcagcagtgccctcccttggaacatcactgtccatttcaaatcctttcccgagaaggatctgctgcactgtccttccaaggatgcgattgaagcccattttatgagctgtatgaaggaagccgatgccctcaaacacaagtcccaagtgatcaatgagatgcaaaagaaagaccacaaacagttgtggatggggctccagaacgatcgcttcgaccagttctgggccattaatagaaagttaatggaatatccagctgaagaaaacggatttagatatattccttttaggatctaccagaccacaactgagcgcccatttattcagaaactgtttcgaccggtggcagccgatggccagctgcacacccttggagacctacttaaagaggtttgccccagcgccatagaccccgaagacggagagaaaaaaaaccaagtaatgatccatggaatcgagccaatgttggagactccgctgcagtggctctcagaacacttaagctaccctgataactttctccatatctctatcatcccacaacccaccgactag

SEQ ID NO: 104239 - DNA, 594 bp, Artificial Sequence
  derived and/or modified sequence
atgcattaccctattggattactttttgacctccttgctagcagctcagctctaccatggaatatcacagttcatttcaagagttttccggagaaagaccttttgcattgccccagtaaggatgctattgaggcacactttatgtcatgcatgaaggaggcagatgcacttaaacacaaatcacaggtcattaatgagatgcagaaaaaggatcacaagcagttatggatgggtctccagaatgaccgctttgatcagttctgggccataaacaggaaactcatggaataccccgctgaggagaacgggttccggtatatcccgttcagaatctaccagaccaccacagaaaggccatttattcagaaactgtttcgccctgtcgctgctgatggtcaactgcacacactgggcgaccttctgaaggaggtctgcccttcagccatagaccccgaagacggggaaaagaagaatcaggtgatgattcatggtattgagcctatgctagagacccctctgcagtggcttagcgagcacctttcttaccccgacaatttccttcacatcagcatcatacctcaacctacggattag

SEQ ID NO: 104240 - DNA, 2697 bp, Artificial Sequence
  derived and/or modified sequence
agtcctgctaccgcgtccccgcaggacagtgtgtcaggcgggcagcttgccccgccgccccaccggagcgcggaatctgggcgtccccaccagtgcggggagccggaaggaggagccatagcttggagtaggtttggctttggttgaaataagaatttagcctgtatgtactgctttaactcctggaagaatgacagatgacaaagatgtgcttcgagatgtgtggtttggacgaattccaacttgtttcacgctatatcaggatgagataactgaaagggaagcagaaccatactatacagatttgaccagttttgggccatcaatcggaaactcatggaatatcctgcagaagaaaatggatttcgttatatcccctttagaatatatcagacaacgactgaaagacctttcattcagaagctgtttcgtcctgtggctgcagatggacagttgcacacactaggagatctcctcaaagaagtttgtccttctgctattgatcctgaagatggggaaaaaaagaatcaagtgatgattcatggaattgagccaatgttggaaacacctctgcagtggctgagtgaacatctgagctacccggataattttcttcatattagtatcatcccacagccaacagattgaaggatcaactatttgcctgaacagaatcatccttaaatgggatttatcagagcatgtcacccttttgcttcaatcaggtttggtggaggcaacctgaccagaaacacttcgctgctgcaagccagacaggaaaaagattccatgtcagataaggcaactgggctggtcttactttgcatcacctctgctttcctccactgccatcattaaacctcagctgtgacatgaaagacttaccggaccactgaaggtcttctgtaaaatataatgaagctgaaacctttggcctaagaagaaaatggaagtatgtgccactcgatttgtatttctgattaacaaataaacaggggtatttcctaaggtgaccatggttgaactttagctcatgaaagtggaaacattggtttaattttcaagagaattaagaaagtaaaagagaaattctgttatcaataacttgcaagtaattttttgtaaaagattgaattacagtaaacccatctttccttaacgaaaatttcctatgtttacagtctgtctattggtatgcaatcttgtaactttgataatgaacagtgagagatttttaaataaagcctctaaatatgttttgtcatttaataacatacagttttgtcacttttcaagtactttctgactcacatacagtagatcactttttactctgtgttaccattttgactggtcgtcattggcatggggtggatatagggcataggattacttgtctcagaagctgtcatagaatttcttgctgccaattaaaaaacctgtgttctttacacactacacgtataaatattgtaactgttcatctttgttgttttatcactgtaagcctgtcaaatcatagtatcctaagcatctgtaaatgctaattttgcatttttggaaaaacccattccttccaagctagtgtttttcattggctccaggtctaatttttcactgtggtccctggcagccagtcttttgaagtttaaagattacctgtctcttgactgcagtaccttttctttaatttttaccaaaaatatccagaggttactggagttcttattcaatataaggaaagtttgctgcactttattaccaagcctctgggattttaccagtcaaacatatttgtgcattacatttcatttcttgtgagctagctggctgtccatattgaatgttgacccatttgagtacgctaaaaggcttacagtatcagacacgatcatggttttagatcccataataaaaatgaatgtttttcttataaaaaattatacaaatgctgaagtgagattctactattgttcattgcttccttttctttttccttttgcgattttcactgattaatagcacatttcttcacaaaattagataaagttggtcaaagaccagatattctggaatggaaattgtaaagcttaatcaaaaagaatagccagtacagcatacaatctcagaaacttagaagcaagtagaaaataattggttgatgtaaacgaaagtgccattttagtaaaggcaggaaaaaaatagcaatatttgagttatgtaaggataaaaaatccactgacttgtatttttgcacaagaggctggtctgaatatgattgttcacattaagagtgtttattcgtcggttcattttggggattttcccccttgatgttttgacagattgaagtgagctttagtgagcaaaaggatcagaatgcagggaacactaagctgtgatgaagaaagtgtggtaaaaagccagagtagttttatacagacaaaaccagtgtcaggcctttgcagtaggcttgagtgaacttctgatctagatttgaaagtaaattttatgaagacattgcccatttttacttcctcattcattattgtaccagcatcatagctttattactctaatcccaggtaagtcaagcctacaatgccctagaggaagagtaaaaccagaaattcatgctggcttaaataatctatttttgtttcttttcatttgaatatttaaattttatggtttatt

SEQ ID NO: 104241 - DNA, 3088 bp, Artificial Sequence
  derived and/or modified sequence
ctggacttgtggtgcgctgccagggctccgcagcgttgccggttgtattcgctggataccagagggcggaagtgcagcagggttcagctccgacctccgcgccggtgctttttgcggctgcgcgggcttcctggagtcctgctaccgcgtccccgcaggacagtgtgtcaggcgggcagcttgccccgccgccccaccggagcgcggaatctgggcgtccccaccagtgcggggagccggaaggaggagccatagcttggagtaggtttggctttggttgaaataagaatttagcctgtatgtactgctttaactcctggaagaatgacagatgacaaagatgtgcttcgagatgtgtggtttggacgaattccaacttgtttcacgctatatcaggatgagataactgaaagggaagcagaaccatactatgcattatccaattggtttgctatttgatcttcttgcatcaagttcagctcttccttggaacatcacagtacattttaagagttttccagaaaaagaccttctgcactgtccatctaaggatgcaattgaagctcattttatgtcatgtatgaaagaagctgatgctttaaaacataaaagtcaagtaatcaatgaaatgcagaaaaaagatcacaagcaactctggatgggattgcaaaatgacagatttgaccagttttgggccatcaatcggaaactcatggaatatcctgcagaagaaaatggatttcgttatatcccctttagaatatatcagacaacgactgaaagacctttcattcagaagctgtttcgtcctgtggctgcagatggacagttgcacacactaggagatctcctcaaagaagtttgtccttctgctattgatcctgaagatggggaaaaaaagaatcaagtgatgattcatggaattgagccaatgttggaaacacctctgcagtggctgagtgaacatctgagctacccggataattttcttcatattagtatcatcccacagccaacagattgaaggatcaactatttgcctgaacagaatcatccttaaatgggatttatcagagcatgtcacccttttgcttcaatcaggtttggtggaggcaacctgaccagaaacacttcgctgctgcaagccagacaggaaaaagattccatgtcagataaggcaactgggctggtcttactttgcatcacctctgctttcctccactgccatcattaaacctcagctgtgacatgaaagacttaccggaccactgaaggtcttctgtaaaatataatgaagctgaaacctttggcctaagaagaaaatggaagtatgtgccactcgatttgtatttctgattaacaaataaacaggggtatttcctaaggtgaccatggttgaactttagctcatgaaagtggaaacattggtttaattttcaagagaattaagaaagtaaaagagaaattctgttatcaataacttgcaagtaattttttgtaaaagattgaattacagtaaacccatctttccttaacgaaaatttcctatgtttacagtctgtctattggtatgcaatcttgtaactttgataatgaacagtgagagatttttaaataaagcctctaaatatgttttgtcatttaataacatacagttttgtcacttttcaagtactttctgactcacatacagtagatcactttttactctgtgttaccattttgactggtcgtcattggcatggggtggatatagggcataggattacttgtctcagaagctgtcatagaatttcttgctgccaattaaaaaacctgtgttctttacacactacacgtataaatattgtaactgttcatctttgttgttttatcactgtaagcctgtcaaatcatagtatcctaagcatctgtaaatgctaattttgcatttttggaaaaacccattccttccaagctagtgtttttcattggctccaggtctaatttttcactgtggtccctggcagccagtcttttgaagtttaaagattacctgtctcttgactgcagtaccttttctttaatttttaccaaaaatatccagaggttactggagttcttattcaatataaggaaagtttgctgcactttattaccaagcctctgggattttaccagtcaaacatatttgtgcattacatttcatttcttgtgagctagctggctgtccatattgaatgttgacccatttgagtacgctaaaaggcttacagtatcagacacgatcatggttttagatcccataataaaaatgaatgtttttcttataaaaaattatacaaatgctgaagtgagattctactattgttcattgcttccttttctttttccttttgcgattttcactgattaatagcacatttcttcacaaaattagataaagttggtcaaagaccagatattctggaatggaaattgtaaagcttaatcaaaaagaatagccagtacagcatacaatctcagaaacttagaagcaagtagaaaataattggttgatgtaaacgaaagtgccattttagtaaaggcaggaaaaaaatagcaatatttgagttatgtaaggataaaaaatccactgacttgtatttttgcacaagaggctggtctgaatatgattgttcacattaagagtgtttattcgtcggttcattttggggattttcccccttgatgttttgacagattgaagtgagctttagtgagcaaaaggatcagaatgcagggaacactaagctgtgatgaagaaagtgtggtaaaaagccagagtagttttatacagacaaaaccagtgtcaggcctttgcagtaggcttgagtgaacttctgatctagatttgaaagtaaattttatgaagacattgcccatttttacttcctcattcattattgtaccagcatcatagctttattactctaatcccaggtaagtcaagcctacaatgccctagaggaagagtaaaaccagaaattcatgctggcttaaataatctatttttgtttcttttcatttgaatatttaaattttatggtttattaaaaaattaaataaa

SEQ ID NO: 104242 - protein, 360 aa, Artificial Sequence
  derived and/or modified sequence
MLSAAHDILSHKRTSGNQSHAVLLADILPTLVIKLLAPLGLHLLPYSPRVLVSGICAAGSFVLVAFSHSVGTSLCGVVFASISSGLGEVTFLSLTAFYPRAVISWWSSGTGGAGLLGALSYLGLTQAGLSPQQTLLSMLGIPALLLASYFLLLTSPEAQDPGGEEEAESAARQPLIRTEAPESKPGSSSSLSLRERWTVFKGLLWYIVPLVVVYFAEYFINQGLFELLFFWNTSLSHAQQYRWYQMLYQAGVFASRSSLRCCRIRFTWALALLQCLNLVFLLADVWFGFLPSIYLVFLIILYEGLLGGAAYVNTFHNIALETSDEHREFAMAATCISDTLGISLSGLLALPLHDFLCQLS

SEQ ID NO: 104243 - DNA, 1083 bp, Artificial Sequence
  derived and/or modified sequence
atgctgagcgccgcccacgacatcctgagccacaagagaaccagcggcaaccagagccacgccgtgctgctggccgacatcctgcccaccctggtgatcaagctgctggcccccctgggcctgcacctgctgccctacagccccagagtgctggtgagcggcatctgcgccgccggcagcttcgtgctggtggccttcagccacagcgtgggcaccagcctgtgcggcgtggtgttcgccagcatcagcagcggcctgggcgaggtgaccttcctgagcctgaccgccttctaccccagagccgtgatcagctggtggagcagcggcaccggcggcgccggcctgctgggcgccctgagctacctgggcctgacccaggccggcctgagcccccagcagaccctgctgagcatgctgggcatccccgccctgctgctggccagctacttcctgctgctgaccagccccgaggcccaggaccccggcggcgaggaggaggccgagagcgccgccagacagcccctgatcagaaccgaggcccccgagagcaagcccggcagcagcagcagcctgagcctgagagagagatggaccgtgttcaagggcctgctgtggtacatcgtgcccctggtggtggtgtacttcgccgagtacttcatcaaccagggcctgttcgagctgctgttcttctggaacaccagcctgagccacgcccagcagtacagatggtaccagatgctgtaccaggccggcgtgttcgccagcagaagcagcctgagatgctgcagaatcagattcacctgggccctggccctgctgcagtgcctgaacctggtgttcctgctggccgacgtgtggttcggcttcctgcccagcatctacctggtgttcctgatcatcctgtacgagggcctgctgggcggcgccgcctacgtgaacaccttccacaacatcgccctggagaccagcgacgagcacagagagttcgccatggccgccacctgcatcagcgacaccctgggcatcagcctgagcggcctgctggccctgcccctgcacgacttcctgtgccagctgagctag

SEQ ID NO: 104244 - DNA, 1083 bp, Artificial Sequence
  derived and/or modified sequence
atgttatcagcggcccacgatattctttcccacaagaggacaagtgggaaccagtcccacgccgtactgcttgccgacattcttcctactctggtcatcaaactgctcgccccactcgggctgcatctgttgccatactcccccagggtcttggtcagcggcatctgtgctgccgggtcctttgtcctagtggcgttctcacatagtgttggaacctccctctgcggcgtggttttcgccagcatttcgtccggcttgggcgaagtgacctttctctctcttaccgcgttttatccacgagccgtaattagctggtggtcttcaggtactggcggggccggcctgttaggtgccttaagctacctcggactgacacaagcaggactatcgccgcagcaaaccctgctgagcatgctgggcattcccgctcttttgcttgccagctattttttactactgacctccccggaggcacaggacccaggcggagaggaggaggcagaaagtgccgccaggcagcctctgataagaaccgaagcgcctgagtccaaacccgggagctcttcctctctgtccctgcgcgaacgatggacagtgttcaagggccttctgtggtacattgtgccacttgtggtggtgtatttcgcagagtacttcatcaatcagggcctgtttgaactgttgtttttctggaatacctcattgtcacacgcacagcaatacaggtggtatcagatgctttaccaggcaggagtgttcgcttcccgaagcagtctgaggtgctgccggattcggttcacttgggccctggctttgctgcaatgcctgaacctcgtattccttttagcggacgtgtggtttgggtttctcccctctatctatctcgttttcctgatcattctctatgagggcctgctgggaggcgcagcctatgtgaatacattccacaacatcgcattagagaccagcgacgagcaccgggagttcgcaatggcagctacctgcatatcagatacgctgggtataagcctttccggcttgttggctctaccactccatgactttctctgccaattgtcttag

SEQ ID NO: 104245 - DNA, 1083 bp, Artificial Sequence
  derived and/or modified sequence
atgctgtctgctgcccatgacatcctgagccacaagaggaccagcggcaaccagagccatgctgtgctgctggccgacatcctgcccaccctggtgatcaagctgctggcccccctgggcctgcacctgctgccctacagcccccgggtgctggtgtctggcatctgtgccgccggcagctttgtgctggtggccttcagccacagcgtgggcaccagcctgtgtggggtggtgtttgccagcatcagcagcggcctgggggaggtgaccttcctgagcctgacagccttctaccccagggctgtgatctcctggtggagcagcggcaccggcggggccggcctgctgggcgccctgagctacctgggcctgacccaggccggcctgagcccccagcagaccctgctgtccatgctgggcatcccagccctgctgctggccagctacttcctgctgctgaccagccctgaggcccaggaccctggaggagaggaggaggccgagagcgctgcccggcagcccctcatcagaacagaggcccctgagagcaagccaggcagcagcagcagcctgagcctgcgggagcgctggacagtgttcaagggcctgctgtggtacatcgtgcccctggtggtggtgtactttgctgagtacttcatcaaccagggcctgtttgagctgctcttcttctggaacaccagcctgagccacgcccagcagtaccgctggtaccagatgctgtaccaggccggcgtgtttgccagccgcagcagcctgcgctgctgccgcatccgcttcacctgggccctggccctgctgcagtgcctgaacctggtgttcctgctggctgatgtgtggtttggcttcctgcccagcatctacctggtgttcctgatcatcctgtatgagggcctgctgggcggggccgcctacgtgaacaccttccacaacatcgccctggagaccagtgatgagcaccgggagtttgccatggccgccacctgcatcagtgacaccctgggcatcagcctgagcggcctgctggccctgcccctgcatgacttcctgtgccagctgtcctag

SEQ ID NO: 104246 - DNA, 1083 bp, Artificial Sequence
  derived and/or modified sequence
atgctgagcgccgcccacgacatcctgagccacaagcggaccagcggcaatcagtctcatgcggtattacttgccgacatcttgccaactctcgttatcaaactcctggcaccactcggcctacatctgctgccttactcgcctcgagtgctggtaagcggcatctgcgctgccggctccttcgtactggttgcgttttcacattccgtggggacatcactgtgcggagtagtttttgcctctataagttcaggtttgggagaagtaacgttcctatcactgacggccttctatccccgtgccgtgatatcatggtggtcaagtggcaccggcggggccgggcttctgggcgcattatcgtacctgggactcacccaagcaggtctcagtccacaacaaacactgctcagtatgctggggatacctgcgctgcttttggcatcctattttctgttactgacgagtccagaagctcaggatcctgggggggaggaagaggccgaaagtgcagctagacagcccctgatcagaacggaggctccagagtccaaaccaggctcttcatcttcactctctctcagagaaaggtggacagtgttcaaggggctgttatggtacatcgttcccctagtcgtggtgtactttgcagaatattttattaatcaggggctgttcgagttgttattcttctggaatacctccttatctcacgcacagcaataccgctggtatcagatgctttaccaggccggcgtatttgcatccaggtcatcactgagatgctgccggatcagattcacttgggcactagcgctcctacagtgtttaaacctggtgttcctgttagccgacgtgtggtttgggtttctgccctccatctacctcgtgtttctgattattctttacgaaggccttctcggaggagcggcttacgtaaatacttttcataacatagcccttgagacctctgacgagcatcgggaattcgctatggccgctacttgtatctcagatacacttggaatctcattgtcgggattgttagccctacccctccacgacttcctctgtcaactgtcctag

SEQ ID NO: 104247 - DNA, 1083 bp, Artificial Sequence
  derived and/or modified sequence
atgttatctgctgcacacgacatactttctcacaaacgaacttctgggaaccaaagccacgccgtcctgttggctgacatcttacctactttagtcattaagcttttggcacctcttggcctccacttgttaccatattcaccaagagtgctcgtctcaggcatttgcgccgcaggcagctttgtgctcgtggcattttcccactcagtgggcacctccttgtgcggcgtcgttttcgcatccatttcctcaggcctgggcgaggtcacctttctatccctgaccgccttttaccctagggcagttattagctggtggtcgagtgggactggcggagcaggactgcttggcgcactgtcctatcttgggttaacacaggccggtctgtcaccccagcagactttgctgagcatgctcggaattccagccctgctgttggcatcctattttctgctacttacatcccctgaggcacaggacccgggaggcgaagaggaagctgagtccgctgcccgtcaaccgctgatccgcacggaggcacctgagtcgaaacccggaagcagctcctcgcttagtttgagggagcgatggaccgtgttcaaaggcctcctatggtacatagtcccgttggtggtggtctacttcgctgagtacttcattaatcaaggattatttgaactcctgtttttctggaacacatcactgtcccacgctcaacagtatagatggtatcagatgctgtaccaggccggagtatttgcctcccgctcctcactgcgctgttgccgcattcggtttacatgggccttggctctgctgcaatgtctgaacctggtgtttttgttggccgatgtatggtttggcttcctgccctccatctatctagtttttctaatcatcttatacgaaggtttgctgggaggcgcagcttatgtaaatacttttcacaatatcgcgctggaaaccagtgacgagcaccgggaattcgcaatggctgccacatgtatcagtgacacattgggtattagtctgtcaggcctcttggcacttccactgcacgatttcctgtgtcagttatcttag

SEQ ID NO: 104248 - protein, 384 aa, Artificial Sequence
  derived and/or modified sequence
MLSAAHDILSHKRTSGNQSHVDPGPTPIPHNSSSRFDCNSVSTAAVLLADILPTLVIKLLAPLGLHLLPYSPRVLVSGICAAGSFVLVAFSHSVGTSLCGVVFASISSGLGEVTFLSLTAFYPRAVISWWSSGTGGAGLLGALSYLGLTQAGLSPQQTLLSMLGIPALLLASYFLLLTSPEAQDPGGEEEAESAARQPLIRTEAPESKPGSSSSLSLRERWTVFKGLLWYIVPLVVVYFAEYFINQGLFELLFFWNTSLSHAQQYRWYQMLYQAGVFASRSSLRCCRIRFTWALALLQCLNLVFLLADVWFGFLPSIYLVFLIILYEGLLGGAAYVNTFHNIALETSDEHREFAMAATCISDTLGISLSGLLALPLHDFLCQLS

SEQ ID NO: 104249 - DNA, 1155 bp, Artificial Sequence
  derived and/or modified sequence
atgctgagcgccgcccacgacatcctgagccacaagagaaccagcggcaaccagagccacgtggaccccggccccacccccatcccccacaacagcagcagcagattcgactgcaacagcgtgagcaccgccgccgtgctgctggccgacatcctgcccaccctggtgatcaagctgctggcccccctgggcctgcacctgctgccctacagccccagagtgctggtgagcggcatctgcgccgccggcagcttcgtgctggtggccttcagccacagcgtgggcaccagcctgtgcggcgtggtgttcgccagcatcagcagcggcctgggcgaggtgaccttcctgagcctgaccgccttctaccccagagccgtgatcagctggtggagcagcggcaccggcggcgccggcctgctgggcgccctgagctacctgggcctgacccaggccggcctgagcccccagcagaccctgctgagcatgctgggcatccccgccctgctgctggccagctacttcctgctgctgaccagccccgaggcccaggaccccggcggcgaggaggaggccgagagcgccgccagacagcccctgatcagaaccgaggcccccgagagcaagcccggcagcagcagcagcctgagcctgagagagagatggaccgtgttcaagggcctgctgtggtacatcgtgcccctggtggtggtgtacttcgccgagtacttcatcaaccagggcctgttcgagctgctgttcttctggaacaccagcctgagccacgcccagcagtacagatggtaccagatgctgtaccaggccggcgtgttcgccagcagaagcagcctgagatgctgcagaatcagattcacctgggccctggccctgctgcagtgcctgaacctggtgttcctgctggccgacgtgtggttcggcttcctgcccagcatctacctggtgttcctgatcatcctgtacgagggcctgctgggcggcgccgcctacgtgaacaccttccacaacatcgccctggagaccagcgacgagcacagagagttcgccatggccgccacctgcatcagcgacaccctgggcatcagcctgagcggcctgctggccctgcccctgcacgacttcctgtgccagctgagctag

SEQ ID NO: 104250 - DNA, 1155 bp, Artificial Sequence
  derived and/or modified sequence
atgctatccgcagcacacgacattttgagtcataagcgtacatctggcaaccagtcccacgtcgatccaggacctacccccatccctcataacagctcgtctagatttgactgtaactccgtgtctacggccgctgtattactggcagacattctgcctacccttgtcattaagctgctggcccctttggggcttcacctgctgccctattcccccagagtactggtcagcggcatatgcgccgcaggctcgttcgtgctggtcgcatttagtcacagcgtcggcacctcgctttgtggagttgtttttgcctcaatttccagcggcctcggtgaggttacgtttctaagcctcaccgccttttacccccgggctgtgatctcttggtggtcatcgggcacgggaggagcaggcctgcttggcgctctgtcttacctagggctgactcaggctgggctcagcccccagcagacactcctcagtatgctggggatcccagccttactgctggcctcttacttccttttactgaccagtccagaggcacaggacccggggggtgaggaggaggcagagtcggccgccagacaaccattgatacgcactgaggcaccggagagcaagcccggctctagttccagtctgtctttgcgcgaaagatggactgttttcaagggtcttctctggtacattgttcccctagtggtggtgtattttgcagagtattttatcaatcaaggcctgttcgaactgttatttttttggaacacaagcttatctcacgcacagcaatacagatggtaccagatgctttaccaagcaggcgttttcgcttcccgatcatctttacgatgttgccgcatccggttcacctgggccctagccctgttgcagtgtctgaatctggtgttcctgttggccgacgtgtggtttggctttctgcctagcatctatttggtgttcctgattattctgtacgaaggacttcttggcggagctgcatacgtgaacaccttccacaatatcgcccttgagacctccgacgagcaccgagaattcgccatggccgccacctgtatttcagacaccctgggaatcagcctttctggacttctcgctttgcccctgcacgactttctgtgtcaattgtcttag

SEQ ID NO: 104251 - DNA, 1155 bp, Artificial Sequence
  derived and/or modified sequence
atgctgtctgctgcccatgacatcctgagccacaagaggaccagcggcaaccagagccacgtggaccccggccccacccccatcccccacaacagcagcagcagatttgactgcaacagcgtgtccacagctgctgtgctgctggccgacatcctgcccaccctggtgatcaagctgctggcccccctgggcctgcacctgctgccctacagcccccgggtgctggtgtctggcatctgtgccgccggcagctttgtgctggtggccttcagccacagcgtgggcaccagcctgtgtggggtggtgtttgccagcatcagcagcggcctgggggaggtgaccttcctgagcctgacagccttctaccccagggctgtgatctcctggtggagcagcggcaccggcggggccggcctgctgggcgccctgagctacctgggcctgacccaggccggcctgagcccccagcagaccctgctgtccatgctgggcatcccagccctgctgctggccagctacttcctgctgctgaccagccctgaggcccaggaccctggaggagaggaggaggccgagagcgctgcccggcagcccctcatcagaacagaggcccctgagagcaagccaggcagcagcagcagcctgagcctgcgggagcgctggacagtgttcaagggcctgctgtggtacatcgtgcccctggtggtggtgtactttgctgagtacttcatcaaccagggcctgtttgagctgctcttcttctggaacaccagcctgagccacgcccagcagtaccgctggtaccagatgctgtaccaggccggcgtgtttgccagccgcagcagcctgcgctgctgccgcatccgcttcacctgggccctggccctgctgcagtgcctgaacctggtgttcctgctggctgatgtgtggtttggcttcctgcccagcatctacctggtgttcctgatcatcctgtatgagggcctgctgggcggggccgcctacgtgaacaccttccacaacatcgccctggagaccagtgatgagcaccgggagtttgccatggccgccacctgcatcagtgacaccctgggcatcagcctgagcggcctgctggccctgcccctgcatgacttcctgtgccagctgtcctag

SEQ ID NO: 104252 - DNA, 1155 bp, Artificial Sequence
  derived and/or modified sequence
atgctgagcgccgcccacgacatcctgagccacaagcggaccagcggcaaccagagtcacgtggaccccggcccaacacccatcccccacaacagctcttcccgattcgactgcaacagcgtatcaacagccgctgttctattggccgacatcctccccaccctcgtcatcaaactactcgccccgttggggctccatctgctgccatattcaccacgggtgctcgtcagcggcatctgcgctgcaggctcatttgttcttgtagccttctcacatagcgtgggcacttccctgtgcggagtcgtgttcgctagtattagcagtggtttaggcgaggtcacatttctgagcttaaccgctttctatcctagggcagtgatttcttggtggtcatctggcactggaggtgccgggcttcttggcgctcttagctacctggggctcacgcaggcgggcctgagtccacagcagactctgttgagcatgctcggaatccctgccctgctactggcttcttacttcctcctgttgactagccccgaggcccaagatcccggaggagaagaagaagccgaaagtgctgcccgtcagcccttgatccggaccgaggctcccgaaagtaagcctggatcctcttcatcactatccctcagggagcgctggacagtctttaagggacttctttggtacatagtgcccctcgtggtagtttatttcgccgagtacttcattaatcaggggttgtttgaactattgttcttctggaacacatctctgtctcatgcccagcaatataggtggtaccagatgctttatcaggcaggcgtgttcgccagtcgcagctccctccgttgttgtcgtattcgttttacctgggctctcgcattgcttcaatgcctgaatttggtatttctgctggccgatgtatggttcggcttcctcccatctatttacttagtattcctcattattctctacgaggggctgctggggggagccgcctacgtgaacacgtttcacaatattgcgctggagacttccgacgaacacagagagttcgctatggccgccacatgcatctcggacacactcggcataagcctgtccggcctcctggcactccctctacacgatttcttatgtcagctgagctag

SEQ ID NO: 104253 - DNA, 1155 bp, Artificial Sequence
  derived and/or modified sequence
atgctctctgcagcccacgacatcctgagtcataaacggacgagcggcaatcagtcccatgtggacccgggtccgaccccaatccctcacaattccagcagccgatttgactgtaacagtgtgagtacagctgctgtgcttctggctgacatcctgcccactctggttataaagctgctggctcctttgggactgcaccttctgccttactctccaagggttctagtctcaggtatctgcgctgctgggtcatttgtgcttgtggcgttttctcatagtgttggtacctccctctgtggagttgtgtttgccagcatctcctccgggttaggtgaggtgacatttttaagtctgactgcgttttatcctcgggctgtgatttcttggtggtcatcagggaccgggggtgctgggttgctgggggcattatcctatttaggcctcacccaggctggcctgtctcctcagcaaacactgttaagcatgctcggtatccccgctttgctgttagcatcatactttttactgcttactagtcctgaagctcaggaccccggaggggaggaagaggccgaatctgcagctcgccagcccctgataagaaccgaggcacccgaatctaagcctggttcttcctcctctctttccctaagagagaggtggaccgtatttaagggtctgctctggtacatcgtgcccctcgtggtcgtttactttgccgaatattttataaaccaagggctgtttgagctcctgtttttctggaacacttctctcagccacgcacagcagtatcgctggtatcagatgctctaccaagcgggagtgttcgctagccgctcatccctgagatgctgtcggatacgcttcacttgggcactggccttacttcaatgtttgaatctggtgttcctgctggccgacgtttggttcggattcctccctagtatctatctcgtattccttattatactgtacgagggactcctcggcggagcagcctacgtgaatacctttcacaatattgccttggagacttctgatgagcacagggaattcgcaatggcagcaacgtgcatctcagacacgctgggcatttccttatcagggctgctggccctgcctcttcacgacttcctgtgtcagctcagttag

SEQ ID NO: 104254 - protein, 91 aa, Artificial Sequence
  derived and/or modified sequence
MTDDKDVLRDVWFGRIPTCFTLYQDEITEREAEPYYTDLTSFGPSIGNSWNILQKKMDFVISPLEYIRQRLKDLSFRSCFVLWLQMDSCTH

SEQ ID NO: 104255 - DNA, 276 bp, Artificial Sequence
  derived and/or modified sequence
atgaccgacgacaaggacgtgctgagagacgtgtggttcggcagaatccccacctgcttcaccctgtaccaggacgagatcaccgagagagaggccgagccctactacaccgacctgaccagcttcggccccagcatcggcaacagctggaacatcctgcagaagaagatggacttcgtgatcagccccctggagtacatcagacagagactgaaggacctgagcttcagaagctgcttcgtgctgtggctgcagatggacagctgcacccactag

SEQ ID NO: 104256 - DNA, 276 bp, Artificial Sequence
  derived and/or modified sequence
atgaccgacgacaaggacgtcctccgggatgtctggttcggtcgtattcctacgtgttttaccttgtatcaggacgaaataacggagcgtgaagcagaaccatattacaccgatttgacgagctttggccccagcatcgggaattcttggaatattcttcaaaaaaagatggacttcgtgatttcccctttagagtacataagacagcggctaaaagacctctcattccggagctgttttgtcctttggctgcaaatggatagctgcactcactag

SEQ ID NO: 104257 - DNA, 276 bp, Artificial Sequence
  derived and/or modified sequence
atgacagatgacaaggatgtgctgagagatgtgtggtttggccgcatccccacctgcttcaccctgtaccaggatgagatcacagagcgggaggccgagccctactacacagacctgaccagctttggccccagcatcggcaacagctggaacatcctgcagaagaagatggactttgtgatcagccccctggagtacatccggcagaggctgaaggacctgtccttccgcagctgctttgtgctgtggctgcagatggacagctgcacccactag

SEQ ID NO: 104258 - DNA, 276 bp, Artificial Sequence
  derived and/or modified sequence
atgaccgacgacaaggacgtgctgcgggacgtgtggttcggccggattccaacctgttttactctgtatcaggacgaaatcacggaaagggaggctgagccatattatacagatttaacatcctttgggccttctatcggcaattcctggaatatcctgcaaaagaagatggactttgtcatatctcctctggagtacattcgtcagcgtctgaaagacctttcttttcgctcatgctttgtgttgtggctgcagatggattcctgtacccactag

SEQ ID NO: 104259 - DNA, 276 bp, Artificial Sequence
  derived and/or modified sequence
atgacagacgacaaagatgttcttagggatgtgtggtttggtaggatccccacctgtttcacgctgtaccaggacgaaatcaccgaaagagaggctgaaccatactatacagatctgacctcttttggaccctctatcggcaattcatggaatatcctgcagaagaagatggatttcgtgatttccccgttagaatacatcagacagcgtctcaaagatcttagttttcgatcttgctttgtgctctggctgcagatggactcttgtacacactag

SEQ ID NO: 104260 - protein, 478 aa, Artificial Sequence
  derived and/or modified sequence
MDGKPATRKGPDFCSLRYGLALIMHFSNFTMITQRVSLSIAIIAMVNTTQQQGLSNASTEGPVADAFNNSSISIKEFDTKASVYQWSPETQGIIFSSINYGIILTLIPSGYLAGIFGAKKMLGAGLLISSLLTLFTPLAADFGVILVIMVRTVQGMAQGMAWTGQFTIWAKWAPPLERSKLTTIAGSGSAFGSFIILCVGGLISQALSWPFIFYIFGSTGCVCCLLWFTVIYDDPMHHPCISVREKEHILSSLAQQPSSPGRAVPIKAMVTCLPLWAIFLGFFSHFWLCTIILTYLPTYISTLLHVNIRDSGVLSSLPFIAAASCTILGGQLADFLLSRNLLRLITVRKLFSSLGLLLPSICAVALPFVASSYVITIILLILIPGTSNLCDSGFIINTLDIAPRYASFLMGISRGFGLIAGIISSTATGFLISQDFESGWRNVFFLSAAVNMFGLVFYLTFGQAELQDWAKERTLTRL

SEQ ID NO: 104261 - DNA, 1437 bp, Artificial Sequence
  derived and/or modified sequence
atggacggcaaaccggccactcgtaagggccccgatttctgctccctgcgctacgggcttgcactgattatgcacttctctaattttaccatgatcactcagcgtgtatccctgagcattgccattatcgctatggttaatacaacacagcagcaaggtctctccaatgcttccacagaggggccagtcgctgacgcctttaacaattcctctatttctatcaaagagttcgatacaaaggcttctgtgtatcagtggtctccagaaacacaagggatcattttcagctccatcaactatggaatcatcctgacgctaatccccagcggatacctggctgggatttttggcgctaaaaagatgctgggagccgggctcctgatctccagcttattgacactctttaccccgctggcagcggacttcggggttatactggtaatcatggttcggacggtgcagggaatggcccagggcatggcctggaccggccagttcactatttgggccaagtgggccccccctttggaaaggagtaagctgactactatcgccggaagcggctcagcttttggctctttcatcatactgtgcgttggggggctcattagccaagcactgagttggccgttcattttctatatctttggctccactggatgtgtctgttgtttgctctggtttacagtgatatacgacgatcctatgcatcatccttgcatttctgtcagggagaaagagcacattctcagctccttggcccagcaaccgtcaagtcctgggagggccgtcccgattaaagcgatggtgacttgtttgcccctttgggctatcttccttggattcttttctcatttttggctttgcaccatcatactaacctaccttcccacgtacattagcaccttgttacatgtgaacattcgggattcaggcgttctctctagccttcctttcatcgctgctgcttcgtgtaccatccttggaggacagctggccgatttcctcctcagtcgcaacttactgcggctgataacagtgcgcaagctatttagcagtctgggactgttactgccttcaatctgtgctgtggcccttccgtttgtggccagctcctacgtcattacaattattctgttgatcctaatacctggtacttcaaacctttgtgatagcggcttcattattaacaccctggatatcgcaccaagatatgcatcatttctcatggggatctcgaggggctttggactgatcgctgggattataagcagcacagccacaggcttcctgattagtcaagactttgaaagtgggtggcgaaacgtcttttttctgtcggcagcggtgaacatgtttggactggtgttttatttgaccttcggtcaggccgaactgcaggattgggcaaaagagaggaccctcacccgtctctag

SEQ ID NO: 104262 - DNA, 1437 bp, Artificial Sequence
  derived and/or modified sequence
atggatggcaagccagccaccaggaaaggaccagacttctgcagcctgcgctatggcctggccctgatcatgcacttcagcaacttcaccatgatcacccagagggtgtccctgagcatcgccatcatcgccatggtgaacaccacccagcagcagggcctgagcaatgccagcacagagggccctgtggctgatgccttcaacaacagcagcatcagcatcaaggagtttgacaccaaggcctctgtgtaccagtggagccctgagacccagggcatcatcttcagcagcatcaactacggcatcatcctgaccctcatccccagcggctacctggccggcatctttggagccaagaagatgctgggcgccggcctgctgatcagcagcctgctgaccctcttcacccccctggccgctgactttggagtcatcctggtgatcatggtgaggacagtgcagggcatggcccagggcatggcctggacaggccagttcaccatctgggccaagtgggccccacccctggagaggagcaagctgaccaccatcgccggcagcggcagcgccttcggcagcttcatcatcctgtgtgtgggcggcctcatcagccaggccctgtcctggcccttcatcttctacatcttcggcagcacaggctgtgtgtgctgcctgctgtggttcaccgtcatctatgatgaccccatgcaccacccctgcatctctgtgcgggagaaggagcacatcctgagcagcctggcccagcagcccagcagccctggccgggctgtgcccatcaaggccatggtgacctgcctgcccctgtgggccatcttcctgggcttcttcagccacttctggctgtgcaccatcatcctgacctacctgcccacctacatcagcaccctgctgcacgtgaacatccgggacagcggcgtgctgagcagcctgcccttcatcgccgccgccagctgcaccatcctgggcggccagctggccgacttcctgctgagcaggaacctgctgcggctcatcaccgtgaggaagctgttcagcagcctgggcctgctgctgcccagcatctgtgctgtggccctgccctttgtggccagcagctatgtgatcaccatcatcctgctgatcctgatccctggcaccagcaacctgtgtgacagcggcttcatcatcaacaccctggacatcgcccccaggtatgccagcttcctgatgggcatcagccggggcttcggcctgattgctggcatcatcagcagcacagccaccggcttcctgatcagccaggactttgagagcggctggagaaatgtgttcttcctgtctgctgctgtgaacatgtttggcctggtgttctacctgaccttcggccaggccgagctgcaggactgggccaaggagaggaccctgacccggctgtag

SEQ ID NO: 104263 - DNA, 1437 bp, Artificial Sequence
  derived and/or modified sequence
atggacggcaagcccgccacccggaagggccccgacttctgcagcctgcgctacggcctagctttaattatgcatttttccaactttacaatgataacccagagggtctcgttgtctatcgccatcattgctatggtgaataccacacagcaacaagggcttagcaacgcaagcaccgaggggccagttgccgacgcttttaacaactcttctatctctataaaagaatttgacacaaaggcgagtgtttaccagtggagtcccgagacccaaggaatcatcttttctagcattaactacggcattatccttaccctcattccatcaggctacctggccggcatcttcggggccaagaaaatgctgggggctggccttctcatcagcagcttgctgacactgtttactcccttggccgctgactttggcgtgattctggttattatggttagaacagtacagggtatggcgcaggggatggcctggacagggcagttcacaatttgggccaagtgggcaccacctctcgagcgctccaagctcaccaccatcgccggttcggggtccgcatttggaagtttcatcatactgtgtgtgggagggctgatcagccaggcactgtcctggcctttcatattttatatctttggctctaccggctgtgtgtgctgtctgctgtggtttacagtaatctacgatgatccaatgcatcacccatgcataagtgtccgcgagaaagagcacatcttgagtagcttggcccagcagccttcatcacccggtcgggcagtgccaattaaggctatggtgacatgcctccccctgtgggccatctttctgggatttttctcccatttctggttatgcacaataatactgacatatctgccaacctacattagcactctgctccacgtgaatatcagagactcgggcgtgctgagcagcttaccctttatcgcggcagcctcatgcaccattctggggggacaacttgccgacttcctgctgagtcgcaacctgctacgattgatcacggtgcgcaaactgttcagcagcctgggcctgttacttccaagtatctgcgctgtggccctcccttttgttgcttcgagttacgtgatcaccatcatattattaatcctcatccctgggacgtcaaacctgtgtgactcaggttttattatcaataccctggatatcgcacctcgttatgccagcttcctgatgggaatctctcgtggttttggtcttattgcagggataataagctctaccgcaacagggttcctgatctctcaggacttcgaatccggatggaggaacgttttctttctgtctgcggctgtaaatatgtttggcttagttttttacctcacatttggacaagcggaactgcaggactgggctaaggagaggacattgaccagactttag

SEQ ID NO: 104264 - DNA, 1437 bp, Artificial Sequence
  derived and/or modified sequence
atggacgggaagcctgccacacgcaaaggccctgatttctgctccttgagatacggcctggccctgatcatgcattttagtaactttacaatgatcacccagagggtgagtctctcgatcgcgattattgctatggtgaatactacgcaacaacagggattgagcaacgctagtacagaggggcctgtggccgacgcgtttaacaactctagtatatcaattaaagaattcgacacaaaagcctctgtgtaccagtggtcacccgagacccagggcatcatcttcagcagcatcaactatggcattattttaaccttgattccaagcggctatcttgcgggtattttcggagctaagaagatgctgggggctggactgctcatcagttctcttttgacgctgtttaccccccttgcggctgatttcggtgtgattctggtcatcatggttcggactgtgcagggaatggcgcagggaatggcatggacaggacagtttaccatatgggctaaatgggcacctccgctcgagcgctctaaactgaccacaatcgctggctccggcagcgcgttcggaagctttattattctttgtgttgggggtctgatttcacaagccctatcctggccttttattttctacatattcggaagtacagggtgtgtttgttgtctgttatggttcacagttatttacgacgacccgatgcaccatccctgtattagcgtgcgagagaaggagcacattcttagtagccttgcacagcaaccaagctcaccaggcagggccgttccaatcaaggctatggtgacttgcctgcccctttgggcaattttcctgggctttttttcgcacttctggctttgtaccatcatccttacctaccttcctacatacatcagcactctgcttcacgtgaatatcagagatagtggcgttctctcctctcttcccttcatagcagcagcctcgtgtacaatcctgggagggcagctcgccgattttctgttgagccggaacttgcttcggctaatcactgttcggaaactgttcagcagcttgggcctgttacttccctccatctgtgcagtggctctgccttttgttgcttcctcttatgtgataacgatcattttgcttatcttaataccaggcacctccaatctgtgcgatagcggattcatcatcaataccctggatatcgctcccaggtacgcaagctttctcatgggcatttctagaggattcggcctcatcgccggtattatctccagcacggccacgggctttttaatctctcaagactttgagtccggttggcgcaatgtgtttttcctgtcagccgcagtgaatatgtttggtttggtgttttatttaacatttggacaagctgagctgcaggattgggctaaagagcgtactctgacaaggctatag

SEQ ID NO: 104265 - DNA, 2525 bp, Artificial Sequence
  derived and/or modified sequence
gccgaggctttctgagaaagtggggccaaacctgttgccgtctgactgccacgtggctcactatttatccctgtaaaaatctgcaaaagtatttgaaagggaagaagggacagaaaactccctccttttccaagttagccttatagtctagggcttaaaatactggtttaatggtgaaggtaagtgcttttcttctttttgggtagaaggattattactaacttaccaaaggtccattaaggggagggaacagttttaggagaagtcagagaaaagacattaacagcaacataaggatctccatctggtaatattgcctaattccaaaatgaagagactctctgaaaaagataactgattcaatgaagaccctagggcaaggcttgagaagccactggtaccaatggacactgtggacaatggtcatttctccaaggacgctataaaagactgtcgtagtaaaagagattcagggcacagggaaactccaccacaaagcgtggtaccatttcccacagaagctaaatggacgggaagcctgccaccaggaaaggtccagatttctgttcattacgctatgggctggctcttatcatgcacttctcaaacttcaccatgataacgcagcgtgtgagtctgagcattgcgatcatcgccatggtgaacaccactcagcagcaaggtctatctaatgcctccactgaggggcctgttgcagatgccttcaataactccagcatatccatcaaggaatttgatacaaaggcctctgtgtatcaatggagcccagaaactcagggtatcatctttagctccatcaactatgggataatactgactctgatcccaagtggatatttagcagggatatttggagcaaaaaaaatgcttggtgctggtttgctgatctcttcccttctcaccctctttacaccactggctgctgacttcggagtgattttggtcatcatggttcggacagtccagggcatggcccagggaatggcatggacaggtcagtttactatttgggcaaagtgggctcctccacttgaacgaagcaagctcaccaccattgcaggatcagggtcagcatttggatccttcatcatcctctgtgtggggggactaatctcacaggccttgagctggccttttatcttctacatctttggtagcactggctgtgtctgctgtctcctatggttcacagtgatttatgatgaccccatgcatcacccgtgcataagtgttagggaaaaggagcacatcctgtcctcactggctcaacagcccagttctcctggacgagctgtccccataaaggcgatggtcacatgcctaccactttgggccattttcctgggttttttcagccatttctggttgtgcaccatcatcctaacatacctaccaacgtatatcagtactctgctccatgttaacatcagagatagtggagttctgtcctccctgccttttattgctgctgcaagctgtacaattttaggaggtcagctggcagatttccttttgtccaggaatcttctcagattgatcactgtgcgaaagctcttttcatctcttgggctcctccttccatcaatatgtgctgtggccctgccctttgtggcctccagttacgtgataaccattattttgctgatacttattcctgggaccagtaacctatgtgactcagggtttatcatcaacaccttagatatcgcccccagatatgcaagtttcctcatgggaatctcaaggggatttgggctcatcgcaggaatcatctcttccactgccactggattcctcatcagtcaggattttgagtctggttggaggaatgtctttttcctgtctgctgcagtcaacatgtttggcctggtcttttacctcacgtttggacaagcagaacttcaagactgggccaaagagaggacccttacccgcctctgaggacataaagttacaaacttaaatgtggtactgagcatgaactttttaaacattttttacttctctccatattcctgaccatagactcagcagttcttaactctggctgtgtgttagtcttccctggggagcctttataagacactgatacttgggacccactccagagattctgaatgaattggtctggggtggaacccagatactactaatttttagatactccttagaggtttctagcatgcgcccggggttgacaacagctggacaaacttgaaaagtcaattcatgtggcctttgaattttcctcattggaaagtactaaataaataaaaattcatgtgaaaatgatcactgataaatatcttcatggtggggcaggttattggatgcagagaagatctgctcggaattgtagccatatgttacagatctcagcaccgatcggaactgtaaagctataatccccagaattaaagtttttattattttttatacattgtaaaacatagacgtttatttatgtgattaaattctattaaaatttacatgctaaaataaaa

SEQ ID NO: 104266 - DNA, 1437 bp, Artificial Sequence
  derived and/or modified sequence
atggacggcaagcccgccaccagaaagggccccgacttctgcagcctgagatacggcctggccctgatcatgcacttcagcaacttcaccatgatcacccagagagtgagcctgagcatcgccatcatcgccatggtgaacaccacccagcagcagggcctgagcaacgccagcaccgagggccccgtggccgacgccttcaacaacagcagcatcagcatcaaggagttcgacaccaaggccagcgtgtaccagtggagccccgagacccagggcatcatcttcagcagcatcaactacggcatcatcctgaccctgatccccagcggctacctggccggcatcttcggcgccaagaagatgctgggcgccggcctgctgatcagcagcctgctgaccctgttcacccccctggccgccgacttcggcgtgatcctggtgatcatggtgagaaccgtgcagggcatggcccagggcatggcctggaccggccagttcaccatctgggccaagtgggccccccccctggagagaagcaagctgaccaccatcgccggcagcggcagcgccttcggcagcttcatcatcctgtgcgtgggcggcctgatcagccaggccctgagctggcccttcatcttctacatcttcggcagcaccggctgcgtgtgctgcctgctgtggttcaccgtgatctacgacgaccccatgcaccacccctgcatcagcgtgagagagaaggagcacatcctgagcagcctggcccagcagcccagcagccccggcagagccgtgcccatcaaggccatggtgacctgcctgcccctgtgggccatcttcctgggcttcttcagccacttctggctgtgcaccatcatcctgacctacctgcccacctacatcagcaccctgctgcacgtgaacatcagagacagcggcgtgctgagcagcctgcccttcatcgccgccgccagctgcaccatcctgggcggccagctggccgacttcctgctgagcagaaacctgctgagactgatcaccgtgagaaagctgttcagcagcctgggcctgctgctgcccagcatctgcgccgtggccctgcccttcgtggccagcagctacgtgatcaccatcatcctgctgatcctgatccccggcaccagcaacctgtgcgacagcggcttcatcatcaacaccctggacatcgcccccagatacgccagcttcctgatgggcatcagcagaggcttcggcctgatcgccggcatcatcagcagcaccgccaccggcttcctgatcagccaggacttcgagagcggctggagaaacgtgttcttcctgagcgccgccgtgaacatgttcggcctggtgttctacctgaccttcggccaggccgagctgcaggactgggccaaggagagaaccctgaccagactgtag

SEQ ID NO: 104267 - protein, 645 aa, Artificial Sequence
  derived and/or modified sequence
MEYASGGEVFDYLVAHGRMKEKEARAKFRQIVSAVQYCHQKYIVHRDLKAENLLLDGDMNIKIADFGFSNEFTVGNKLDTFCGSPPYAAPELFQGKKYDGPEVDVWSLGVILYTLVSGSLPFDGQNLKELRERVLRGKYRIPFYMSTDCENLLKKLLVLNPIKRGSLEQIMKDRWMNVGHEEEELKPYTEPDPDFNDTKRIDIMVTMGFARDEINDALINQKYDEVMATYILLGRKPPEFEGGESLSSGNLCQRSRPSSDLNNSTLQSPAHLKVQRSISANQKQRRFSDHAGPSIPPAVSYTKRPQANSVESEQKEEWDKDVARKLGSTTVGSKSEMTASPLVGPERKKSSTIPSNNVYSGGSMARRNTYVCERTTDRYVALQNGKDSSLTEMSVSSISSAGSSVASAVPSARPRHQKSMSTSGHPIKVTLPTIKDGSEAYRPGTTQRVPAASPSAHSISTATPDRTRFPRGSSSRSTFHGEQLRERRSVAYNGPPASPSHETGAFAHARRGTSTGIISKITSKFVRRSTSGEPKERDKEEGKDSKPRSLRFTWSMKTTSSMDPNDMMREIRKVLDANNCDYEQKERFLLFCVHGDARQDSLVQWEMEVCKLPRLSLNGVRFKRISGTSIAFKNIASKIANELKL

SEQ ID NO: 104268 - DNA, 1938 bp, Artificial Sequence
  derived and/or modified sequence
atggagtacgcatccggcggggaggtgttcgattatctagttgcccacggaaggatgaaggaaaaggaagctcgggctaagtttcgccagatcgtgtccgccgttcagtactgccatcagaagtatatcgtgcacagagatctgaaggccgaaaatttgctccttgatggagatatgaacatcaaaatcgctgacttcggatttagtaatgagttcacagtcggaaacaagttggacactttctgtgggtcccccccttatgctgctcccgaactgttccaggggaaaaagtatgatggacccgaggttgacgtatggtctctcggagtgattctctatactctcgtgtccggatcccttccattcgatggacagaatctgaaggaattgcgtgaacgggtgctacgggggaagtaccggatccccttttatatgtccacagactgtgagaacttgctgaaaaaacttctggtgctcaatccaatcaagcgcggttcactggagcaaattatgaaggaccgttggatgaacgtgggccacgaagaagaggaattgaaaccctacaccgagccagaccctgatttcaacgacacaaaacgcatagacataatggttacaatgggcttcgccagggacgagattaacgatgctctgatcaaccagaagtacgacgaagtgatggcaacatacattctcctaggccgcaagccccctgagttcgaggggggcgaaagcttgagtagcgggaacctctgtcagagaagccgtccaagtagtgacttaaataacagcactttgcagtcccccgcgcatctgaaggtacagcggtctatctctgccaaccagaagcaaagaagattttcagaccatgctgggcctagtatcccaccagctgtaagctacaccaagcggcctcaggccaactccgttgagtccgaacaaaaagaagagtgggacaaggacgtggcccggaaactcggctcgactacagtcggctcaaaatctgagatgaccgcttctcccctggtcggtcccgaaaggaagaagagcagtaccattccaagcaacaatgtctactctggtggcagcatggcccgaaggaatacctatgtatgcgaacggaccactgacagatatgtggccctccagaacgggaaggacagttccctcacggaaatgtcagtgtcctctatctcctcagccggaagttccgtcgcttctgcagttccttccgcccggcccagacaccagaaatcgatgtctacatctggccaccccataaaggtcaccctgccgactatcaaggatggatctgaggcatacagaccagggacaacccaaagggtgcccgctgccagcccaagtgctcatagcatatccacagccaccccggacagaacccggtttcctagagggagttcaagtcgcagtaccttccacggcgaacaactaagggagcgacggagtgtggcatataacgggccgccagcctctccctcacatgagacaggagcatttgctcatgccagaaggggcacctcaacaggtataatctctaagattacatccaagttcgtgagaagatcaactagtggggagcctaaggagagggacaaggaggaggggaaggattctaaaccccgatcgctgcgttttacctggtccatgaaaaccacgtctagcatggatccaaatgatatgatgcgcgagatcagaaaggttctagatgccaacaattgcgattacgagcaaaaagagcgtttcctgctcttctgcgtgcacggcgacgccaggcaggatagtcttgtccagtgggagatggaggtgtgcaagctgccacgattatctctcaacggggttcgatttaagcgcatcagtggcacatctatagcctttaagaacatcgcttcgaaaatcgcgaacgaactgaaactctag

SEQ ID NO: 104269 - DNA, 1938 bp, Artificial Sequence
  derived and/or modified sequence
atggagtatgccagcggcggggaggtgtttgactacctggtggcccacggccgcatgaaggagaaggaggcccgggccaagttccggcagatcgtgtctgctgtgcagtactgccaccagaagtacatcgtgcaccgggacctgaaggccgagaacctgctgctggatggagacatgaacatcaagattgctgactttggcttcagcaatgagttcaccgtgggcaacaagctggacaccttctgtggcagccccccctatgctgcccctgagctgttccagggcaagaagtatgatggccctgaggtggatgtgtggagcctgggcgtcatcctgtacaccctggtgtctggcagcctgccctttgatggccagaacctgaaggagctgcgggagcgggtgctgcggggcaagtaccgcatccccttctacatgagcacagactgtgagaacctgctgaagaagctgctggtgctgaaccccatcaagaggggcagcctggagcagatcatgaaggaccgctggatgaatgtgggccacgaggaggaggagctgaagccctacacagagccagaccctgacttcaatgacaccaagagaattgacatcatggtgaccatgggctttgccagagatgagatcaatgatgccctgatcaaccagaagtatgatgaggtgatggccacctacatcctgctgggcaggaagcccccagagtttgagggcggggagagcctgagcagcggcaacctgtgccagaggagccggcccagcagtgacctgaacaacagcaccctgcagagccctgcccacctgaaggtgcagaggagcatcagcgccaaccagaagcagaggcgcttcagtgaccatgctggccccagcatccccccagctgtgtcctacaccaagaggccccaggccaacagcgtggagagcgagcagaaggaggagtgggacaaggatgtggccaggaagctgggcagcaccaccgtgggcagcaagtctgagatgacagccagccccctggtgggccctgagaggaagaagagcagcaccatccccagcaacaacgtgtacagcggcggctccatggcccggaggaacacctacgtgtgtgagaggaccacagacagatatgtggccctgcagaatggcaaggacagcagcctgacagagatgtctgtgagcagcatcagcagcgctggcagctctgtggccagcgctgtgcccagcgcccggcccaggcaccagaagtccatgagcaccagcggccaccccatcaaggtgaccctgcccaccatcaaggatggcagcgaggcctacagacctggcaccacccagagggtgcctgctgccagccccagcgcccacagcatcagcacagccaccccagacaggacccgcttcccccggggcagcagcagccgcagcaccttccacggggagcagctgcgggagaggagatctgtggcctacaatggacctccagccagccccagccatgaaacaggagcctttgcccacgcccggcggggcaccagcacaggcatcatcagcaagatcaccagcaagtttgtgagaagaagcaccagcggggagcccaaggagcgggacaaggaggagggcaaggacagcaagcccaggagcctgcgcttcacctggagcatgaagaccaccagctccatggaccccaatgacatgatgagggagatcaggaaggtgctggatgccaacaactgtgactatgagcagaaggagcgcttcctgctcttctgtgtgcatggagatgcccggcaggacagcctggtgcagtgggagatggaggtgtgcaagctgccccggctgagcctgaatggagtgcgcttcaagaggatcagcggcaccagcatcgccttcaagaacatcgccagcaagatcgccaatgagctgaagctgtag

SEQ ID NO: 104270 - DNA, 5230 bp, Artificial Sequence
  derived and/or modified sequence
ggcgcggcggcggcggtggctgtgaccgcgcggaccgagccgagacattcgcgccgggggatcgggcgccgccgccgctgggccccgggcgcgtggatgcggctgggtcgggcggcgccgtacacctgaggcggagaacggggcgcggcgcgggtgacgctgtcagggccgcggttcctgacgcccaggcgctcgccaggacgagccaggcagtgatttgaggcaccggcttcaccttcacccatggtccggagagcctagcggggctcgccaccgcctcccggctccccttccacgcctcatcctgccagcctcgccgccccgccagcgccgggcaaccgcctcgcccgaagccctccctcgttactgtccgcataccccggcggcgccgccgcgggaagcggctccccctcctcttcctccgcgtcctcttccctctttcccccgccggggccgcttgttgcaccgccccgcggcctgcgggagccgctcgccccggccttgtgctcgcgtccgcacccctttcctgtcgccccccggggcccgcaccacagcccggccggcgagaccccggccagaccccgctgcccgcacaaaatgtcggcccggacgccattgccgacggtgaacgagcgggacacggaaaatcatacatctgtggatggatatactgaaccacacatccagcctaccaagtcgagtagcagacagaacatcccccggtgtagaaactccattacgtcagcaacagatgaacagcctcacattggaaattaccgtttacaaaaaacaatagggaagggaaattttgccaaagtcaaattggcaagacacgttctaactggtagagaggttgctgtgaaaataatagacaaaactcagctaaatcctaccagtctacaaaagttatttcgagaagtacgaataatgaagatactgaatcatcctaatatagtaaaattgtttgaagttattgaaacagagaagactctctatttagtcatggaatacgcgagtgggggtgaagtatttgattacttagttgcccatggaagaatgaaagagaaagaggcccgtgcaaaatttaggcagattgtatctgctgtacagtattgtcatcaaaagtacattgttcaccgtgatcttaaggctgaaaaccttctccttgatggtgatatgaatattaaaattgctgactttggttttagtaatgaatttacagttgggaacaaattggacacattttgtggaagcccaccctatgctgctcccgagcttttccaaggaaagaagtatgatgggcctgaagtggatgtgtggagtctgggcgtcattctctatacattagtcagtggctccttgcctttcgatggccagaatttaaaggaactgcgagagcgagttttacgagggaagtaccgtattcccttctatatgtccacagactgtgaaaatcttctgaagaaattattagtcctgaatccaataaagagaggcagcttggaacaaataatgaaagatcgatggatgaatgttggtcatgaagaggaagaactaaagccatatactgagcctgatccggatttcaatgacacaaaaagaatagacattatggtcaccatgggctttgcacgagatgaaataaatgatgccttaataaatcagaagtatgatgaagttatggctacttatattcttctaggtagaaaaccacctgaatttgaaggtggtgaatcgttatccagtggaaacttgtgtcagaggtcccggcccagtagtgacttaaacaacagcactcttcagtcccctgctcacctgaaggtccagagaagtatctcagcaaatcagaagcagcggcgtttcagtgatcatgctggtccatccattcctcctgctgtatcatataccaaaagacctcaggctaacagtgtggaaagtgaacagaaagaggagtgggacaaagatgtggctcgaaaacttggcagcacaacagttggatcaaaaagcgagatgactgcaagccctcttgtagggccagagaggaaaaaatcttcaactattccaagtaacaatgtgtattctggaggtagcatggcaagaaggaatacatatgtctgtgaaaggaccacagatcgatacgtagcattgcagaatggaaaagacagcagccttacggagatgtctgtgagtagcatatcttctgcaggctcttctgtggcctctgctgtcccctcagcacgaccccgccaccagaagtccatgtccacttctggtcatcctattaaagtcacactgccaaccattaaagacggctctgaagcttaccggcctggtacaacccagagagtgcctgctgcttccccatctgctcacagtattagtactgcgactccagaccggacccgttttccccgagggagctcaagccgaagcactttccatggtgaacagctccgggagcgacgcagcgttgcttataatgggccacctgcttcaccatcccatgaaacgggtgcatttgcacatgccagaaggggaacgtcaactggtataataagcaaaatcacatccaaatttgttcgcagaagtacatcaggggaaccaaaagaaagagacaaggaagagggtaaagattctaagccgcgttctttgcggttcacatggagtatgaagaccactagttcaatggaccctaatgacatgatgagagaaatccgaaaagtgttagatgcaaataactgtgattatgagcaaaaagagagatttttgcttttctgtgtccatggagacgctagacaggatagcctcgtgcagtgggagatggaagtctgcaagttgccacgactgtcacttaatggggttcgcttcaagcgaatatctgggacatctattgcctttaagaacattgcatcaaaaatagcaaatgagcttaagctgtaaagaagtccaaatttacaggttcagggaagatacatacatatatgaggtacagtttttgaatgtactggtaatgcctaatgtggtctgcctgtgaatctccccatgtagaatttgcccttaatgcaataaggttatacatagttatgaactgtaaaattaaagtcagtatgaactataataaatatctgtagcttaaaaagtaggttcacatgtacaggtaagtatattgtgtatttctgttcattttctgttcatagagttgtataataaaacatgattgcttaaaaacttgtatagttgtctagatttctgcacctgaatgtatgtttgatgctttgatttgaaaatgttcttccctgttatttacattctggtgggtttttaaaattcttacctccatcatgcaattttgaaaattgtgtccagaattaaaagtgcatagaaatagcctttacaattgtagcatggacctttaaaaattgttttaaaatcttatttaaatttaaaccagaagctgaaaaatagatcagctttattatacacaaaattattactgcttatctttgctcttttccttgttatcccgcaaggtttagttgagaagatacaaaatgtttacagtgttggcacttagagtttttaaattcaagtacatgaaattcagtaatagcattgccttgagctaactaggaagtaccgggaaaaaagttaaatctacatcaagtttcttttgaactttgaagtgttttctgacccactgctaactgtagcaacaaaatttaaaagaaaaaaaacatactttatctggctattataacataaactgtcacgtaggtttgctgccttcagaataccgcaatttaattgcgggaatataataatattgggactgtttcacagcacaaactcatctttacagtgttgatcaatgcatcagttaagaaataatgccacctcaggaattaactggcattgggaacatttgcctcattctcctgctatcctcttcattcacccctgccactgtaatatctataagtacttaagagacttgtgagcaaaacatactatttataacagtatatgattgatttatgcttatgtggttgttcagtttgttcccatgtaactcgtttgttttaaatattttgccagatttcttgtatttattccacatcattatgcctataatgtgccgctttgtgattgggcatttgcctacttttctttcataattagtgatatatgcgatgtaaaaccactagtaaaggtacattttaatacttgttattttatactgaattagccttggaggttgactgtgcaatgttatttactgttgtaattactgtaataccaacatatgggccccatctgcacactcctgaaaaacagaaagtgtattcaaattttatcagtttaaagaaaataaagctgtgataaatactgtaattccaacctacattagaaggtctaagtgtaggtgatgtgccattccataatggcttccagactagggtgaattttatgttctgtactgtactgtgatgtagctttcttctgtaacagttatgttttaaaattaagtgagttttttttttgccttagcaaagggtggtgtttgaaaaaaaaaatgtgtagcccctttttaacctagtgttcattcaaaaaaaaattgatgcaaatctttattcactttcactggtgcacactgaaattttacttgaacagttctcataataaagcacttgtcttttgctctttatcagaatgtgaattacctgttttctggtacaaaagtattctgtatgaggagtttattgtatgtgttctaaatttagttggcaaagggtgaagctgtgaaggttttcaagattattgaaactatgaaggtttcttgtcattatgacaagaaagtttaatctttttataggaattcctgtcactgaaatacgtttttaaaaaaatagactcatgtgttttccacggtagaaactgatatttttttacattttctcactgtggccaactcttctgtgtttgtagaaaggaatttgacttcaatatcttttatgaactaaaaatgaaatcttgatactcactttagatttttcattttatgtgttcatgacaacataaatatttttcaaagatttagaggaattttgcaatgtgtttgcataaataaataccagtttatgttcaccggctatgtgataccaggatttccttggcttctgttgaaatattatttgatatgacatcccttatattaaattaattattttgt

SEQ ID NO: 104271 - DNA, 1938 bp, Artificial Sequence
  derived and/or modified sequence
atggagtacgccagcggcggcgaggtgttcgactacctggtggcccatggcagaatgaaggagaaggaggcccgagctaagtttcggcagattgtctcagctgtgcaatattgtcaccaaaaatacatagttcatcgcgacttgaaagctgaaaatttgcttctcgacggcgacatgaatatcaagattgcagatttcggtttctccaatgagttcacggtgggcaataagctggacactttctgtgggtcaccaccttacgcagcccccgaactctttcagggcaaaaaatatgatgggccagaggtggatgtgtggtctctgggagtaatcctttacactttggtgtcagggtctctgccctttgatggccagaatttaaaagagctgcgtgagcgtgtcctgcgtggcaagtaccgaatccccttttacatgtctacagactgcgaaaacctgttgaaaaagttactggtgcttaatcctattaagcgaggctccctggaacagatcatgaaagaccgctggatgaacgtgggacatgaagaggaggagctgaaaccttatacggaacccgatccagattttaacgatacgaagagaatcgacattatggtaacaatggggtttgcgcgcgacgagattaatgatgcgctgattaatcagaagtacgatgaggtcatggccacctacatcctgcttgggagaaagccacctgagtttgaaggcggagagagcctgagcagtggcaacttgtgccagaggtctagaccaagttctgatttgaataactcaaccctgcagtcacccgcacacctgaaggtgcaacgctcaattagcgcgaaccagaagcagagacgcttttccgaccacgctggacctagtatacctcctgctgtcagttacactaagcgtcctcaggccaactctgtggagtccgagcaaaaagaagagtgggacaaagatgttgcgcgcaaactgggatcgactacagtaggaagcaaatcagagatgactgccagtccactcgtcggccccgagcgtaaaaagtctagtacaatcccttctaacaacgtctattctggaggctctatggcccgcagaaacacctatgtctgtgaacggactacagataggtacgtggctcttcaaaacggaaaagattcctctctgaccgagatgtcagtcagtagtatttcttctgctggctcttccgtggccagtgctgtgccatctgccagacctcgacaccagaaaagcatgtccacctcaggccacccaataaaggtgactctccccacaatcaaagacggatcagaggcgtacaggcctgggaccacccagcgtgtgccagctgctagcccatctgcgcatagcatttccacagcaaccccagatcgcactcggtttcctagggggtcctcctcccgctcaactttccacggggagcagctccgcgaacggcgttctgtggcctataacggacccccagccagcccttcccatgagaccggagcctttgcacatgcacggaggggcaccagcacagggatcattagcaagatcacctcaaaatttgtgcggagatccacctccggcgagcctaaagagcgggataaggaggaaggaaaggactctaaaccacggtcactgaggttcacctggtccatgaagacgacctcctccatggatcctaatgacatgatgagggaaattaggaaggtgttagacgctaataactgcgattatgagcagaaggagcgcttcctgcttttttgcgtgcacggggatgcaaggcaagacagccttgtgcaatgggagatggaggtgtgcaagttaccccgcttaagcctgaatggcgtgcggtttaagagaatttcaggcacgtcgatcgcatttaagaacatcgcttcgaagattgcaaacgaattgaagctgtag

SEQ ID NO: 104272 - DNA, 1938 bp, Artificial Sequence
  derived and/or modified sequence
atggaatatgcctcaggaggcgaagtgttcgactacctagtagcacatggacgcatgaaagaaaaggaggcccgagctaaattcaggcagattgtgagtgcggtgcagtactgtcaccaaaagtacatcgtccacagggaccttaaagctgaaaatctgctcctggatggtgacatgaatatcaagattgccgactttggtttctctaatgaatttacagtgggaaacaagcttgataccttttgtggatcacccccttacgcggctcctgaactctttcaaggcaagaaatatgatggtcccgaggtggacgtgtggtccctaggcgtcatcctgtacaccctagtctcagggtccctgccctttgatggtcagaacttgaaggagctgagggagagagtgctaagaggcaaatacaggattcccttctacatgtccaccgactgtgagaatctgttgaagaagttactggtgctgaatccgatcaaacggggttctctcgagcagatcatgaaggacagatggatgaacgtgggacacgaggaagaagagcttaagccttatacagagccagacccagatttcaacgatacaaagcggattgacatcatggtgacgatgggattcgccagggatgaaattaacgatgctctgatcaaccaaaaatacgatgaagtaatggctacctatatccttctaggcagaaaaccccctgagttcgaaggtggcgagagccttagctccggcaatctctgtcagaggagtcggcctagttcagatctgaacaactccacgttgcagtcccccgcacacctgaaagtgcagcgctcgatttcagccaatcagaagcagaggcgctttagcgatcacgcaggcccaagtattcctcccgctgtgtcttataccaaaaggcctcaagccaattctgtagagtctgaacaaaaagaggagtgggacaaggacgtggcacgcaagcttgggagtaccacagttggcagcaagagtgagatgacagcttcgccactggtgggacctgagcggaaaaagagcagcaccattccatcaaataacgtctattccgggggttccatggccaggagaaatacatacgtgtgcgagaggacgaccgacaggtatgtcgccctccaaaatggcaaagactccagcttaacagagatgagtgtctcctccatctcttcagccggatcatcagttgcatcagctgtgcccagcgctagaccgaggcatcagaaatctatgtcaacatcaggacacccaatcaaggtcaccttacccacaattaaggacgggtcagaggcctatcgccctggcacgactcaaagggtgcccgcagcctctccatccgcccactctatctctacggccacaccagaccggaccaggtttcctcgagggagtagctctcggtctacttttcacggagagcaactgagagagcgaagaagtgtggcttacaatgggccacccgcaagccctagtcacgaaactggcgcttttgcccacgcgagacgaggaacaagcaccggcattattagtaaaataacgtcaaaatttgtccgacgatcaacctccggagagcctaaagagagagacaaagaggaggggaaggactccaaaccgaggtctctgaggtttacctggtccatgaagacgacctcttccatggaccccaatgacatgatgagggagatacgcaaggtgctggacgccaataattgcgattacgagcaaaaagagcggttcctcctgttctgtgtgcatggtgatgcccgtcaggacagtctggtccaatgggagatggaggtttgtaagctgccaagactgtcccttaatggagtaagattcaaaagaatttccggaacctccatcgcattcaaaaacattgcctccaaaattgctaacgaactcaagctgtag

SEQ ID NO: 104273 - DNA, 1938 bp, Artificial Sequence
  derived and/or modified sequence
atggagtacgccagcggcggcgaggtgttcgactacctggtggcccacggcagaatgaaggagaaggaggccagagccaagttcagacagatcgtgagcgccgtgcagtactgccaccagaagtacatcgtgcacagagacctgaaggccgagaacctgctgctggacggcgacatgaacatcaagatcgccgacttcggcttcagcaacgagttcaccgtgggcaacaagctggacaccttctgcggcagccccccctacgccgcccccgagctgttccagggcaagaagtacgacggccccgaggtggacgtgtggagcctgggcgtgatcctgtacaccctggtgagcggcagcctgcccttcgacggccagaacctgaaggagctgagagagagagtgctgagaggcaagtacagaatccccttctacatgagcaccgactgcgagaacctgctgaagaagctgctggtgctgaaccccatcaagagaggcagcctggagcagatcatgaaggacagatggatgaacgtgggccacgaggaggaggagctgaagccctacaccgagcccgaccccgacttcaacgacaccaagagaatcgacatcatggtgaccatgggcttcgccagagacgagatcaacgacgccctgatcaaccagaagtacgacgaggtgatggccacctacatcctgctgggcagaaagccccccgagttcgagggcggcgagagcctgagcagcggcaacctgtgccagagaagcagacccagcagcgacctgaacaacagcaccctgcagagccccgcccacctgaaggtgcagagaagcatcagcgccaaccagaagcagagaagattcagcgaccacgccggccccagcatcccccccgccgtgagctacaccaagagaccccaggccaacagcgtggagagcgagcagaaggaggagtgggacaaggacgtggccagaaagctgggcagcaccaccgtgggcagcaagagcgagatgaccgccagccccctggtgggccccgagagaaagaagagcagcaccatccccagcaacaacgtgtacagcggcggcagcatggccagaagaaacacctacgtgtgcgagagaaccaccgacagatacgtggccctgcagaacggcaaggacagcagcctgaccgagatgagcgtgagcagcatcagcagcgccggcagcagcgtggccagcgccgtgcccagcgccagacccagacaccagaagagcatgagcaccagcggccaccccatcaaggtgaccctgcccaccatcaaggacggcagcgaggcctacagacccggcaccacccagagagtgcccgccgccagccccagcgcccacagcatcagcaccgccacccccgacagaaccagattccccagaggcagcagcagcagaagcaccttccacggcgagcagctgagagagagaagaagcgtggcctacaacggcccccccgccagccccagccacgagaccggcgccttcgcccacgccagaagaggcaccagcaccggcatcatcagcaagatcaccagcaagttcgtgagaagaagcaccagcggcgagcccaaggagagagacaaggaggagggcaaggacagcaagcccagaagcctgagattcacctggagcatgaagaccaccagcagcatggaccccaacgacatgatgagagagatcagaaaggtgctggacgccaacaactgcgactacgagcagaaggagagattcctgctgttctgcgtgcacggcgacgccagacaggacagcctggtgcagtgggagatggaggtgtgcaagctgcccagactgagcctgaacggcgtgagattcaagagaatcagcggcaccagcatcgccttcaagaacatcgccagcaagatcgccaacgagctgaagctgtag

SEQ ID NO: 104274 - protein, 758 aa, Artificial Sequence
  derived and/or modified sequence
MSARTPLPTVNERDTENHTSVDGYTEPHIQPTKSSSRQNIPRCRNSITSATDEQPHIGNYRLQKTIGKGNFAKVKLARHVLTGREVAVKIIDKTQLNPTSLQKLFREVRIMKILNHPNIGEVFDYLVAHGRMKEKEARAKFRQIVSAVQYCHQKYIVHRDLKAENLLLDGDMNIKIADFGFSNEFTVGNKLDTFCGSPPYAAPELFQGKKYDGPEVDVWSLGVILYTLVSGSLPFDGQNLKELRERVLRGKYRIPFYMSTDCENLLKKLLVLNPIKRGSLEQIMKDRWMNVGHEEEELKPYTEPDPDFNDTKRIDIMVTMGFARDEINDALINQKYDEVMATYILLGRKPPEFEGGESLSSGNLCQRSRPSSDLNNSTLQSPAHLKVQRSISANQKQRRFSDHAGPSIPPAVSYTKRPQANSVESEQKEEWDKDVARKLGSTTVGSKSEMTASPLVGPERKKSSTIPSNNVYSGGSMARRNTYVCERTTDRYVALQNGKDSSLTEMSVSSISSAGSSVASAVPSARPRHQKSMSTSGHPIKVTLPTIKDGSEAYRPGTTQRVPAASPSAHSISTATPDRTRFPRGSSSRSTFHGEQLRERRSVAYNGPPASPSHETGAFAHARRGTSTGIISKITSKFVRRSTSGEPKERDKEEGKDSKPRSLRFTWSMKTTSSMDPNDMMREIRKVLDANNCDYEQKERFLLFCVHGDARQDSLVQWEMEVCKLPRLSLNGVRFKRISGTSIAFKNIASKIANELKL

SEQ ID NO: 104275 - DNA, 2277 bp, Artificial Sequence
  derived and/or modified sequence
atgtccgcccgaacgccccttcctaccgtgaacgagcgagacacagaaaaccacacttctgtggatggctacactgaaccacacatccagccaaccaaatcttcatcacgacagaatattcctcgatgcagaaactcaattaccagcgccaccgacgaacagccccatattggtaattataggctgcagaaaaccatcggcaaaggcaatttcgccaaggtgaaactcgccaggcacgttctgacaggccgcgaagtcgccgtaaaaataattgataaaacacagctgaatccaacctctctgcaaaaattatttcgcgaagtgcgcattatgaaaattctcaaccatcccaacatcggagaggtgtttgattatctggtagcacatggaagaatgaaggaaaaagaggctcgggctaagttccgacagatcgttagcgctgtacagtattgccatcaaaaatacattgtccaccgcgatctgaaagccgaaaaccttctgctggatggggacatgaacatcaaaattgccgacttcggcttcagcaatgagttcacagtgggtaataaacttgacaccttttgtggctccccaccttacgccgctcccgaactgtttcagggcaaaaaatacgacggacctgaggtagacgtgtggtcactcggggtgattctatacacattggtgtccgggtcgctgccttttgacgggcaaaatctcaaggaactccgggaacgtgtgctgaggggcaagtatagaatacccttctacatgtcaaccgattgcgaaaatctgcttaagaagctgcttgtcttaaatcccatcaagagggggtccctggaacagatcatgaaggaccggtggatgaacgtgggacatgaagaggaagagctcaaaccttataccgagcccgatccggattttaacgacaccaagcgaatcgatatcatggtaactatgggattcgcccgggacgaaatcaacgacgctcttatcaatcaaaaatatgatgaagtcatggctacatatatcctgctcggaaggaaaccacctgaatttgaaggaggagaaagcctcagcagcggcaacttgtgtcagagaagccgccctagctccgatctgaataatagcaccttgcagagtcctgcacacctgaaagtccagcgctcaatctcggcgaaccaaaagcaacggagatttagcgatcacgcaggcccatcaataccccccgccgtatcctacaccaaaaggcctcaggctaactcagtggaaagcgagcagaaggaggagtgggacaaggatgtggctcggaaattagggagcactacagtgggctccaagagcgaaatgactgcaagcccattggtggggccggagaggaagaagagttccactatccctagtaataacgtctattctggaggctccatggctcgcaggaacacctatgtttgcgagcgcacgacggaccgttatgtagctctgcaaaacggtaaagattccagcttaaccgagatgtcagtatccagcatcagctcggccggctcttccgtggcgagtgccgtgccttccgctcgaccaaggcaccagaaatcaatgtcgacaagtggtcacccaatcaaggttacattgcctaccattaaggatggcagcgaggcctaccggcctggcacaacgcagagagtgcctgccgccagtccatctgcccactctatatctacagccacccctgatagaacacgattcccccggggaagcagctcgcgtagtacctttcacggagaacagcttcgagagaggcggtcagtggcttataatggtccacccgcaagtccctcccacgagaccggggcttttgctcacgctcgcaggggcactagcaccggcatcatctcaaaaatcaccagcaagtttgtccgccgcagcaccagcggcgagcctaaggagagggacaaggaggagggcaaggactcaaaaccccgctctttgcggttcacatggtcaatgaaaaccacaagcagcatggaccctaacgacatgatgcgggaaatcaggaaagtccttgacgccaataactgcgactacgagcagaaagagcgctttctgttgttctgcgtgcacggagacgctagacaggactctctggtgcaatgggagatggaggtctgtaaacttccacggttaagtttgaacggagtgagatttaaacgcatcagcggtacaagcattgccttcaaaaacatagcgtccaaaatcgcaaatgaacttaagttgtag

SEQ ID NO: 104276 - DNA, 2277 bp, Artificial Sequence
  derived and/or modified sequence
atgtctgcccggacccccctgcccaccgtgaatgaaagagacacagagaaccacacctctgtggatggctacacagagccccacatccagcccaccaagagcagcagccggcagaacatcccccgctgcaggaacagcatcaccagcgccacagatgagcagccccacatcggcaactaccgcctgcagaagaccatcggcaagggcaactttgccaaggtgaagctggcccggcacgtgctgaccggccgggaggtggccgtgaagatcatcgacaagacccagctgaaccccaccagcctgcagaagctgttccgggaggtgcgcatcatgaagatcctgaaccaccccaacattggagaggtgtttgactacctggtggcccacggccgcatgaaggagaaggaggcccgggccaagttccggcagatcgtgtctgctgtgcagtactgccaccagaagtacatcgtgcaccgggacctgaaggccgagaacctgctgctggatggagacatgaacatcaagattgctgactttggcttcagcaatgagttcaccgtgggcaacaagctggacaccttctgtggcagccccccctatgctgcccctgagctgttccagggcaagaagtatgatggccctgaggtggatgtgtggagcctgggcgtcatcctgtacaccctggtgtctggcagcctgccctttgatggccagaacctgaaggagctgcgggagcgggtgctgcggggcaagtaccgcatccccttctacatgagcacagactgtgagaacctgctgaagaagctgctggtgctgaaccccatcaagaggggcagcctggagcagatcatgaaggaccgctggatgaatgtgggccacgaggaggaggagctgaagccctacacagagccagaccctgacttcaatgacaccaagagaattgacatcatggtgaccatgggctttgccagagatgagatcaatgatgccctgatcaaccagaagtatgatgaggtgatggccacctacatcctgctgggcaggaagcccccagagtttgaaggaggagagagcctgagcagcggcaacctgtgccagaggagccggcccagcagtgacctgaacaacagcaccctgcagagccctgcccacctgaaggtgcagaggagcatcagcgccaaccagaagcagaggcgcttcagtgaccacgccggccccagcatccccccagctgtgtcctacaccaagaggccccaggccaacagcgtggagagcgagcagaaggaggagtgggacaaggatgtggccaggaagctgggcagcaccaccgtgggcagcaagtctgagatgacagccagccccctggtgggccctgagaggaagaagagcagcaccatccccagcaacaacgtgtacagcggcggctccatggcccggaggaacacctacgtgtgtgagaggaccacagaccgctacgtggccctgcagaatggcaaggacagcagcctgacagagatgtctgtgagcagcatcagcagcgctggcagctctgtggccagcgctgtgcccagcgcccggcccaggcaccagaagtccatgagcaccagcggccaccccatcaaggtgaccctgcccaccatcaaggatggcagcgaggcctaccggcccggcaccacccagagggtgcctgctgccagccccagcgcccacagcatcagcacagccaccccagacaggacccgcttcccccggggcagcagcagccgcagcaccttccatggagagcagctgcgggagcggcgctctgtggcctacaacggccccccagccagccccagccatgagaccggggcctttgcccacgcccggcggggcaccagcacaggcatcatcagcaagatcaccagcaagtttgtgcggcgcagcaccagcggggagcccaaggagcgggacaaggaggagggcaaggacagcaagcccaggagcctgcgcttcacctggagcatgaagaccaccagctccatggaccccaatgacatgatgagggagatcaggaaggtgctggatgccaacaactgtgactatgagcagaaggagcgcttcctgctcttctgtgtgcatggagatgcccggcaggacagcctggtgcagtgggagatggaggtgtgcaagctgccccggctgagcctgaatggagtgcgcttcaagaggatcagcggcaccagcatcgccttcaagaacatcgccagcaagatcgccaatgagctgaagctgtag

SEQ ID NO: 104277 - DNA, 5169 bp, Artificial Sequence
  derived and/or modified sequence
ggcgcggcggcggcggtggctgtgaccgcgcggaccgagccgagacattcgcgccgggggatcgggcgccgccgccgctgggccccgggcgcgtggatgcggctgggtcgggcggcgccgtacacctgaggcggagaacggggcgcggcgcgggtgacgctgtcagggccgcggttcctgacgcccaggcgctcgccaggacgagccaggcagtgatttgaggcaccggcttcaccttcacccatggtccggagagcctagcggggctcgccaccgcctcccggctccccttccacgcctcatcctgccagcctcgccgccccgccagcgccgggcaaccgcctcgcccgaagccctccctcgttactgtccgcataccccggcggcgccgccgcgggaagcggctccccctcctcttcctccgcgtcctcttccctctttcccccgccggggccgcttgttgcaccgccccgcggcctgcgggagccgctcgccccggccttgtgctcgcgtccgcacccctttcctgtcgccccccggggcccgcaccacagcccggccggcgagaccccggccagaccccgctgcccgcacaaaatgtcggcccggacgccattgccgacggtgaacgagcgggacacggaaaatcatacatctgtggatggatatactgaaccacacatccagcctaccaagtcgagtagcagacagaacatcccccggtgtagaaactccattacgtcagcaacagatgaacagcctcacattggaaattaccgtttacaaaaaacaatagggaagggaaattttgccaaagtcaaattggcaagacacgttctaactggtagagaggttgctgtgaaaataatagacaaaactcagctaaatcctaccagtctacaaaagttatttcgagaagtacgaataatgaagatactgaatcatcctaatataggtgaagtatttgattacttagttgcccatggaagaatgaaagagaaagaggcccgtgcaaaatttaggcagattgtatctgctgtacagtattgtcatcaaaagtacattgttcaccgtgatcttaaggctgaaaaccttctccttgatggtgatatgaatattaaaattgctgactttggttttagtaatgaatttacagttgggaacaaattggacacattttgtggaagcccaccctatgctgctcccgagcttttccaaggaaagaagtatgatgggcctgaagtggatgtgtggagtctgggcgtcattctctatacattagtcagtggctccttgcctttcgatggccagaatttaaaggaactgcgagagcgagttttacgagggaagtaccgtattcccttctatatgtccacagactgtgaaaatcttctgaagaaattattagtcctgaatccaataaagagaggcagcttggaacaaataatgaaagatcgatggatgaatgttggtcatgaagaggaagaactaaagccatatactgagcctgatccggatttcaatgacacaaaaagaatagacattatggtcaccatgggctttgcacgagatgaaataaatgatgccttaataaatcagaagtatgatgaagttatggctacttatattcttctaggtagaaaaccacctgaatttgaaggtggtgaatcgttatccagtggaaacttgtgtcagaggtcccggcccagtagtgacttaaacaacagcactcttcagtcccctgctcacctgaaggtccagagaagtatctcagcaaatcagaagcagcggcgtttcagtgatcatgctggtccatccattcctcctgctgtatcatataccaaaagacctcaggctaacagtgtggaaagtgaacagaaagaggagtgggacaaagatgtggctcgaaaacttggcagcacaacagttggatcaaaaagcgagatgactgcaagccctcttgtagggccagagaggaaaaaatcttcaactattccaagtaacaatgtgtattctggaggtagcatggcaagaaggaatacatatgtctgtgaaaggaccacagatcgatacgtagcattgcagaatggaaaagacagcagccttacggagatgtctgtgagtagcatatcttctgcaggctcttctgtggcctctgctgtcccctcagcacgaccccgccaccagaagtccatgtccacttctggtcatcctattaaagtcacactgccaaccattaaagacggctctgaagcttaccggcctggtacaacccagagagtgcctgctgcttccccatctgctcacagtattagtactgcgactccagaccggacccgttttccccgagggagctcaagccgaagcactttccatggtgaacagctccgggagcgacgcagcgttgcttataatgggccacctgcttcaccatcccatgaaacgggtgcatttgcacatgccagaaggggaacgtcaactggtataataagcaaaatcacatccaaatttgttcgcagaagtacatcaggggaaccaaaagaaagagacaaggaagagggtaaagattctaagccgcgttctttgcggttcacatggagtatgaagaccactagttcaatggaccctaatgacatgatgagagaaatccgaaaagtgttagatgcaaataactgtgattatgagcaaaaagagagatttttgcttttctgtgtccatggagacgctagacaggatagcctcgtgcagtgggagatggaagtctgcaagttgccacgactgtcacttaatggggttcgcttcaagcgaatatctgggacatctattgcctttaagaacattgcatcaaaaatagcaaatgagcttaagctgtaaagaagtccaaatttacaggttcagggaagatacatacatatatgaggtacagtttttgaatgtactggtaatgcctaatgtggtctgcctgtgaatctccccatgtagaatttgcccttaatgcaataaggttatacatagttatgaactgtaaaattaaagtcagtatgaactataataaatatctgtagcttaaaaagtaggttcacatgtacaggtaagtatattgtgtatttctgttcattttctgttcatagagttgtataataaaacatgattgcttaaaaacttgtatagttgtctagatttctgcacctgaatgtatgtttgatgctttgatttgaaaatgttcttccctgttatttacattctggtgggtttttaaaattcttacctccatcatgcaattttgaaaattgtgtccagaattaaaagtgcatagaaatagcctttacaattgtagcatggacctttaaaaattgttttaaaatcttatttaaatttaaaccagaagctgaaaaatagatcagctttattatacacaaaattattactgcttatctttgctcttttccttgttatcccgcaaggtttagttgagaagatacaaaatgtttacagtgttggcacttagagtttttaaattcaagtacatgaaattcagtaatagcattgccttgagctaactaggaagtaccgggaaaaaagttaaatctacatcaagtttcttttgaactttgaagtgttttctgacccactgctaactgtagcaacaaaatttaaaagaaaaaaaacatactttatctggctattataacataaactgtcacgtaggtttgctgccttcagaataccgcaatttaattgcgggaatataataatattgggactgtttcacagcacaaactcatctttacagtgttgatcaatgcatcagttaagaaataatgccacctcaggaattaactggcattgggaacatttgcctcattctcctgctatcctcttcattcacccctgccactgtaatatctataagtacttaagagacttgtgagcaaaacatactatttataacagtatatgattgatttatgcttatgtggttgttcagtttgttcccatgtaactcgtttgttttaaatattttgccagatttcttgtatttattccacatcattatgcctataatgtgccgctttgtgattgggcatttgcctacttttctttcataattagtgatatatgcgatgtaaaaccactagtaaaggtacattttaatacttgttattttatactgaattagccttggaggttgactgtgcaatgttatttactgttgtaattactgtaataccaacatatgggccccatctgcacactcctgaaaaacagaaagtgtattcaaattttatcagtttaaagaaaataaagctgtgataaatactgtaattccaacctacattagaaggtctaagtgtaggtgatgtgccattccataatggcttccagactagggtgaattttatgttctgtactgtactgtgatgtagctttcttctgtaacagttatgttttaaaattaagtgagttttttttttgccttagcaaagggtggtgtttgaaaaaaaaaatgtgtagcccctttttaacctagtgttcattcaaaaaaaaattgatgcaaatctttattcactttcactggtgcacactgaaattttacttgaacagttctcataataaagcacttgtcttttgctctttatcagaatgtgaattacctgttttctggtacaaaagtattctgtatgaggagtttattgtatgtgttctaaatttagttggcaaagggtgaagctgtgaaggttttcaagattattgaaactatgaaggtttcttgtcattatgacaagaaagtttaatctttttataggaattcctgtcactgaaatacgtttttaaaaaaatagactcatgtgttttccacggtagaaactgatatttttttacattttctcactgtggccaactcttctgtgtttgtagaaaggaatttgacttcaatatcttttatgaactaaaaatgaaatcttgatactcactttagatttttcattttatgtgttcatgacaacataaatatttttcaaagatttagaggaattttgcaatgtgtttgcataaataaataccagtttatgttcaccggctatgtgataccaggatttccttggcttctgttgaaatattatttgatatgacatcccttatattaaattaattattttgtagaaa

SEQ ID NO: 104278 - DNA, 2277 bp, Artificial Sequence
  derived and/or modified sequence
atgagcgcccggacccccctgcccaccgtgaacgagcgggacaccgagaaccacacctccgtggatgggtatacagagccccatatccagccaaccaagagttcctctcgccagaatattccgaggtgcaggaactccatcacaagcgcaaccgacgagcagccccatatcggaaactacaggcttcagaagactattggtaaggggaacttcgcaaaagtgaaacttgcccgtcatgtgctgactggacgtgaggtcgctgtcaagatcatcgacaagacacagctcaacccaactagcctccaaaagctgttccgagaagtgcgtattatgaaaatcctgaatcatcccaatatcggagaggtctttgattacctagttgcacacggcagaatgaaagaaaaggaagctagagctaagtttcgccaaatcgtgtctgccgtccagtactgccatcaaaaatacatcgtccaccgcgacctgaaagccgagaacctcctattggacggggacatgaatataaagatcgccgatttcggcttctctaacgaatttactgttgggaacaagctggacacgttctgcggctcaccaccttatgccgctcctgagttgttccagggaaagaagtacgacggcccagaggtggacgtatggagccttggcgtgattctctataccctggtgtcaggctcattgccgtttgatgggcagaatttaaaggaactgagagaacgcgtgctaagggggaaatatcgaatccctttttatatgtcaacggattgtgaaaatctgcttaaaaaactcttggtccttaaccccatcaagcgcggctccctggaacagattatgaaggaccgatggatgaatgttgggcacgaggaagaggagctgaagccttatactgaaccggacccagacttcaatgatactaagaggatcgacataatggtaacaatgggattcgcccgggacgagattaatgacgccctgattaatcaaaaatacgacgaagtaatggccacttacattttattgggccgcaagcctcccgaatttgaaggcggtgagtcactgagcagtggcaatttgtgccagcggagcaggccatcatcagacttgaacaactcaactctccagagccctgctcacctgaaagtccaacggtctatttcggccaaccaaaaacagaggcggttttccgatcacgcaggcccgagcatacctcccgcagtatcatatactaaaagaccacaggcaaactctgttgaatctgagcagaaagaggaatgggacaaagatgtcgcccgcaagctgggatccacaaccgtgggcagcaagtccgaaatgacggcaagcccattagtgggccccgaacgcaagaaatcctcaacgatcccctccaacaatgtctattcgggaggcagtatggcccgaaggaacacctatgtttgtgaaagaactaccgatcgatatgtggcgctgcaaaatggaaaagactcatcactgactgagatgagcgtcagtagcatcagctccgctgggtcctcagttgcgagcgctgtcccatcagcacgccccaggcatcagaagagtatgtccacctcgggtcacccaatcaaggtaacccttcccaccataaaggacggaagtgaagcctacagaccagggaccacccagcgcgttccagctgcgtccccctctgcccatagcatatcgacggcaacccccgacagaacacgcttcccacgaggctcctcatcccgcagtacatttcatggcgagcagttaagagagcggcgaagtgttgcctacaacggccctccagcttccccatcccatgagaccggggcctttgcacacgccaggcggggtacatctaccggcattatctccaagatcacgtcaaaattcgtgagacgcagtacctcaggtgagccaaaagagagagataaagaggagggcaaggactcaaaaccacggtctttgcggtttacgtggagcatgaaaactacctcctctatggaccctaacgatatgatgagggaaattcgaaaggtcctggacgctaacaattgtgattatgaacaaaaggagcgctttctcctgttttgcgtgcatggtgacgctaggcaggatagcctcgttcaatgggagatggaggtttgcaaactaccaagactgagtttgaatggcgttaggtttaagcgcatctccggcacatccatcgccttcaaaaacatcgccagcaaaattgccaatgagctcaaattgtag

SEQ ID NO: 104279 - DNA, 2277 bp, Artificial Sequence
  derived and/or modified sequence
atgtctgcaagaaccccactgcctaccgtcaatgagagggacactgagaatcatactagcgtcgatggctataccgaacctcacatccagccaacgaaatctagcagtcgacagaacattccacgctgtcgcaattccatcacaagtgcgacagatgaacaacctcacattggcaactaccggttacagaaaactatcggaaaagggaactttgccaaggtcaagctggcgagacacgttctcaccgggagagaagtagcagtgaagataattgataaaactcaactcaaccccacaagtctacagaaattgttccgggaagttcgtatcatgaaaattctgaatcaccccaatatcggggaggtgttcgactatttagtcgcccacggcagaatgaaagagaaggaagcaagagccaagtttcgccaaatcgttagtgccgtgcaatactgccaccagaagtatattgtgcatcgagacctgaaggctgaaaacctccttctggacggggacatgaacatcaagatagctgactttgggttttccaacgagttcaccgtgggaaacaagctggacacattctgcggcagcccgccttatgccgctccggagctgttccagggaaagaagtacgatgggcctgaggtagacgtctggtctctcggcgtgatcctgtataccttggttagcggaagcctgccatttgatggccagaatctcaaagagctaagggaacgggtcttgagggggaaataccgcattcctttttatatgtcaacagactgtgagaacctgttgaagaaactgcttgtgctcaatcccattaaacggggatccctggagcaaattatgaaggaccggtggatgaacgtgggccatgaagaggaagaattgaaaccatataccgagcctgatcctgacttcaatgatacaaagcgcatcgatattatggtgaccatgggtttcgctcgggacgaaatcaacgatgcactcataaaccaaaagtacgacgaggtcatggcaacctatatcctcctggggagaaaaccacccgaatttgaaggaggagagagtctttctagcgggaatctgtgccagcgtagtcggccatccagcgacctgaataacagcaccctgcagtctcctgctcacctcaaagttcagaggagcatttccgctaaccagaaacaaaggagatttagcgatcacgctggcccttcgatccctcctgcagtgtcctatactaaacgcccacaggccaacagcgtggagtccgaacagaaggaagaatgggacaaggacgttgcccgaaaattgggctccaccaccgtgggatccaagagtgagatgaccgcaagcccacttgtgggccctgagaggaaaaagtcctctacaatcccttcaaacaatgtttactcgggtggatccatggcgaggcgaaatacatacgtgtgcgaacggactacagaccggtatgtggcgctgcagaacggaaaggatagttcactgacagagatgagcgtgtcatctatctcgtccgccggatccagtgttgcttcagccgtgccgagcgcacgtccgcgacatcagaaatctatgtcgacctcaggccacccaattaaggtaacccttcccaccattaaagatggtagcgaggcgtatcggcctggcacgacgcagcgggtgcccgcagcctcaccttccgcgcacagcattagcacagcaacccctgaccgaaccaggtttccacggggaagctcatctcgcagtactttccacggggagcaactccgggagcgtcgctccgttgcgtataacggacctcctgccagcccgtctcatgaaaccggagcttttgcacatgccaggcgcggtactagcaccgggatcatttccaagatcacttccaagttcgtgcgacggagcacctctggagaaccgaaagaaagagacaaggaggaaggaaaagactcgaagcctagatccctccgattcacttggtccatgaaaaccacctcttccatggatccaaacgatatgatgagggagattaggaaagtgctagatgcaaacaattgtgactacgagcagaaagagcgcttcctgctgttctgcgtccatggagacgcccgtcaggactctctggtccagtgggagatggaagtgtgcaagcttccgcgtctcagcttgaatggtgtgagatttaaacgtataagtggcacctcaattgcttttaagaacattgctagcaagattgccaatgaactcaagctgtag

SEQ ID NO: 104280 - DNA, 2277 bp, Artificial Sequence
  derived and/or modified sequence
atgagcgccagaacccccctgcccaccgtgaacgagagagacaccgagaaccacaccagcgtggacggctacaccgagccccacatccagcccaccaagagcagcagcagacagaacatccccagatgcagaaacagcatcaccagcgccaccgacgagcagccccacatcggcaactacagactgcagaagaccatcggcaagggcaacttcgccaaggtgaagctggccagacacgtgctgaccggcagagaggtggccgtgaagatcatcgacaagacccagctgaaccccaccagcctgcagaagctgttcagagaggtgagaatcatgaagatcctgaaccaccccaacatcggcgaggtgttcgactacctggtggcccacggcagaatgaaggagaaggaggccagagccaagttcagacagatcgtgagcgccgtgcagtactgccaccagaagtacatcgtgcacagagacctgaaggccgagaacctgctgctggacggcgacatgaacatcaagatcgccgacttcggcttcagcaacgagttcaccgtgggcaacaagctggacaccttctgcggcagccccccctacgccgcccccgagctgttccagggcaagaagtacgacggccccgaggtggacgtgtggagcctgggcgtgatcctgtacaccctggtgagcggcagcctgcccttcgacggccagaacctgaaggagctgagagagagagtgctgagaggcaagtacagaatccccttctacatgagcaccgactgcgagaacctgctgaagaagctgctggtgctgaaccccatcaagagaggcagcctggagcagatcatgaaggacagatggatgaacgtgggccacgaggaggaggagctgaagccctacaccgagcccgaccccgacttcaacgacaccaagagaatcgacatcatggtgaccatgggcttcgccagagacgagatcaacgacgccctgatcaaccagaagtacgacgaggtgatggccacctacatcctgctgggcagaaagccccccgagttcgagggcggcgagagcctgagcagcggcaacctgtgccagagaagcagacccagcagcgacctgaacaacagcaccctgcagagccccgcccacctgaaggtgcagagaagcatcagcgccaaccagaagcagagaagattcagcgaccacgccggccccagcatcccccccgccgtgagctacaccaagagaccccaggccaacagcgtggagagcgagcagaaggaggagtgggacaaggacgtggccagaaagctgggcagcaccaccgtgggcagcaagagcgagatgaccgccagccccctggtgggccccgagagaaagaagagcagcaccatccccagcaacaacgtgtacagcggcggcagcatggccagaagaaacacctacgtgtgcgagagaaccaccgacagatacgtggccctgcagaacggcaaggacagcagcctgaccgagatgagcgtgagcagcatcagcagcgccggcagcagcgtggccagcgccgtgcccagcgccagacccagacaccagaagagcatgagcaccagcggccaccccatcaaggtgaccctgcccaccatcaaggacggcagcgaggcctacagacccggcaccacccagagagtgcccgccgccagccccagcgcccacagcatcagcaccgccacccccgacagaaccagattccccagaggcagcagcagcagaagcaccttccacggcgagcagctgagagagagaagaagcgtggcctacaacggcccccccgccagccccagccacgagaccggcgccttcgcccacgccagaagaggcaccagcaccggcatcatcagcaagatcaccagcaagttcgtgagaagaagcaccagcggcgagcccaaggagagagacaaggaggagggcaaggacagcaagcccagaagcctgagattcacctggagcatgaagaccaccagcagcatggaccccaacgacatgatgagagagatcagaaaggtgctggacgccaacaactgcgactacgagcagaaggagagattcctgctgttctgcgtgcacggcgacgccagacaggacagcctggtgcagtgggagatggaggtgtgcaagctgcccagactgagcctgaacggcgtgagattcaagagaatcagcggcaccagcatcgccttcaagaacatcgccagcaagatcgccaacgagctgaagctgtag

SEQ ID NO: 104281 - protein, 202 aa, Artificial Sequence
  derived and/or modified sequence
MVGRRALIVLAHSERTSFNYAMKEAAAAALKKKGWEVVESDLYAMNFNPIISRKDITGKLKDPANFQYPAESVLAYKEGHLSPDIVAEQKKLEAADLVIFQSGILHFCGFQVLEPQLTYSIGHTPADARIQILEGWKKRLENIWDETPLYFAPSSLFDLNFQAGFLMKKEVQDEEKNKKFGLSVGHHLGKSIPTDNQIKARK

SEQ ID NO: 104282 - DNA, 609 bp, Artificial Sequence
  derived and/or modified sequence
atggtcggaagacgggccctgattgtgctggcgcacagcgaaagaacgtctttcaactatgccatgaaagaagctgccgccgctgcccttaagaagaagggctgggaagttgtggagtctgatctgtacgcaatgaactttaaccccataataagccgtaaagacataaccggcaaactgaaagatccagccaacttccagtaccccgccgagagtgtgctggcctataaggagggccatctctctccggatatagtggccgagcagaagaaacttgaggcagccgatttggtgatttttcagagcggcatcctccacttttgcggctttcaagtgctggaacctcaactcacttacagcattggccacaccccagccgacgcccggatacagattctcgagggatggaagaagaggctcgagaatatctgggacgaaacacccctctacttcgcacctagctcattatttgacttaaacttccaggccggatttctaatgaaaaaagaggtgcaggacgaggagaagaacaaaaagtttggcctatctgtgggccatcacttgggcaaaagcattccgacggacaatcaaatcaaggctcggaagtag

SEQ ID NO: 104283 - DNA, 609 bp, Artificial Sequence
  derived and/or modified sequence
atggtgggccggcgggccctgattgtgctggcccacagcgagaggaccagcttcaactatgccatgaaggaggccgctgctgctgccctgaagaagaagggctgggaggtggtggagagtgacctgtatgccatgaacttcaaccccatcatcagcaggaaggacatcaccgggaagctgaaggaccctgccaacttccagtacccagctgagagcgtgctggcctacaaggagggccacctgagcccagacatcgtggccgagcagaagaagctggaggccgctgacctggtgatcttccagagcggcatcctgcacttctgtggcttccaggtgctggagccccagctgacctacagcatcggccacaccccagcagatgcccgcatccagatcctggagggctggaagaagaggctggagaacatctgggatgagacccccctgtactttgcccccagcagcctgtttgacctgaacttccaggccggcttcctgatgaagaaggaggtgcaggatgaggagaagaacaagaagtttggcctgtctgtgggccaccacctgggcaagagcatccccacagacaaccagatcaaggccaggaagtag

SEQ ID NO: 104284 - DNA, 924 bp, Artificial Sequence
  derived and/or modified sequence
acacgcgactcccacaaggttgcagccggagccgcccagctcaccgagagcctagttccggccagggtcgccccggcaaccacgagcccagccaatcagcgccccggactgcaccagagccatggtcggcagaagagcactgatcgtactggctcactcagagaggacgtccttcaactatgccatgaaggaggctgctgcagcggctttgaagaagaaaggatgggaggtggtggagtcggacctctatgccatgaacttcaatcccatcatttccagaaaggacatcacaggtaaactgaaggaccctgcgaactttcagtatcctgccgagtctgttctggcttataaagaaggccatctgagcccagatattgtggctgaacaaaagaagctggaagccgcagaccttgtgatattccagagtggcattctgcatttctgtggcttccaagtcttagaacctcaactgacatatagcattgggcacactccagcagacgcccgaattcaaatcctggaaggatggaagaaacgcctggagaatatttgggatgagacaccactgtattttgctccaagcagcctctttgacctaaacttccaggcaggattcttaatgaaaaaagaggtacaggatgaggagaaaaacaagaaatttggcctttctgtgggccatcacttgggcaagtccatcccaactgacaaccagatcaaagctagaaaatgagattccttagcctggatttccttctaacatgttatcaaatctgggtatctttccaggcttccctgacttgctttagtttttaagatttgtgtttttctttttccacaaggaataaatgagagggaatcgactgtattcgtgcatttttggatcatttttaactgattcttatgattactatcatggcatataac

SEQ ID NO: 104285 - DNA, 609 bp, Artificial Sequence
  derived and/or modified sequence
atggtgggccggcgggccctgatcgtgctggcccacagcgagcggacgtcattcaattacgctatgaaagaggccgccgccgccgctttgaagaagaaaggatgggaggtggttgaatccgatctctacgcaatgaactttaatccgatcatcagtaggaaggatatcactgggaagttgaaagaccctgctaattttcagtatcccgctgagtctgtgctcgcctataaggaagggcatctgagccctgacatcgtggctgaacagaagaagctcgaggctgccgacctcgtcattttccagagcggtattttacatttttgcggcttccaagtcttggagcctcaactgacctatagcatcggacatacccccgccgatgcccgaatccagatactcgaggggtggaaaaagagactggagaatatttgggacgaaacaccactctacttcgccccttcctccctgttcgatttaaacttccaagccggattcctcatgaagaaagaagtccaggatgaggagaagaacaagaagtttgggttatccgtcgggcatcacttaggtaagtcaatccctaccgataaccagatcaaagccagaaagtag

SEQ ID NO: 104286 - DNA, 609 bp, Artificial Sequence
  derived and/or modified sequence
atggtggggagaagagccttgatcgtgctggcacactccgaacgtacaagcttcaattatgccatgaaagaagccgcagctgccgctctcaagaagaaaggatgggaggtggtggagtctgatttgtatgccatgaacttcaaccccatcatctcgcgcaaagacatcacaggcaagctcaaggatccagctaatttccagtatccagcagagtccgtgctggcatacaaggaggggcatctgtcacccgatattgtggccgaacagaaaaagttagaagcagccgatcttgtgatatttcagagcgggatcttacatttttgtggcttccaggttttggagccacaactgacatacagtattggccacacgcccgctgacgctagaatccagattcttgaaggctggaagaaacgccttgagaacatatgggatgagacacctctctacttcgcacctagtagtcttttcgatctcaatttccaagcaggctttctgatgaaaaaggaagtgcaggatgaagagaagaacaagaaattcggcctcagcgtgggccaccacctggggaaaagcatccccacagataatcaaattaaggctcgaaagtag

SEQ ID NO: 104287 - DNA, 609 bp, Artificial Sequence
  derived and/or modified sequence
atggtgggcagaagagccctgatcgtgctggcccacagcgagagaaccagcttcaactacgccatgaaggaggccgccgccgccgccctgaagaagaagggctgggaggtggtggagagcgacctgtacgccatgaacttcaaccccatcatcagcagaaaggacatcaccggcaagctgaaggaccccgccaacttccagtaccccgccgagagcgtgctggcctacaaggagggccacctgagccccgacatcgtggccgagcagaagaagctggaggccgccgacctggtgatcttccagagcggcatcctgcacttctgcggcttccaggtgctggagccccagctgacctacagcatcggccacacccccgccgacgccagaatccagatcctggagggctggaagaagagactggagaacatctgggacgagacccccctgtacttcgcccccagcagcctgttcgacctgaacttccaggccggcttcctgatgaagaaggaggtgcaggacgaggagaagaacaagaagttcggcctgagcgtgggccaccacctgggcaagagcatccccaccgacaaccagatcaaggccagaaagtag

SEQ ID NO: 104288 - protein, 322 aa, Artificial Sequence
  derived and/or modified sequence
MTTTIQSLFPNLQVFPALGNHDYWPQDQLPVVTSKVYNAVANLWKPWLDEEAISTLRKGGFYSQKVTTNPNLRIISLNTNLYYGPNIMTLNKTDPANQFEWLESTLNNSQQNKEKVYIIAHVPVGYLPSSQNITAMREYYNEKLIDIFQKYSDVIAGQFYGHTHRDSIMVLSDKKGSPVNSLFVAPAVTPVKSVLEKQTNNPGIRLFQYDPRDYKLLDMLQYYLNLTEANLKGESIWKLEYILTQTYDIEDLQPESLYGLAKQFTILDSKQFIKYYNYFFVSYDSSVTCDKTCKAFQICAIMNLDNISYADCLKQLYIKHNY

SEQ ID NO: 104289 - DNA, 969 bp, Artificial Sequence
  derived and/or modified sequence
atgaccaccaccatccagagcctgttccccaacctgcaggtgttccccgccctgggcaaccacgactactggccccaggaccagctgcccgtggtgaccagcaaggtgtacaacgccgtggccaacctgtggaagccctggctggacgaggaggccatcagcaccctgagaaagggcggcttctacagccagaaggtgaccaccaaccccaacctgagaatcatcagcctgaacaccaacctgtactacggccccaacatcatgaccctgaacaagaccgaccccgccaaccagttcgagtggctggagagcaccctgaacaacagccagcagaacaaggagaaggtgtacatcatcgcccacgtgcccgtgggctacctgcccagcagccagaacatcaccgccatgagagagtactacaacgagaagctgatcgacatcttccagaagtacagcgacgtgatcgccggccagttctacggccacacccacagagacagcatcatggtgctgagcgacaagaagggcagccccgtgaacagcctgttcgtggcccccgccgtgacccccgtgaagagcgtgctggagaagcagaccaacaaccccggcatcagactgttccagtacgaccccagagactacaagctgctggacatgctgcagtactacctgaacctgaccgaggccaacctgaagggcgagagcatctggaagctggagtacatcctgacccagacctacgacatcgaggacctgcagcccgagagcctgtacggcctggccaagcagttcaccatcctggacagcaagcagttcatcaagtactacaactacttcttcgtgagctacgacagcagcgtgacctgcgacaagacctgcaaggccttccagatctgcgccatcatgaacctggacaacatcagctacgccgactgcctgaagcagctgtacatcaagcacaactactag

SEQ ID NO: 104290 - DNA, 969 bp, Artificial Sequence
  derived and/or modified sequence
atgacaacaacgatccagtctttgttccccaatctgcaagtgtttcccgccctggggaaccacgattactggccacaggaccagctgcctgtggtcacctccaaggtgtacaatgctgtggcaaatctgtggaaaccttggctggacgaggaagcgatatccactctgaggaaagggggtttttacagccagaaggttacaaccaatccaaatttacggattatctcacttaacactaacttatattacggacccaatattatgactttgaacaaaaccgatccagccaaccagtttgagtggctcgagtcaacactaaataacagccagcagaacaaggagaaggtttacatcatcgcacacgttcccgtaggctatctcccttcatcacagaatattaccgcaatgagggagtattacaatgagaaactcatcgatatctttcagaagtattcagatgtgatagccgggcagttctacggacatacacaccgggactcaattatggtcctcagtgacaaaaaaggaagcccagtgaactctttattcgtcgctccagcagtcactcccgtgaagtcagttcttgaaaagcagactaataaccccggcatccggctgtttcagtacgacccacgagactataaactcctcgatatgctccagtactacctgaatctgacagaggcaaacctgaaaggagagtcaatatggaaattggaatatatcctgactcagacttatgatatcgaagaccttcagccagagtcactatatggcctggctaaacagttcacgattttagactctaaacagtttattaaatattataactatttcttcgtgagctatgacagctctgtgacctgtgacaaaacatgcaaggcgttccagatctgcgccatcatgaacttggacaatattagttatgcggactgcctgaaacagctctacattaagcacaactattag

SEQ ID NO: 104291 - DNA, 969 bp, Artificial Sequence
  derived and/or modified sequence
atgaccaccaccatccagagcctcttccccaacctgcaggtgtttcctgccctgggcaaccacgactactggccccaggaccagctgcctgtggtgaccagcaaggtgtacaatgctgtggccaacctgtggaagccctggctggatgaggaggccatcagcaccctgaggaagggcggcttctacagccagaaggtgaccaccaaccccaacctgcgcatcatcagcctgaacaccaacctgtactacggccccaacatcatgaccctgaacaagacagatcctgccaaccagtttgagtggctggagagcaccctgaacaacagccagcagaacaaggagaaggtgtacatcatcgcccacgtgcctgtgggctacctgcccagcagccagaacatcacagccatgagggagtactacaatgagaagctgattgacatcttccagaagtacagtgatgtgattgctggccagttctacggccacacccaccgggacagcatcatggtgctgagtgacaagaagggcagccctgtgaacagcctgtttgtggccccagctgtgacccctgtgaagtctgtgctggagaagcagaccaacaaccctggcatccgcctcttccagtatgacccccgggactacaagctgctggacatgctgcagtactacctgaacctgacagaggccaacctgaagggggagagcatctggaagctggagtacatcctgacccagacctatgacatcgaggacctgcagcctgagagcctgtatggcctggccaagcagttcaccatcctggacagcaagcagttcatcaagtactacaactacttctttgtgtcctatgacagctctgtgacctgtgacaagacctgcaaggccttccagatctgtgccatcatgaacctggacaacatctcctatgctgactgcctgaagcagctgtacatcaagcacaactactag

SEQ ID NO: 104292 - DNA, 969 bp, Artificial Sequence
  derived and/or modified sequence
atgaccaccaccatccagagcctgttccccaacctgcaggtgttccccgccctggggaatcatgattattggccccaagatcagttaccagttgttacatcaaaggtgtataacgcagtcgctaatctatggaaaccctggctggacgaggaagcgatttctaccttacgaaaggggggtttttattcccagaaagtcactaccaacccaaaccttcgaatcatcagcctgaatactaacctgtattatgggcccaacattatgacgctgaacaagaccgacccagcaaaccaattcgagtggttggagtccaccctgaataacagccaacagaacaaggagaaggtctatattatcgctcatgtcccagttgggtacctgccctcaagccagaatattaccgcgatgcgcgagtactacaacgagaagctgatagacatttttcagaaatattccgatgtcattgccggacagttttacggacatacccatcgggatagcatcatggtattgtcagataagaagggttcaccagtaaacagcctgtttgtggcccctgcggtgacacccgtgaaaagcgtcctggaaaaacaaaccaataatccaggtatacgcttgttccaatacgacccacgggactacaagctgctggatatgctgcagtactacctcaatctcacagaggcaaatcttaaaggtgagtctatctggaaactggaatacattctgactcaaacgtacgacattgaagacctgcagccagaaagcctgtacggtctcgcaaagcagttcaccatccttgatagcaagcaattcattaagtactacaactatttctttgtgtcctatgatagtagcgttacatgcgacaagacttgtaaggctttccagatctgtgccatcatgaacctggacaacatcagctatgctgactgcctgaaacagctgtatatcaagcataattactag

SEQ ID NO: 104293 - DNA, 969 bp, Artificial Sequence
  derived and/or modified sequence
atgacgacaacaattcagtcactttttcccaatttacaggtgtttcccgctctcggcaaccacgattattggccccaggaccagctgccggtggttactagcaaagtctacaacgccgttgccaatttatggaaaccgtggttggacgaggaagccatatccaccctcaggaaaggtggcttttattcacagaaagtcacaaccaacccaaatcttagaatcattagtctgaataccaatctatattatggtccaaacatcatgactctgaataaaacagaccctgctaaccagttcgaatggcttgagagtaccctgaacaatagtcaacaaaataaagagaaagtctacataattgcccatgttccagtaggttaccttccaagtagtcagaacatcacagctatgagggagtattacaatgaaaaactgatcgacatttttcaaaagtactctgatgtaattgccggtcagttctatggacacactcatagggatagcattatggtcctgagtgataagaagggtagtcccgtgaacagcctgttcgtcgcccctgcagtgacacccgtgaagtcagtgctggagaaacagactaacaatccgggtattcgactttttcagtacgacccgagagattacaagttgctggatatgctgcagtattacttaaatctaactgaggccaacttgaagggtgagtctatctggaaattggagtatattttaacgcagacgtatgatattgaggacctgcagcccgagtccctgtacgggctggctaaacagttcacgatcctcgacagcaagcaatttattaagtactataactacttttttgtgtcttatgattcatccgtgacctgcgacaaaacgtgcaaagcttttcaaatctgtgccataatgaacctggacaatatctcctatgcagattgtttgaagcagctgtacatcaagcacaattactag

SEQ ID NO: 104294 - DNA, 762 bp, Artificial Sequence
  derived and/or modified sequence
atgagcatctgcagcagcctggccagaaagttccccaagctgaccatcatcggcgaggaggacctgcccagcgaggaggtggaccaggagctgatcgaggacagccagtgggaggagatcctgaagcagccctgccccagccagtacagcgccatcaaggaggaggacctggtggtgtgggtggaccccctggacggcaccaaggagtacaccgagggcctgctggacaacgtgaccgtgctgatcggcatcgcctacgagggcaaggccatcgccggcgtgatcaaccagccctactacaactacgaggccggccccgacgccgtgctgggcagaaccatctggggcgtgctgggcctgggcgccttcggcttccagctgaaggaggtgcccgccggcaagcacatcatcaccaccaccagaagccacagcaacaagctggtgaccgactgcgtggccgccatgaaccccgacgccgtgctgagagtgggcggcgccggcaacaagatcatccagctgatcgagggcaaggccagcgcctacgtgttcgccagccccggctgcaagaagtgggacacctgcgcccccgaggtgatcctgcacgccgtgggcggcaagctgaccgacatccacggcaacgtgctgcagtaccacaaggacgtgaagcacatgaacagcgccggcgtgctggccaccctgagaaactacgactactacgccagcagagtgcccgagagcatcaagaacgccctggtgccctag

SEQ ID NO: 104295 - DNA, 762 bp, Artificial Sequence
  derived and/or modified sequence
atgtccatctgcagtagcctggcacggaaatttccaaagcttaccataattggcgaagaggatcttcccagtgaagaagtcgaccaggaactcatcgaggatagccaatgggaagaaatactcaagcaaccttgtccatcacagtattctgccattaaggaagaagacctggtggtctgggtggatcccctcgacggaaccaaggaatacaccgagggcttgcttgacaacgtcacggtgttgattggcatcgcgtacgaaggtaaggctatcgcaggtgtcatcaaccagccatactacaactacgaggcgggccccgatgccgtgctagggagaactatttggggcgtgctgggcttgggggccttcgggtttcagctgaaagaagtgcccgccggcaaacacataataactactacacgcagtcattccaacaaactggtgaccgattgtgtggccgctatgaaccccgatgctgtgctccgcgtggggggcgcagggaataagatcattcagctgatcgagggaaaagcaagtgcttacgtgtttgcgagtccaggctgcaagaaatgggatacatgcgcacccgaggtgatcctacacgcagtcggggggaagttgaccgatatacacggaaacgtgctgcagtatcataaggacgtcaagcacatgaattcagctggtgtcctcgccacattgcgtaattacgactattacgcgtctcgggtgcccgaatccatcaagaacgcccttgtcccgtag

SEQ ID NO: 104296 - DNA, 762 bp, Artificial Sequence
  derived and/or modified sequence
atgagcatctgcagcagcctggccaggaagttccccaagctgaccatcattggagaggaggacctgcccagcgaggaggtggaccaggagctgattgaggacagccagtgggaggagatcctgaagcagccctgccccagccagtacagcgccatcaaggaggaggacctggtggtgtgggtggaccccctggatggcaccaaggagtacacagagggcctgctggacaacgtgacagtgctgattggcatcgcctatgagggcaaggccatcgccggggtcatcaaccagccctactacaactatgaggccggcccagatgctgtgctgggccgcaccatctggggcgtgctgggcctgggcgccttcggcttccagctgaaggaggtgcctgctgggaagcacatcatcaccaccaccaggagccacagcaacaagctggtgacagactgtgtggccgccatgaacccagatgctgtgctgcgggtgggcggggccggcaacaagatcatccagctgattgagggcaaggccagcgcctacgtgtttgccagccctggctgcaagaagtgggacacctgtgcccctgaggtgatcctgcatgctgtgggcggcaagctgacagacatccatggaaatgtgctgcagtaccacaaggatgtgaagcacatgaacagcgctggggtgctggccaccctgaggaactatgactactatgccagccgggtgcctgagagcatcaagaatgccctggtgccctag

SEQ ID NO: 104297 - DNA, 762 bp, Artificial Sequence
  derived and/or modified sequence
atgagcatctgcagcagcctggcccggaagttccccaagctgaccataattggcgaagaggacctccccagtgaggaggtcgatcaggaactgatcgaagatagtcagtgggaggaaattttgaagcagccgtgcccctctcagtacagcgcgatcaaggaggaggatctagtagtgtgggttgacccattggatggcacaaaagagtatactgaaggtttactggataacgtcaccgtcctcattggaatcgcctatgagggtaaggccatcgcaggtgtgattaatcagccatactacaattatgaggcaggcccagatgccgtgctcggaagaactatatggggggtactgggtttgggtgcattcgggttccagctcaaagaggtgcctgctggtaaacatatcattacaaccacgcgctctcattctaataagctggtgaccgactgcgtcgctgcaatgaacccggacgcagtgcttagggtgggaggtgcaggaaataagatcattcaactgattgagggaaaggctagcgcctacgtttttgcctctcctggctgtaagaagtgggacacttgtgcgccggaggttatcctccatgcagtcggaggcaaactgaccgatatacatggcaacgtactacagtatcacaaagacgtgaagcacatgaactctgcaggtgtcctggccaccttacgcaactatgactattatgcgtcaagagtgcccgagagcatcaagaacgcccttgtgccctag

SEQ ID NO: 104298 - DNA, 762 bp, Artificial Sequence
  derived and/or modified sequence
atgtcgatttgttcttcactggctaggaagttcccgaaattgaccatcattggagaagaagaccttccatctgaggaagtcgaccaagagctcatagaagattctcagtgggaggagattctcaagcagccttgtcccagccagtatagtgcaatcaaagaggaggatctggtggtatgggtggacccactggatgggactaaggaatatactgagggtcttttggataacgtcactgtgctaatcgggattgcctatgagggaaaggcaatcgccggtgtgatcaatcagccgtattacaactacgaggccggacccgacgccgtgttaggcagaactatctggggcgtactgggcctgggcgcttttggcttccagttgaaggaggtccctgcaggtaagcacattatcaccacaacacgctcccactccaacaaactcgttactgactgcgtcgcggctatgaacccagatgctgttctgagggttggtggtgccggtaacaagattatccagctgatcgaaggaaaagcgtccgcttatgtattcgcctcccctggttgcaaaaagtgggacacctgtgcacctgaagtgatcctccacgctgtcggcggaaaactgaccgacattcatggtaatgtgctgcagtatcacaaggatgtcaagcatatgaattccgcaggagtgttggctacgctccgcaattatgactattatgcttcccgcgttcccgagtctataaagaacgctcttgtcccgtag

SEQ ID NO: 104299 - protein, 272 aa, Artificial Sequence
  derived and/or modified sequence
MASSNTVLMRLVASAYSIAQKAGMIVRRVIAEGDLGIVEKTCATDLQTKADRLAQMSICSSLARKFPKLTIIGEELVVWVDPLDGTKEYTEGLLDNVTVLIGIAYEGKAIAGVINQPYYNYEAGPDAVLGRTIWGVLGLGAFGFQLKEVPAGKHIITTTRSHSNKLVTDCVAAMNPDAVLRVGGAGNKIIQLIEGKASAYVFASPGCKKWDTCAPEVILHAVGGKLTDIHGNVLQYHKDVKHMNSAGVLATLRNYDYYASRVPESIKNALVP

SEQ ID NO: 104300 - DNA, 819 bp, Artificial Sequence
  derived and/or modified sequence
atggccagcagcaacaccgtgctgatgagactggtggccagcgcctacagcatcgcccagaaggccggcatgatcgtgagaagagtgatcgccgagggcgacctgggcatcgtggagaagacctgcgccaccgacctgcagaccaaggccgacagactggcccagatgagcatctgcagcagcctggccagaaagttccccaagctgaccatcatcggcgaggagctggtggtgtgggtggaccccctggacggcaccaaggagtacaccgagggcctgctggacaacgtgaccgtgctgatcggcatcgcctacgagggcaaggccatcgccggcgtgatcaaccagccctactacaactacgaggccggccccgacgccgtgctgggcagaaccatctggggcgtgctgggcctgggcgccttcggcttccagctgaaggaggtgcccgccggcaagcacatcatcaccaccaccagaagccacagcaacaagctggtgaccgactgcgtggccgccatgaaccccgacgccgtgctgagagtgggcggcgccggcaacaagatcatccagctgatcgagggcaaggccagcgcctacgtgttcgccagccccggctgcaagaagtgggacacctgcgcccccgaggtgatcctgcacgccgtgggcggcaagctgaccgacatccacggcaacgtgctgcagtaccacaaggacgtgaagcacatgaacagcgccggcgtgctggccaccctgagaaactacgactactacgccagcagagtgcccgagagcatcaagaacgccctggtgccctag

SEQ ID NO: 104301 - DNA, 819 bp, Artificial Sequence
  derived and/or modified sequence
atggccagctccaatacagtgctaatgcggctcgtagcctctgcctacagcatcgcccaaaaggccggcatgatcgttcggcgagtaatagccgagggagacctgggcattgtcgagaaaacttgtgctactgacctgcaaactaaagcagatcgtctcgctcagatgtccatctgtagttcactggcacgcaagtttccaaagttgaccatcattggcgaagaactggtcgtgtgggtggaccctctagatggaacgaaagaatacaccgaagggcttcttgataatgtcacggtccttatcgggatagcatatgaagggaaagctatcgctggagtgatcaaccaaccttattacaattatgaggcagggcccgacgccgtgctcgggcgtactatctggggtgtgttaggcctgggcgctttcggattccagcttaaggaagttcccgcgggaaagcatatcatcacaacgacacgcagccattctaataagctggtgaccgactgcgttgctgccatgaatcccgacgctgtcctcagggtcggaggagctggaaacaagattatccagctgattgaggggaaagccagtgcgtacgttttcgcctccccaggctgcaagaagtgggatacatgtgctcccgaggtaattctgcacgctgtcggcgggaagctgactgacatccacgggaatgttcttcagtatcacaaggatgtgaaacacatgaactctgccggcgtcctggcaacactgcgcaactatgactattatgcctcgcgagtgcctgaaagcatcaagaacgccctggtcccttag

SEQ ID NO: 104302 - DNA, 819 bp, Artificial Sequence
  derived and/or modified sequence
atggccagcagcaacacagtgctgatgaggctggtggccagcgcctacagcatcgcccagaaggccggcatgattgtgagaagagtgattgctgagggggacctgggcatcgtggagaagacctgtgccacagacctgcagaccaaggctgaccggctggcccagatgagcatctgcagcagcctggccaggaagttccccaagctgaccatcatcggggaggagctggtggtgtgggtggaccccctggatggcaccaaggagtacacagagggcctgctggacaacgtgacagtgctgattggaattgcctatgagggcaaggccatcgccggggtcatcaaccagccctactacaactatgaagctggcccagatgctgtgctgggccgcaccatctggggcgtgctgggcctgggcgccttcggcttccagctgaaggaggtgcctgctgggaagcacatcatcaccaccaccaggagccacagcaacaagctggtgacagactgtgtggccgccatgaacccagatgctgtgctgcgggtgggcggggccggcaacaagatcatccagctgattgagggcaaggccagcgcctacgtgtttgccagccctggctgcaagaagtgggacacctgtgcccctgaggtgatcctgcatgctgtgggcggcaagctgacagacatccacggcaatgtgctgcagtaccacaaggatgtgaagcacatgaacagcgctggggtgctggccaccctgagaaattatgactactatgccagccgggtgcctgagagcatcaagaatgccctggtgccctag

SEQ ID NO: 104303 - DNA, 819 bp, Artificial Sequence
  derived and/or modified sequence
atggccagcagcaacaccgtgctgatgcggctggtggccagcgcctactccatcgcccagaaggcgggcatgatagtgcggcgtgtaatcgcagaaggtgatctgggaatcgtagagaaaacatgtgctactgatcttcagacgaaggccgacaggcttgctcaaatgtctatatgctcgagcctggcccggaagttcccaaaactgaccataatcggtgaggagctggtggtttgggtggatccgttagacggcacaaaggaatacactgaaggtctccttgacaacgtaacggtacttatcggcatagcctacgagggtaaggcaatcgccggtgttattaatcaaccttactataattacgaggctggccccgacgccgtattgggacgaacaatctggggcgtgctgggcctgggagctttcggattccagctgaaggaggttccagccggcaagcacatcattactacaaccaggtcacacagcaacaaattagttactgactgcgtagctgccatgaatcctgatgcggtacttcgcgttggcggtgccgggaacaagatcatccaactcattgagggtaaggcctccgcctacgtgtttgcatcgccagggtgcaagaaatgggatacctgtgctcccgaagtcatactgcacgcagtggggggcaagctgactgacatccacggaaacgtgcttcaataccacaaagacgtgaaacacatgaacagtgcgggagttctcgcaacattgcgtaattacgattattacgctagccgggtgccagagagtattaaaaatgccctggtgccttag

SEQ ID NO: 104304 - DNA, 1184 bp, Artificial Sequence
  derived and/or modified sequence
aaaagacttattgacagtgccaaagctcggtactggacacaacgagggacctgggtctacgataacgcgcttttgctcctcctgaagtgtctttggtccaacgttgttccagagtgtaccatggcttccagtaacactgtgttgatgcggttggtagcctccgcatattctattgctcaaaaggcaggaatgatagtcagacgtgttattgctgaaggagacctgggtattgtggagaagacctgtgcaacagacctgcagaccaaagctgaccgattggcacagatgagcatatgttcttcattggcccggaaattccccaaactcacaattataggggaagagctcgtggtctgggttgatcctctggatggaaccaaggaatataccgaaggtcttcttgacaatgtaacagttcttattggaattgcttatgaaggaaaagccatagcaggagttattaaccagccatattacaactatgaggcaggaccagatgctgtgttggggaggacaatctggggagttttaggtttaggcgcctttgggtttcagctgaaagaagtccctgctgggaaacacattatcacaactactcgatcccatagcaacaagttggttactgactgtgttgctgctatgaaccccgatgctgtgctgcgagtaggaggagcaggaaataagattattcagctgattgaaggcaaagcctctgcttatgtatttgcaagtcctggttgtaagaagtgggatacttgtgctccagaagttattttacatgctgtgggaggcaagttaaccgatatccatgggaatgttcttcagtaccacaaggatgtgaagcatatgaactctgcaggagtcctggccacactgaggaattatgactactatgcaagccgagttccagaatctattaaaaatgcacttgttccttaaaggaaagtttcatttggccgggcgcggtggctcatgcctgtaatcccagcactttgggaggccgaggcaggtggatcacttgagctcaggagtttgagaccagcctgggcaatatcgtgagaccccatctctacaaaaatacaaattaactgggcatcctgtcatgcgcctgtcatcccagctacttgagaggctgaagcagaagaatctcttgagcccggaaggcagaggttgcagtgagctga

SEQ ID NO: 104305 - DNA, 819 bp, Artificial Sequence
  derived and/or modified sequence
atggcatcttccaatacagtcctcatgcggttggtcgcatccgcctacagtatcgcccagaaggcgggtatgattgtgcgacgggtcatcgcggaaggcgatcttggaatcgttgagaagacatgtgcgacggacttacagacaaaagcagatagactggcgcagatgtcaatttgttccagtctagccaggaagttcccaaaactaaccattatcggggaagagctggttgtctgggtggaccccctggatggcactaaggagtacacggaaggcctattggataatgtgacagtactgatcggaattgcctacgaagggaaggctatagccggagtgataaaccagccctactacaactatgaggccggtcctgatgctgtccttgggcgaacaatttggggggttttgggcctgggcgcttttggatttcagctgaaagaagtacccgcaggaaagcacattatcacaaccaccagatcacactccaacaagctggtgactgattgcgttgcagccatgaaccccgatgctgtcctgcgcgtgggcggtgcagggaacaagatcatccaactgattgaagggaaggcctcggcctatgtcttcgcttcacccggatgcaaaaaatgggacacatgtgcgcctgaggtcatcctccacgccgttggtggcaagcttacggatattcatggaaatgtattacagtaccacaaagatgtcaagcacatgaactccgccggagttctggcaacgctgcgaaactatgactactacgccagcagagtacctgagtcgattaagaacgcgctggttccgtag

SEQ ID NO: 104306 - protein, 223 aa, Artificial Sequence
  derived and/or modified sequence
MQQRGAAGSRGCALFPLLGVLFFQDAHVRGYVGEKIKLKCTFKSTSDVTDKLTIDWTYRPPSSSHTVSIFHYQSFQYPTTAGTFRDRISWVGNVYKGDASISISNPTIKDNGTFSCAVKNPPDVHHNIPMTELTVTERGFGTMLSSVALLSILVFVPSAVVVALLLVRMGRKAAGLKKRSRSGYKKSSIEVSDDTDQEEEEACMARLCVRCAECLDSDYEETY

SEQ ID NO: 104307 - DNA, 672 bp, Artificial Sequence
  derived and/or modified sequence
atgcagcagaggggagcggcgggaagccgcggctgcgccctgttcccactcttaggagtattgtttttccaggacgcccacgttcgaggatacgtgggtgagaaaattaaactcaaatgcacattcaagtcaacgagcgatgtgaccgacaagctgacaattgattggacatacagaccacccagtagcagccacactgtttccatcttccattaccagagtttccagtaccctacgacggccggcacatttcgggatcgcatctcatgggtgggtaatgtttacaagggggatgccagcatttccatcagcaatccaactataaaagacaacggaactttcagctgtgccgtgaaaaaccccccagacgtacaccacaatatccccatgactgaactgaccgtcactgagcgggggtttggtaccatgttgagcagcgtggctctccttagtattctggtcttcgtgccgtccgctgtggttgtggccttgttactggtcaggatggggcggaaagcagctggtctaaagaagcgctcccgcagtggatacaaaaaatctagcattgaagtttccgacgatactgaccaggaggaagaagaagcttgcatggcccgcttatgtgtgagatgtgctgagtgtctggacagtgattacgaggaaacctattag

SEQ ID NO: 104308 - DNA, 672 bp, Artificial Sequence
  derived and/or modified sequence
atgcagcagagaggagctgctggcagccggggctgtgccctcttccccctgctgggcgtgctcttcttccaggatgcccacgtgcggggctacgtgggggagaagatcaagctgaagtgcaccttcaagagcaccagtgatgtgacagacaagctgaccatcgactggacctaccggccccccagcagcagccacacagtgtccatcttccactaccagagcttccagtaccccaccacagctggcaccttccgggaccgcatctcctgggtgggcaatgtgtacaagggagatgccagcatcagcatcagcaaccccaccatcaaggacaatggcaccttcagctgtgctgtgaagaaccccccagatgtgcaccacaacatccccatgacagagctgactgtgacagagcggggcttcggcaccatgctgagctctgtggccctgctgagcatcctggtgtttgtgcccagcgctgtggtggtggccctgctgctggtgaggatgggcaggaaggccgccggcctgaagaagaggagccgcagcggctacaagaagagcagcattgaggtgtctgatgacacagaccaggaggaggaggaggcctgcatggcccggctgtgtgtgcgctgtgctgaatgtctggacagcgactatgaggagacctactag

SEQ ID NO: 104309 - DNA, 1381 bp, Artificial Sequence
  derived and/or modified sequence
gtcgttaccgggagctgtaaacaaggtgtgcaagcatctgaagagctgccgggatgcagcagagaggagcagctggaagccgtggctgcgctctcttccctctgctgggcgtcctgttcttccaggatgcccatgtccgaggttatgttggagaaaagatcaagttgaaatgcactttcaagtcaacttcagatgtcactgacaaacttactatagactggacatatcgccctcccagcagcagccacacagtatcaatatttcattatcagtctttccagtacccaaccacagcaggcacatttcgggatcggatttcctgggttggaaatgtatacaaaggggatgcatctataagtataagcaaccctaccataaaggacaatgggacattcagctgtgctgtgaagaatcccccagatgtgcatcataatattcccatgacagagctaacagtcacagaaaggggttttggcaccatgctttcctctgtggcccttctttccatccttgtctttgtgccctcagccgtggtggttgctctgctgctggtgagaatggggaggaaggctgctgggctgaagaagaggagcaggtctggctataagaagtcatctattgaggtttccgatgacactgatcaggaggaggaagaggcgtgtatggcgaggctttgtgtccgttgcgctgagtgcctggattcagactatgaagagacatattgatgaaagtctgtatgacacaagaagagtcacctaaagacaggaaacatcccattccactggcagctaaagcctgtcagagaaagtggagctggcctggaccatagcgatggacaatcctggagatcatcagtaaagactttaggaaccacttatttattgaataaatgttcttgttgtatttataaactgttcaggaactctcataagagactcatgacttcccctttcaatgaattatgctgtaattgaatgaagaaattcttttcctgagcaaaaagatactttttgattcatctttgctctggaatgtattacatgttttcttccaactgtttgaaggagaattttgaatgtttgccacaccgctgatacccaaataattttttaaatgaagtggagcttgtggcttcctgatgtgtcaccagacaaaatattcgcttgggatatgtattctttgttttttgctccatgtacactttcagctgtgagttagtatagggcgtatacttaccggtttaatgacctcaacctcagttgtgtttggataacttagggtgtatacccttagtttccttagagttggtaggatcaagtcattggtttgctttgactgggtttttaaagtattaagtacagtgtcatcaatttacagttaa

SEQ ID NO: 104310 - DNA, 672 bp, Artificial Sequence
  derived and/or modified sequence
atgcagcagcggggcgccgccggcagccggggctgcgccctgttccccttactgggcgtgttgtttttccaggacgctcatgtgagaggctacgtgggggaaaagataaagctgaaatgtacgttcaaaagcacctcagatgttaccgataagctgactattgattggacctacagacctccttcttcctcccatacggtcagcatttttcattatcaaagcttccagtaccctactacggcaggcaccttcagggaccgcattagttgggtgggaaacgtgtataagggtgacgcatcaattagtatctcaaatccgaccatcaaggacaatggcaccttctcatgtgcagtgaaaaaccctcctgatgtgcaccataatatccctatgacagagctcactgttaccgagagaggcttcggcaccatgctatctagtgtggcgctcctgtccattcttgtgttcgtgccttccgctgttgtggtggctttgctgctggtgcgcatggggcggaaggcggctggcctgaagaaacgttcccgatcaggctataaaaagtcctccatagaggtttcggatgataccgatcaggaggaggaggaggcctgtatggctcgtctgtgtgtgcggtgcgccgaatgcctggatagtgattatgaggagacctactag

SEQ ID NO: 104311 - DNA, 672 bp, Artificial Sequence
  derived and/or modified sequence
atgcagcaaaggggcgcagctggctcaagaggatgcgccctcttccctctgctcggggttctgttcttccaggatgcgcacgtgagaggctatgtcggggaaaagatcaagctgaaatgtaccttcaaaagtacgagcgatgttaccgacaaactgacaatcgattggacctaccggccaccttcttcctcgcataccgtctcaatctttcactaccaaagtttccaataccccacgacggcaggaacctttcgtgatcgcatatcatgggtcgggaacgtatacaagggagacgcatctatctcgatctcaaatcccaccataaaggataatggcaccttctcttgcgcggtgaagaacccccctgacgtccaccataacatccctatgactgaacttaccgtaaccgagagaggtttcggaaccatgctgagtagtgtggccctgctgagcatcttggtgttcgtgccaagcgcagtggtggtggcactccttctcgtgaggatgggtcgaaaggccgcaggcctcaagaagcggtctcgaagcggctacaaaaagtcctccattgaggtgtccgacgacacagaccaagaggaagaagaggcatgcatggccaggctgtgcgtgcgctgtgctgagtgcctggatagcgattacgaagaaacctattag

SEQ ID NO: 104312 - DNA, 672 bp, Artificial Sequence
  derived and/or modified sequence
atgcagcagagaggcgccgccggcagcagaggctgcgccctgttccccctgctgggcgtgctgttcttccaggacgcccacgtgagaggctacgtgggcgagaagatcaagctgaagtgcaccttcaagagcaccagcgacgtgaccgacaagctgaccatcgactggacctacagaccccccagcagcagccacaccgtgagcatcttccactaccagagcttccagtaccccaccaccgccggcaccttcagagacagaatcagctgggtgggcaacgtgtacaagggcgacgccagcatcagcatcagcaaccccaccatcaaggacaacggcaccttcagctgcgccgtgaagaacccccccgacgtgcaccacaacatccccatgaccgagctgaccgtgaccgagagaggcttcggcaccatgctgagcagcgtggccctgctgagcatcctggtgttcgtgcccagcgccgtggtggtggccctgctgctggtgagaatgggcagaaaggccgccggcctgaagaagagaagcagaagcggctacaagaagagcagcatcgaggtgagcgacgacaccgaccaggaggaggaggaggcctgcatggccagactgtgcgtgagatgcgccgagtgcctggacagcgactacgaggagacctactag

SEQ ID NO: 104313 - protein, 413 aa, Artificial Sequence
  derived and/or modified sequence
MENSGKANKKDTHDGPPKEIKLPTSEALLDYQCQIKEDAVEQFMFQIKTLRKKNQKYHERNSRLKEEQIWHIRHLLKELSEEKAEGLPVVTREDVEEAMKEKWKFERDQEKNLRDMRMQISNAEKLFLEKLSEKEYWEEYKNVGSERHAKLITSLQNDINTVKENAEKMSEHYKITLEDTRKKIIKETLLQLDQKKEWATQNAVKLIDKGSYLEIWENDWLKKEVAIHRKEVEELKNAIHELEAENLVLIDQLSNCRLVDLKIPRRLYLTQAAGLEVPPEEMSLELPETHIEEKSELQPTEVESRDLMSSSDESTILHLSHENSIEDLQYVKIDKEENSGTEFGDTDMKYLLYEDEKDFKDYVNLGPLGVKLMSVESKKMPIHFQEKEIPVKLYKDVRSPESHITYKMMKSFL

SEQ ID NO: 104314 - DNA, 1242 bp, Artificial Sequence
  derived and/or modified sequence
atggagaacagcggcaaggccaacaagaaggacacccacgacggcccccccaaggagatcaagctgcccaccagcgaggccctgctggactaccagtgccagatcaaggaggacgccgtggagcagttcatgttccagatcaagaccctgagaaagaagaaccagaagtaccacgagagaaacagcagactgaaggaggagcagatctggcacatcagacacctgctgaaggagctgagcgaggagaaggccgagggcctgcccgtggtgaccagagaggacgtggaggaggccatgaaggagaagtggaagttcgagagagaccaggagaagaacctgagagacatgagaatgcagatcagcaacgccgagaagctgttcctggagaagctgagcgagaaggagtactgggaggagtacaagaacgtgggcagcgagagacacgccaagctgatcaccagcctgcagaacgacatcaacaccgtgaaggagaacgccgagaagatgagcgagcactacaagatcaccctggaggacaccagaaagaagatcatcaaggagaccctgctgcagctggaccagaagaaggagtgggccacccagaacgccgtgaagctgatcgacaagggcagctacctggagatctgggagaacgactggctgaagaaggaggtggccatccacagaaaggaggtggaggagctgaagaacgccatccacgagctggaggccgagaacctggtgctgatcgaccagctgagcaactgcagactggtggacctgaagatccccagaagactgtacctgacccaggccgccggcctggaggtgccccccgaggagatgagcctggagctgcccgagacccacatcgaggagaagagcgagctgcagcccaccgaggtggagagcagagacctgatgagcagcagcgacgagagcaccatcctgcacctgagccacgagaacagcatcgaggacctgcagtacgtgaagatcgacaaggaggagaacagcggcaccgagttcggcgacaccgacatgaagtacctgctgtacgaggacgagaaggacttcaaggactacgtgaacctgggccccctgggcgtgaagctgatgagcgtggagagcaagaagatgcccatccacttccaggagaaggagatccccgtgaagctgtacaaggacgtgagaagccccgagagccacatcacctacaagatgatgaagagcttcctgtag

SEQ ID NO: 104315 - DNA, 1969 bp, Artificial Sequence
  derived and/or modified sequence
gttcttgggccgttaggagctgctgggaagggctctgataggcccactcctcttctccacccaggagatgagaaggagggcaggcctttttaatctgatcagaatgttaacccatctctccgccttgcggtagaacccctggatacattatttgccctctcgaaaggcaggctctgaatttgattcaggtatatttcttcatagctaaccagcacaatggaaaactcagggaaagcaaataaaaaggatacacatgacgggccaccaaaagaaattaaactgcctaccagtgaagcacttctagactatcaatgtcaaataaaggaagatgccgtggagcaattcatgtttcaaataaagacacttaggaaaaagaaccaaaaatatcatgaaagaaatagccgcttaaaagaagaacagatttggcacatacggcatctactaaaggaactgagtgaagagaaggcagagggattgccagttgtaacaagagaggatgttgaagaagcgatgaaggaaaaatggaagtttgaaagagaccaggaaaaaaacttgagagatatgcgcatgcaaataagtaatgctgagaaactatttcttgagaaactcagtgaaaaggaatattgggaggagtacaagaatgtagggagtgaacgacatgctaaactcattacctccttacaaaatgacatcaacacagttaaagagaatgcagagaaaatgtcagaacactataaaatcactctggaagatactagaaagaaaataatcaaggaaactttgttgcaactggaccaaaagaaggaatgggccacacagaatgctgtaaagctcattgacaagggcagttatctagagatctgggagaatgactggctcaaaaaagaggttgcaattcacaggaaggaagttgaagaattaaaaaatgctattcatgaactggaagcagaaaatttggtgcttattgatcaactatccaactgtagacttgtggatctcaagatacccaggcgactatatcttacccaagctgctggactagaagtgccacctgaagaaatgtctttggaattgccagaaacacatatagaagagaagtcagaattgcaacccacagaagtagaaagtagagacttgatgtcctcatcagatgagagcactatcttacatcttagtcatgaaaatagcatcgaagatctccagtatgtgaagatagataaagaggaaaactcaggcacagagtttggggacactgatatgaagtacttactatatgaggatgagaaggatttcaaggattatgtaaacttgggccccctgggagtgaagcttatgagtgtggagagcaagaaaatgcccattcattttcaagagaaggaaattccagtcaaactctataaagatgtcaggagcccagaaagccacatcacatataagatgatgaagtcttttctctaagacggaaagctgcaaaggaaacacaacttttccttataaatgttctttgggaactgaagtatatccgttgcccattttacttacactttggctcatttttaaaccagctgttatttctaaaggtcatatttacatttaaaatcaaaggtattcagctattcatttacttgcatggtatgagtgaccaaaacggaagcacgctttgtatttctacactgaagtattcagaagcatgacagtgggttcaaggtagtctctgaggttccttttcacacacaaaaaattcactgattaatctgtgattccagtatgaaatagttccattagaaatgtttctaagaaaaacttagaagtttgcatagcattgtctacacatctttccctctgaggatgctcaatgtgatagacagccagtctataatgcaagccaattctccgtagtttaaccctgtgtattagtctgttctcatgctgctaataaagacataattgaaactgggtaatttataaa

SEQ ID NO: 104316 - DNA, 1242 bp, Artificial Sequence
  derived and/or modified sequence
atggaaaacagtggcaaagctaataagaaagatacccatgacggaccaccaaaggagatcaaactgcccacctccgaagcacttttggactaccagtgccagataaaagaggatgccgtcgaacagttcatgtttcagatcaagaccttgcgaaaaaaaaaccagaagtaccatgaaagaaatagtcgactgaaggaagagcagatttggcacattcggcatcttctaaaggaattatccgaggagaaagccgagggacttcccgtggtaactagagaagacgttgaggaagccatgaaggagaaatggaagttcgagagagatcaagagaaaaatctgagggacatgcgcatgcaaatctccaatgccgagaaactgttcctcgagaagcttagtgaaaaagaatactgggaggaatataagaacgtaggttccgaacgccacgccaagctaattactagcctgcaaaacgatattaacaccgtcaaagaaaacgcagaaaagatgagtgagcactataagattacactggaggacactcggaagaaaatcatcaaagagactctgttgcagttggatcagaaaaaagagtgggcgacccaaaacgcagtcaagttaatagataaagggagctatctcgagatctgggagaatgattggctcaagaaggaggtggccatccatcgtaaagaagttgaagaattgaagaacgctatccatgaacttgaagccgagaacctcgtcctcatcgaccaactttcgaattgccggctggtggatttgaaaatcccaagaaggctgtacctcacacaggccgcaggtcttgaggttcctcctgaggagatgtccctggagctgccggaaacacacatcgaggagaaatctgagttgcagcccaccgaagtggagtctagagatctgatgtcaagttcagacgagagtaccatcctccatctgtcacacgaaaacagcattgaagacctacagtatgtgaagatcgacaaggaggaaaactccggaactgaattcggggatacagacatgaagtatttgctgtacgaagatgaaaaggattttaaagactatgtgaatctcggtcctctcggggtaaagctaatgagtgttgaatccaagaaaatgcccatccactttcaggaaaaggaaattccagttaaactctataaggatgtgcgtagtcccgagtctcatattacctacaagatgatgaagtctttcttgtag

SEQ ID NO: 104317 - DNA, 1242 bp, Artificial Sequence
  derived and/or modified sequence
atggagaacagcggcaaggccaacaagaaggacacccatgatggcccccccaaggagatcaagctgcccaccagcgaggccctgctggactaccagtgccagatcaaggaggatgctgtggagcagttcatgttccagatcaagaccctgaggaagaagaaccagaagtaccacgagaggaacagccggctgaaggaggagcagatctggcacatccgccacctgctgaaggagctgtctgaggagaaggccgagggcctgcctgtggtgaccagagaagatgtggaggaggccatgaaggagaagtggaagtttgagcgggaccaggagaagaacctgcgggacatgaggatgcagatcagcaatgctgagaagctgttcctggagaagctgtctgagaaggagtactgggaggagtacaagaatgtgggcagcgagagacatgccaagctgatcaccagcctgcagaatgacatcaacacagtgaaggaaaatgctgagaagatgtctgagcactacaagatcaccctggaggacaccaggaagaagatcatcaaggagaccctgctgcagctggaccagaagaaggagtgggccacccagaatgctgtgaagctgattgacaagggcagctacctggagatctgggagaatgactggctgaagaaggaggtggccatccacaggaaggaggtggaggagctgaagaatgccatccacgagctggaggccgagaacctggtgctgattgaccagctgagcaactgccgcctggtggacctgaagatcccccggcggctgtacctgacccaggccgccggcctggaggtgcccccagaggagatgagcctggagctgcctgagacccacatcgaggagaagtctgagctgcagcccacagaggtggagagccgggacctgatgagcagcagtgatgagagcaccatcctgcacctgagccatgagaacagcattgaggacctgcagtatgtgaagattgacaaggaggagaacagcggcacagaatttggagacacagacatgaagtacctgctgtatgaagatgagaaggacttcaaggactatgtgaacctgggccccctgggcgtgaagctgatgtctgtggagagcaagaagatgcccatccacttccaggagaaggagatccctgtgaagctgtacaaggatgtgcgcagccctgagagccacatcacctacaagatgatgaagagcttcctgtag

SEQ ID NO: 104318 - DNA, 1242 bp, Artificial Sequence
  derived and/or modified sequence
atggagaacagcggcaaggccaacaagaaggacacccacgacggccccccaaaggagattaaattacctaccagtgaggctctccttgattatcagtgtcaaattaaggaagatgctgtggaacagtttatgtttcagattaagacactgcggaaaaagaatcagaaataccatgaacgaaacagccggctgaaggaggagcagatctggcacatacggcatcttttgaaggagctgtcagaggaaaaagctgagggactgcctgttgtaacacgcgaggacgtggaggaagccatgaaagaaaaatggaagtttgaacgcgatcaggaaaagaatcttcgagacatgcgtatgcagatcagtaacgcggaaaagctgtttctggaaaaattaagtgaaaaggaatactgggaggagtacaaaaatgtggggtccgaaagacatgccaagctgattacctcacttcagaacgatattaacactgtaaaggagaacgccgagaagatgagcgagcactataagatcactctggaagatacccgtaagaagatcattaaagaaacattactgcaactagaccagaagaaagagtgggcaacacagaatgccgtgaaactgatcgacaagggatcatatctcgaaatctgggaaaacgactggctgaagaaagaggtcgctattcacagaaaggaagtagaggaactgaaaaatgctattcacgaactcgaagctgagaacttggtcctcattgatcaactgagcaactgccgactggtggaccttaaaatcccacggagactgtatttaactcaggctgcaggcttggaggttccacccgaagagatgagcttggaactccccgaaactcacatcgaagaaaagtctgagctccagccaaccgaagtggaaagtagagacctgatgtcctcaagtgacgagtctaccatcctgcatctgtcccacgagaacagtattgaggatcttcagtacgtgaaaattgacaaggaagaaaattccggaacggagttcggcgatactgacatgaagtacctactgtacgaggacgagaaagatttcaaagattacgtgaatctgggaccgctgggcgtgaaattgatgagcgtggagtccaagaaaatgcccattcattttcaggagaaggaaatacccgtgaagctatataaagacgtgagaagccctgagtctcacataacatataaaatgatgaagagttttttgtag

SEQ ID NO: 104319 - DNA, 1242 bp, Artificial Sequence
  derived and/or modified sequence
atggagaactctggcaaggctaataaaaaggatacccacgacggccctcccaaggagatcaagctccccacctcagaggccttgctcgactatcagtgtcagattaaagaggacgctgtggaacagttcatgttccagatcaaaacactgcgcaagaaaaaccagaagtatcacgagagaaattctagactgaaggaagagcagatctggcatatccggcacctcctgaaggagttgagtgaggaaaaggcggaagggttaccagtggtaaccagagaggatgtagaagaggctatgaaggaaaagtggaaatttgagagagaccaggaaaagaatttgcgggacatgagaatgcaaatcagtaacgcagaaaagctatttcttgagaaactgagcgagaaggagtactgggaagaatacaaaaacgttggatctgaacgtcacgcgaaactgatcacgtccctgcagaacgacatcaatactgttaaggaaaacgctgaaaagatgagcgaacactacaagatcactctggaggacactaggaaaaaaattattaaagagactctgctgcaactggaccagaagaaggagtgggcaacccagaatgccgtgaaactgatagataaaggaagctacctggaaatctgggagaatgattggctcaaaaaggaggtcgccatccaccgcaaagaggtggaggaactcaagaacgcaatacacgaactggaggccgagaacctagttttaattgatcagctgagcaattgtcggctggtggatcttaagattccccgacgcttgtacctgactcaggctgccggactggaggtgcctccagaggagatgtcgctggaactgccagagacccacatcgaagagaagtccgaactgcagcccactgaggtggagtctagagatcttatgagcagttccgatgagtcgaccatccttcacctcagtcacgaaaatagcatagaggacctgcagtacgtgaagatagacaaggaagagaacagcgggactgaattcggagacacagatatgaagtacctgctgtatgaggacgaaaaagattttaaagattacgtcaatctcggccctctgggagtgaaactgatgagtgtggagagtaaaaaaatgcctatccactttcaagagaaggagattcccgtgaaactctacaaggatgtcaggtccccagaatcacacatcacgtataaaatgatgaagagtttcctttag

SEQ ID NO: 104320 - protein, 322 aa, Artificial Sequence
  derived and/or modified sequence
MVADLELQQDLIVPLGHTPSQEHFLFEIFRRRLQALTSGWSVAASLQRQRELLMYKRILLRLPSSVLCGSSFQAEQPITARCEQFFHLVNSEMRNFCSHGGALTQDITAHFFRGLLNACLRSRDPSLMVDFILAKCQTKCPLILTSALVWWPSLEPVLLCRWRRHCQSPLPRELQKLQEGRQFASDFLSPEAASPAPNPDWLSAAALHFAIQQVREENIRKQLKKLDCEREELLVFLFFFSLMGLLSSHLTSNSTTDLPKAFHVCAAILECLEKRKISWLALFQLTESGKKHAAEAQMRRAALFRGILQMVKNEPSLRFLAK

SEQ ID NO: 104321 - protein, 856 aa, Artificial Sequence
  derived and/or modified sequence
MSGELQRKIGLKVLEMRGNAVVGYLQCFDLEGESGLVVRAIGTACTLDKLSSPAAFLPACNSPSKEMKESPLVHPPSHGCRSTHNSPIHTATGSRLTQNFSVSVPTLIYTGMGSGSAGKEGGPFKALLRQQTQSALEQREFPFFTLTAFPPGFLVHVGGVVSARSVKLLDRIHNPAFVGIMGNTRSYKLLDWNSFNSDEPETRDAWWAEIRQEIKSHAKALGCHAVVGYSESTSICEEVCILSASGTAAVLNPRFLQDGTVEGCLEQRLEENLPTRCGFCHIPYDELNMPFPAHLTYCYNCRKQKVPDVLFTTIDLPTDATVIGKGCLIQARLCRLKKKAQAEANATAISNLLPFMEYEVHTQLMNKLKLKGMNALFGLRIQITVGENMLMGLASATGVYLAALPTPGGIQIAGKTPNDGSYEQHISHMQKKINDTIAKNKELYEINPPEISEEIIGSPIPEPRQRSRLLRSQSESSDEVTELDLSHGKKDAFVLEIDDTDAMEDVHSLLTDVPPPSGFYSCNTEIMPGINNWTSEIQMFTSVRVIRLSSLNLTNQALNKNFNDLCENLLKSLYFKLRSMIPCCLCHVNFTVSLPEDELIQVTVTAVAITFDKNQALQTTKTPVEKSLQRASTDNEELLQFPLELCSDSLPSHPFPPAKEHLESASSNSGIPAAQRDRCSSWIELIKLKAQTIRRGSIKTTMTVEKASPVGDGNFRNRSAPPCANSTVGVVKMTPLSFIPGAKITKYLGIINMFFIRETTSLREEGGVSGFLHAFIAEVFAMVRAHVAALGGNAVVSYIMKQCVFMENPNKNQAQCLINVSGDAVVFVRESDLEVVSSQQPTTNCQSSCTEGEVTT

SEQ ID NO: 104322 - DNA, 2571 bp, Artificial Sequence
  derived and/or modified sequence
atgagcggcgagctgcagagaaagatcggcctgaaggtgctggagatgagaggcaacgccgtggtgggctacctgcagtgcttcgacctggagggcgagagcggcctggtggtgagagccatcggcaccgcctgcaccctggacaagctgagcagccccgccgccttcctgcccgcctgcaacagccccagcaaggagatgaaggagagccccctggtgcacccccccagccacggctgcagaagcacccacaacagccccatccacaccgccaccggcagcagactgacccagaacttcagcgtgagcgtgcccaccctgatctacaccggcatgggcagcggcagcgccggcaaggagggcggccccttcaaggccctgctgagacagcagacccagagcgccctggagcagagagagttccccttcttcaccctgaccgccttcccccccggcttcctggtgcacgtgggcggcgtggtgagcgccagaagcgtgaagctgctggacagaatccacaaccccgccttcgtgggcatcatgggcaacaccagaagctacaagctgctggactggaacagcttcaacagcgacgagcccgagaccagagacgcctggtgggccgagatcagacaggagatcaagagccacgccaaggccctgggctgccacgccgtggtgggctacagcgagagcaccagcatctgcgaggaggtgtgcatcctgagcgccagcggcaccgccgccgtgctgaaccccagattcctgcaggacggcaccgtggagggctgcctggagcagagactggaggagaacctgcccaccagatgcggcttctgccacatcccctacgacgagctgaacatgcccttccccgcccacctgacctactgctacaactgcagaaagcagaaggtgcccgacgtgctgttcaccaccatcgacctgcccaccgacgccaccgtgatcggcaagggctgcctgatccaggccagactgtgcagactgaagaagaaggcccaggccgaggccaacgccaccgccatcagcaacctgctgcccttcatggagtacgaggtgcacacccagctgatgaacaagctgaagctgaagggcatgaacgccctgttcggcctgagaatccagatcaccgtgggcgagaacatgctgatgggcctggccagcgccaccggcgtgtacctggccgccctgcccacccccggcggcatccagatcgccggcaagacccccaacgacggcagctacgagcagcacatcagccacatgcagaagaagatcaacgacaccatcgccaagaacaaggagctgtacgagatcaacccccccgagatcagcgaggagatcatcggcagccccatccccgagcccagacagagaagcagactgctgagaagccagagcgagagcagcgacgaggtgaccgagctggacctgagccacggcaagaaggacgccttcgtgctggagatcgacgacaccgacgccatggaggacgtgcacagcctgctgaccgacgtgcccccccccagcggcttctacagctgcaacaccgagatcatgcccggcatcaacaactggaccagcgagatccagatgttcaccagcgtgagagtgatcagactgagcagcctgaacctgaccaaccaggccctgaacaagaacttcaacgacctgtgcgagaacctgctgaagagcctgtacttcaagctgagaagcatgatcccctgctgcctgtgccacgtgaacttcaccgtgagcctgcccgaggacgagctgatccaggtgaccgtgaccgccgtggccatcaccttcgacaagaaccaggccctgcagaccaccaagacccccgtggagaagagcctgcagagagccagcaccgacaacgaggagctgctgcagttccccctggagctgtgcagcgacagcctgcccagccaccccttcccccccgccaaggagcacctggagagcgccagcagcaacagcggcatccccgccgcccagagagacagatgcagcagctggatcgagctgatcaagctgaaggcccagaccatcagaagaggcagcatcaagaccaccatgaccgtggagaaggccagccccgtgggcgacggcaacttcagaaacagaagcgcccccccctgcgccaacagcaccgtgggcgtggtgaagatgacccccctgagcttcatccccggcgccaagatcaccaagtacctgggcatcatcaacatgttcttcatcagagagaccaccagcctgagagaggagggcggcgtgagcggcttcctgcacgccttcatcgccgaggtgttcgccatggtgagagcccacgtggccgccctgggcggcaacgccgtggtgagctacatcatgaagcagtgcgtgttcatggagaaccccaacaagaaccaggcccagtgcctgatcaacgtgagcggcgacgccgtggtgttcgtgagagagagcgacctggaggtggtgagcagccagcagcccaccaccaactgccagagcagctgcaccgagggcgaggtgaccacctag

SEQ ID NO: 104323 - DNA, 2571 bp, Artificial Sequence
  derived and/or modified sequence
atgtctggtgaactacaacgtaaaattggcctgaaagtccttgagatgcgcggaaatgcagtggtgggatatctccagtgttttgatctggagggggagtccgggctggtggttcgcgccatcggcaccgcatgcacactggataagctttcgtctcccgcggcctttctgccagcatgcaatagcccgagcaaagaaatgaaagagtctccgctagttcatcctcccagccacggctgccgctctacccacaattcacccattcacaccgcaacaggcagcaggctgacgcagaacttctctgtgtccgttccgacgttgatttacactggcatgggctcaggaagcgctggaaaggagggagggcccttcaaagccctgctcagacagcagactcagagcgccttggagcagagagagtttcccttcttcaccctgaccgctttccctcccgggttccttgtgcacgtcggcggggtagtgtccgctagatccgttaagctactggaccgcatccataaccccgccttcgtcgggatcatggggaacacgcgctcttataagcttctggactggaacagcttcaactcggatgagccagagacacgtgacgcttggtgggccgagattaggcaggagatcaagtcccacgctaaagcccttgggtgtcatgccgtggttggctatagcgaatccaccagtatttgtgaggaggtatgcattctgagcgcttctggcacagccgcagtcctgaacccccgcttccttcaagatgggaccgtggaaggctgcctcgaacaaagactcgaggaaaatcttccaactcggtgcggtttctgccacatcccgtatgacgaactgaatatgcctttcccagctcatctgacgtattgttataattgcagaaagcagaaagttcctgatgtactatttacaacaatagacctgcccacagacgcaacagtgattggtaaagggtgcctgatccaggctcgcctgtgtagactgaaaaaaaaggcccaggccgaggccaacgccaccgctatctcaaaccttctccctttcatggagtacgaggtccacactcagctgatgaacaagctgaaacttaaagggatgaatgcgttgtttgggttacgcattcagattaccgtgggggaaaatatgcttatgggcctggcgagcgccaccggcgtgtacctggctgctctgcctacccccgggggaatccagatagcaggcaagaccccaaatgacgggagctatgagcagcacatttcccacatgcagaaaaaaatcaacgacaccatagcaaagaataaggagctttacgagattaatccccctgaaatctccgaggagatcattggaagccccataccagaacctcgacaaaggtccagactgctccggtcacaatctgaatcttctgatgaagttacagagctggacctcagtcacggcaagaaagacgccttcgtcctggaaatcgacgatacggatgccatggaggatgtccatagcctcttaactgatgtcccgccaccatccggattttatagctgcaacactgaaatcatgcctggaatcaataactggacatcagagatccagatgtttactagcgtccgcgtaatccggctgagttctctgaacctgaccaatcaggcacttaacaaaaattttaatgacctgtgcgagaatctactcaagtctctgtattttaaactgagaagcatgataccatgttgcctgtgtcacgtaaatttcactgtctcattgccagaggatgaactgatccaggtgactgtcacagccgtagccatcacattcgacaagaaccaagcccttcagactacaaaaactccagttgaaaagtcactgcaacgggcatctactgacaatgaggaactccttcagtttcccctggaattgtgctcagatagcctgccttcacacccattcccccctgcgaaagaacatctggagagcgcgtcatccaactcaggcatcccggctgcccagcgggaccggtgcagctcctggatcgaactgattaagctaaaggcgcagacaatccgccgcgggagtatcaagactacaatgactgtggagaaggcgagtcccgtgggtgatgggaactttcggaatcgaagcgctcccccttgtgcaaactccacagtgggtgtggtgaagatgacacccctgagttttattccaggggcaaaaattacgaaatatctcggtatcattaatatgttcttcattagagaaacaacttcactgagggaagaaggcggcgtgtcaggttttttacacgccttcatagccgaggttttcgcaatggtcagagctcacgtcgccgcgcttggtggaaacgccgttgtcagctacatcatgaaacaatgcgtgtttatggagaaccctaataagaatcaggcacagtgtctgatcaacgtctccggcgacgctgtcgttttcgtgagggaatctgacctggaggtggtgtccagccagcagccgacaacgaattgccaaagctcatgtaccgaaggggaggtgaccacctag

SEQ ID NO: 104324 - DNA, 2571 bp, Artificial Sequence
  derived and/or modified sequence
atgtctggagagctgcagaggaagattggcctgaaggtgctggagatgagaggaaatgctgtggtgggctacctgcagtgctttgacctggagggggagagcggcctggtggtgcgggccatcggcacagcctgcaccctggacaagctgagcagccctgctgccttcctgcctgcctgcaacagccccagcaaggagatgaaggagagccccctggtgcacccccccagccacggctgccgcagcacccacaacagccccatccacacagccaccggcagccggctgacccagaacttctctgtgtctgtgcccaccctcatctacacaggcatgggcagcggcagcgctgggaaggagggcggccccttcaaggccctgctgcggcagcagacccagagcgccctggagcagcgggagttccccttcttcaccctgacagccttccccccaggcttcctggtgcacgtgggcggcgtggtgtctgcccggtctgtgaagctgctggaccgcatccacaacccagcctttgtgggcatcatgggcaacaccaggagctacaagctgctggactggaacagcttcaacagtgatgagcctgagaccagagatgcctggtgggccgagatccggcaggagatcaagagccacgccaaggccctgggctgccacgctgtggtgggctacagcgagagcaccagcatctgtgaggaggtgtgcatcctgagcgccagcggcacagctgctgtgctgaacccccgcttcctgcaggacggcaccgtggagggctgcctggagcagaggctggaggagaacctgcccacccgctgtggcttctgccacatcccctatgatgagctgaacatgcccttccctgcccacctgacctactgctacaactgcaggaagcagaaggtgcctgatgtgctcttcaccaccatcgacctgcccacagatgccaccgtgattggcaagggctgcctgatccaggcccggctgtgccgcctgaagaagaaggcccaggccgaggccaatgccacagccatcagcaacctgctgcccttcatggagtatgaggtgcacacccagctgatgaacaagctgaagctgaagggcatgaatgccctgtttggcctgcgcatccagatcaccgtgggggagaacatgctgatgggcctggccagcgccactggagtgtacctggccgccctgcccaccccaggcggcatccagattgctgggaagaccccaaatgatggcagctatgagcagcacatcagccacatgcagaagaagatcaatgacaccatcgccaagaacaaggagctgtatgagatcaaccccccagagatcagcgaggagatcatcggcagccccatccctgagccccggcagaggagccggctgctgcggagccagagcgagagcagtgatgaggtgacagagctggacctgagccacggcaagaaggatgcctttgtgctggagattgatgacacagatgccatggaggatgtgcacagcctgctgacagatgtgcccccaccttctggcttctacagctgcaacacagagatcatgcctggcatcaacaactggaccagcgagatccagatgttcacctctgtgcgggtcatccggctgagcagcctgaacctgaccaaccaggccctgaacaagaacttcaatgacctgtgtgagaacctgctgaagagcctgtacttcaagctgcgctccatgatcccctgctgcctgtgccacgtgaacttcaccgtgtccctgcctgaagatgagctgatccaggtgacagtgacagctgtggccatcacctttgacaagaaccaggccctgcagaccaccaagacccctgtggagaagagcctgcagagggccagcacagacaatgaggagctgctgcagttccccctggagctgtgcagcgacagcctgcccagccaccccttccccccagccaaggagcacctggagagcgccagcagcaacagcggcatcccagctgcccagagggaccgctgcagctcctggattgagctgatcaagctgaaggcccagaccatccggcggggcagcatcaagaccaccatgacagtggagaaggccagccctgtgggagatggcaacttcaggaacagaagtgccccaccctgtgccaacagcacagtgggcgtggtgaagatgacccccctgtccttcatccctggggccaagatcaccaagtacctgggcatcatcaacatgttcttcatccgggagaccaccagcctgcgggaggagggcggcgtgtctggcttcctgcacgccttcatcgccgaggtgtttgccatggtgcgggcccacgtggccgccctgggcggcaatgctgtggtgtcctacatcatgaagcagtgtgtgttcatggagaaccccaacaagaaccaggcccagtgcctgatcaacgtgtctggagatgctgtggtgtttgtgcgggagagtgacctggaggtggtgagcagccagcagcccaccaccaactgccagagcagctgcacagaaggagaggtgaccacctag

SEQ ID NO: 104325 - DNA, 2571 bp, Artificial Sequence
  derived and/or modified sequence
atgagcggcgagctgcagcggaagatcggcctgaaggtgctggagatgagggggaacgcggttgtgggatacctgcagtgtttcgacttagagggagagtctggacttgtggttcgggcaatagggacagcttgcacattagacaaactgagctcccctgctgctttcctgccagcatgcaatagtccgtctaaagaaatgaaagagtcgccactggtacaccctcccagtcacgggtgtcgctccacacataatagcccaattcacacggctacaggcagtcgcctgacacagaacttctccgtatccgtgcccactttgatctacacaggcatgggcagtggctccgccggcaaagaggggggcccttttaaagcattgctgcgtcagcaaacacaaagcgcactggagcagcgggagttccccttcttcacactaactgcgttcccgcccgggtttctggtgcacgtgggcggggtggtgagcgcccgcagtgttaagctattagataggatccataatcctgcctttgttggaatcatgggtaacacccgaagttacaagctactggattggaactcatttaattcagatgagccagaaactagggacgcatggtgggccgaaattagacaggagattaagagccacgctaaggcactgggatgccacgccgtcgtcggttatagcgaatctacctctatctgcgaggaggtctgtattttatctgcctcgggcacggccgctgtgttaaaccctagattccttcaggatggcacagtagaaggttgcttagaacagcgactcgaggagaatctacccacacgctgcggattttgccatattccgtacgacgagttaaacatgcctttccccgcccatcttacctactgctataactgtagaaaacagaaggttcctgatgtgctcttcactaccatcgatctcccgacagatgctacggtgatcggaaagggttgtctgatccaggctcgtctctgcaggttaaagaaaaaagcccaggcagaggcaaacgctactgcaatcagcaacctcctcccatttatggagtatgaggtgcacactcaacttatgaataaactgaaactgaagggtatgaacgcactgttcggactacggatacagataacagttggtgaaaacatgctcatgggtctggcatcagcgactggagtctatttagcggctcttccgaccccaggcggtatacagatagcggggaagactcccaatgatggctcatacgaacagcatatctcccacatgcagaagaagatcaatgatactatcgctaagaataaggaattatatgagataaaccctcctgagattagcgaggagatcatcggtagtcccattcctgagccacggcagaggtcaagactgttaagatcacagagcgagtcatcagacgaggtaaccgaattggacctctctcacggcaagaaagacgctttcgtccttgagatcgacgatactgatgcaatggaggatgtgcattcgctcctgacggatgtcccgcccccgtccggtttctacagttgtaacaccgagataatgcccggaataaacaattggacgagcgaaattcaaatgttcacatctgtccgcgtgatccggctcagctccctgaacctcacaaatcaggctcttaataaaaatttcaatgacctgtgtgagaatctgcttaaaagtctgtacttcaaacttaggagcatgatcccgtgctgcctctgccacgtcaattttaccgtttcccttccggaggacgagctgatccaggtaactgtgacggcggtggcaattaccttcgataagaaccaggcacttcagacaaccaagaccccagtggaaaaatccctgcaaagagcgtctaccgataacgaggaattgcttcagtttcccctggagctgtgcagtgactctctgccatcccatccctttccacctgctaaggaacacttggaaagcgcgagcagcaacagtggaattcccgccgctcaacgcgatcggtgcagttcatggatcgaactgatcaagttgaaagcgcagactatacggcggggatccatcaaaacaaccatgacggtcgagaaggcatccccagtgggtgatggcaattttcggaatcggtccgccccaccttgcgcaaactcaacagtgggagttgttaaaatgacgcctctgtccttcattccaggtgcgaagataaccaagtacttgggaataatcaacatgttctttatccgtgaaaccacttccctgcgtgaagaaggaggggtttctggttttctgcacgcctttatcgctgaggtttttgcaatggtgcgcgcccacgtggctgccctgggaggaaacgcagtcgtgtcctacatcatgaagcagtgtgtgttcatggagaatcccaacaagaaccaggcccaatgtctgataaacgtttctggggacgccgtcgtttttgtgagggagtctgatttggaagtcgtgtcctcacagcagccaacaaccaactgccagtccagttgtacagaaggagaggttaccacctag

SEQ ID NO: 104326 - DNA, 2571 bp, Artificial Sequence
  derived and/or modified sequence
atgagtggagaactgcagcgcaagatcggactcaaggttctggagatgcgcggaaatgcagtggtggggtacctgcagtgttttgacctggaaggagagtccggccttgttgttcgtgctattgggacagcgtgtactctggacaagctctccagtccggctgcctttctgccagcgtgtaatagcccgtctaaagagatgaaggaatcccccctggtccacccacctagtcatggatgcaggtctacacataatagtcctatccacactgctacgggctcacgattgacccagaattttagcgttagcgtgcctaccctgatttacactggtatggggagcggctctgccggtaaagaaggagggccattcaaagcgctcctgaggcagcaaacccaatccgctctggagcagcgagagttccctttcttcaccctgacggcctttccacccggatttctggtgcatgtcggcggtgtcgtttcggcacggagcgtaaaattgctcgacagaattcacaatccagccttcgtcggaatcatgggaaacacaaggagttacaaactgttagactggaacagctttaatagtgatgaacctgagacccgggacgcctggtgggcagagattaggcaggagattaaatctcatgctaaagctctgggctgtcacgccgtagtgggttacagcgagtctacctctatctgtgaagaagtgtgcattctgtccgccagtggcacagcggcagtgcttaatcctaggttccttcaggatggcactgtggaggggtgccttgaacagcgcttggaggagaacttaccaacaaggtgtggcttctgccacataccatatgatgaacttaacatgccattcccggctcatctcacatattgctacaactgccgaaaacagaaagtgccagatgtcctgtttaccaccatcgaccttcctacagatgcaacagtcataggtaaaggctgcttgatccaggctaggctgtgcagactgaagaaaaaggcgcaggccgaggcgaacgccactgccatcagcaacctacttccatttatggagtatgaagtccacacacagctgatgaacaagcttaaattgaagggtatgaacgcactgttcggacttagaatccagatcaccgtgggcgagaacatgctcatgggtctggcttcagcaacaggcgtgtacctcgccgcattgcctacccctggaggcattcaaatagccggaaaaacgcccaacgatggctcatatgagcagcacatcagtcatatgcaaaagaaaattaacgacaccatcgccaagaataaggaactgtatgagataaatccccctgagatcagtgaggagattataggcagccctattcccgaaccgaggcagcgcagtcggctgttaagaagtcagagcgagtcctctgacgaagtcacagaacttgacttgtctcacggtaaaaaagatgccttcgtcctagaaatcgacgacactgacgcaatggaggatgtccacagtttgttaacagacgtgccacccccatctggattttactcctgcaacaccgagattatgccgggtattaacaactggacttcggaaattcagatgttcaccagtgtccgagtaattcgtctaagctctctcaatcttaccaaccaagccctgaacaagaatttcaatgatctctgtgaaaatctgctgaaaagtctgtacttcaagctacggagcatgattccatgctgtttgtgtcatgtgaactttaccgtgagcctgcccgaagatgagttgattcaagtcacagtcaccgccgtcgctatcaccttcgacaagaaccaggcactgcagaccaccaaaacacccgtggagaagtcactccagagagcttccactgacaatgaggagctgctccaatttcctcttgaactgtgctcagattcactgccaagtcatcccttcccccctgcaaaggagcacctggagagtgcgtcatctaattcagggattcctgcagctcagcgcgataggtgctctagttggattgaactgatcaagctgaaggctcaaactattaggagaggttccattaagactaccatgacggtcgagaaagcatcccccgttggagacgggaatttccggaaccgctctgcacccccatgtgctaattcaactgtgggggtagttaaaatgacacctcttagctttatcccaggggctaagatcaccaaataccttggcatcatcaatatgttttttataagagaaactacgtctctgagagaagagggcggtgtttctggctttctgcacgcttttatcgctgaggtcttcgccatggtgagagcgcacgttgcggcattggggggtaacgcggtggtgagctatatcatgaagcagtgcgtcttcatggagaaccccaacaaaaatcaggcacaatgtctgatcaacgtgtctggggacgccgtggtttttgttcgcgagagtgatctggaggtcgtgtcatctcagcagcccaccactaactgtcagtctagttgcacagaaggcgaagtgacaacttag

SEQ ID NO: 104327 - DNA, 3471 bp, Artificial Sequence
  derived and/or modified sequence
gaggagagacaagcaggggcggcagaggctcaacgggatgctgactgggttttgcttttcgtcccagccttgtggggccgggacggaagaacccatcaaagcccttcctcccgccgcctctccggaatgaggtctcagcacccgcgcgggacagcacccttcctcctgcgacagagcccaagaagaggccgaaaccgagaccatgccagggaagctgaaggtgaaaatcgtggccgggcgccatttgccagtgatggaccgtgctagtgacctgactgatgccttcgtggaggtaaaatttggtaataccacctttaaaacagatgtgtaccttaagtcactcaaccctcagtggaactcggagtggtttaaatttgaggtggatgatgaagacttacaagatgaacctttacagatcacagttcttgaccatgatacttacagtgcaaatgatgccattggtaaagtgtacattgatattgatcctttactgtatagtgaagctgcaacagtcatctcaggatggtttccaatttatgacaccatacatggtatccgtggggaaatcaatgtagttgtcaaagtagacctcttcaatgatttaaatcgatttaggcagtcatcatgtggagtcaaattcttttgcacaacgtctattccaaaatgctatagagctgtgataattcatggatttgtagaagaacttgtggtcaatgaagacccagaatatcagtggattgatcgaattcgcacaccaagggcatcaaatgaggccagacagagactcatttcgttaatgtcaggtgagctgcagaggaagattggcttgaaagtacttgaaatgagaggaaatgcagttgtggggtacttacagtgtttcgatctggagggcgagtctgggttagtggtgcgagccataggaacggcgtgtactctggataaattaagtagcccagcagcattccttcctgcatgtaattccccatccaaagaaatgaaggagtctccgctggttcatcctccaagccatggatgccgctcgactcacaacagcccaattcacactgctactggctcacgacttactcagaacttctctgtgtctgttcccactctcatctatactggaatgggaagtggtagtgctggaaaagaaggggggccctttaaagctcttttaagacaacagactcaatcagcgttggaacagagggaatttccattttttaccttgacggcatttcctcctggattccttgtacacgttgggggtgtagttagtgcacgttctgtgaagcttttggatcgtatccacaatcctgcctttgtcggaattatgggtaacacaagatcttacaaactgctagactggaatagtttcaattcagatgaaccagaaactcgagatgcatggtgggcagaaatcagacaagaaataaaatcacatgctaaagcattaggctgtcatgctgtagtgggctacagtgaatcaactagcatctgtgaagaggtctgcattttatctgcatctggcacagcggctgtactgaatcctagatttctgcaggatggcaccgtggaaggctgtttggaacagaggcttgaagaaaatttgcctacacgttgtggattttgtcatataccatatgatgaactgaatatgccatttccagctcatctcacatattgctataactgcaggaaacaaaaagttcctgatgttctgtttacaactatagacctcccaacagatgcaacagttattggaaaaggttgtcttattcaagcaaggttatgtcgcttaaaaaagaaagcacaggcagaagcaaatgctacagctatcagtaatctcttgccatttatggaatatgaagtgcatactcagctaatgaataaactaaaactcaaaggaatgaatgctttgtttggactaagaattcagatcacagtgggtgaaaatatgttgatgggcttagcgtctgccacaggtgtgtatttagcagctttaccaactcctggtggtattcagattgctgggaagactcctaatgatggctcatatgaacaacacatctctcatatgcagaagaagataaatgacacaattgctaaaaacaaagagttatatgaaatcaatcctccagagatatctgaagagattataggatcacccatcccagaacctaggcaacgctcaagacttctaagatctcaatcagaaagctcggatgaagttacagaattagacctttcacatgggaaaaaagatgcttttgttttggagattgatgacacagatgccatggaagatgtccattctctacttactgatgttcctcctccttcaggcttttatagttgtaatacagaaattatgcccggtataaataattggacctctgaaatacagatgttcacttcagtaagagtaatcagattaagcagcctcaacctgactaatcaagctctcaataagaactttaatgatctctgtgaaaatttgctcaagagcctgtactttaaactacgatctatgatcccctgctgcctttgccatgtaaattttacagtatctctgcctgaagatgaattaattcaggttacagtcacggcagtcgcaatcacttttgacaaaaatcaggctttacaaaccacaaaaacccctgttgaaaagtcattgcaaagagcctcaacagataatgaagaacttttacaatttccactggaactgtgttcagattcacttccttctcatccttttccaccagctaaagaacacctggagagtgcaagttctaactcaggtataccagctgcacagagagacagatgcagcagctggatagagctcattaaactgaaagctcagaccataaggcgtggatcaattaagacaaccatgacagttgaaaaagcaagtccagtgggtgatggaaatttccggaatcgttctgctccaccttgtgcaaattccacagttggggttgttaagatgacacctctttcttttattcctggagcaaaaataactaagtatcttgggataattaacatgttttttattcgagagactacttctcttcgggaggaaggaggagtcagtggttttctccatgcttttattgctgaagtgtttgcaatggtgagagctcatgttgctgcattaggagggaatgctgttgtctcctacataatgaagcagtgtgtcttcatggagaatccaaataaaaaccaggcacagtgtcttataaatgtaagtggtgatgcagtggtttttgttcgtgaatctgacttagaagtggtgtcatctcagcaacctactaccaactgccagtcatcatgtactgaaggcgaagttacaacctgaggaaaattaggaaaaaagagctcaactaaatgaaattcatcaatctctgttattttgtcattaattatcttcttagacttaaaattgaacttgagataaataag

SEQ ID NO: 104328 - protein, 1337 aa, Artificial Sequence
  derived and/or modified sequence
MPQPLLPALPPLSSPSGAGSCGPSGGECSGRRLFRRRARGLRSDNMEAVKTFNSEDCASTPACTDCFSSSMDTRSILYSLNDYKPPISKAKMTQITKAAIKAIKFYKHVVQSVEKFIQKCKPEYKVPGLYVIDSIVRQSRHQFGQEKDVFAPRFSNNIISTFQNLYRCPGDDKSKIVRVLNLWQKNNVFKSEIIQPLLDMAAGIPPPVVTPVLASTTTAMSNTPGTPVTPVTPANVVQGLPDPWVSQITNTDTLAAVAQILQSPQGQQLQQLIQTLQIQQQKPQPSILQALDAGLVVQLQALTAQLTAAAAAANTLTPLEQGVSFNKKLMDRFDFGEDSEHSEEPKKEIPASQLSHVSESVNNSIFHQIAEQLQQQNLEHLRQQLLEQQQPQKATPQDSQEGTFGSEHSASPSQGSSQQHFLEPEVNLDDSIDIQQQDMDIDEGQDGVEEEVFEQEAKKVAVRSRSRTHSRSRSRSPRKRRSRSRSGSRKRKHRKRSRSRSRERKRKSSRSYSSERRAREREKERQKKGLPPIRSKTLSVCSTTLWVGQVDKKATQQDLTNLFEEFGQIESINMIPPRGCAYVCMVHRQDAFRALQKLSSGSYKIGSKVIKIAWALNKGVKTEYKQFWDVDLGVTYIPWEKVKVDDLEGFAEGGMIDQETVNTEWETVKSSEPVKETVQTTQSPTPVEKETVVTTQAEVFPPPVAMLQIPVAPAVPTVSLVPPAFPVSMPVPPPGFSPIPPPPFLRASFNPSQPPPGFMPPPVPPPVVPPPTIPPVVPTSLVQPSLSMTPETVKDVGFGSLVIPGGSVASNLATSALPAGNVFNAPTKQAEPEEKVPHLIDHQISSGENTRSVIPNDISSNAAILGGQPPNVTSNSGILGVQRPNVSSNSEILGVRPSNVSSSSGIIAAQPPNILNNSGILGIQPPSVSNSSGLLGVLPPNIPNNSGLVGVQPPNVPNTPGLLGTQPPAGPQNLPPLSIPNQRMPTMPMLDIRPGLIPQAPGPRFPLIQPGIPPQRGIPPPSVLDSALHPPPRGPFPPGDIFSQPERPFLAPGRQSVDNVTNPEKRIPLGNDNIQQEGDRDYRFPPIETRESISRPPPVDVRDVVGRPIDPREGPGRPPLDGRDHFGRPPVDIRENLVRPGIDHLGRRDHFGFNPEKPWGHRGDFDEREHRVLPVYGGPKGLHEERGRFRSGNYRFDPRSGPWNRGFGQEVHRDFDDRRRPWERQRDRDDRDFDFCREMNGNRLGRDRIQNTWVPPPHARVFDYFEGATSQRKGDNVPQVNGENTERHAQPPPIPVQNDPELYEKLTSSNEINKEKSDTVADIESEPVVESTETEGT

SEQ ID NO: 104329 - protein, 221 aa, Artificial Sequence
  derived and/or modified sequence
MFCQNPGAANSQLSTSQPSLRHKVNEHEQDGNELQTTPEFRAHVAKKLGALLDSFITISEAAKEPAKAKVQKVALEDDGFRLFFTSVPGGREKEESPQPRRKRQPSSSSSEDSDEEWRRCREAAVSASDILQESAIHSPGTVEKEAKKKRKLKKKAKKVASVDSAVAATTPTSMATVQKQKSGELNGDQVSLGTKKKKKAKKASETSPFPPAKSATAIPAN

SEQ ID NO: 104330 - DNA, 666 bp, Artificial Sequence
  derived and/or modified sequence
atgttttgccagaaccctggcgccgctaactcccagttaagcacttctcagccatctcttaggcacaaagtgaacgagcatgaacaggacggaaatgaattgcagactacccctgagtttagggcacacgtggcaaaaaaactgggtgcactgctcgactcgtttatcacgatttctgaggctgcaaaggagccagccaaggcaaaggtgcaaaaagtggcattggaagatgatggtttcagactgttcttcacaagtgttcctggagggcgggagaaggaggagtcccctcagccccgccgaaagagacagccctcctcatcctcatctgaagatagcgacgaggaatggcgcagatgcagggaggctgcagtgtctgcaagtgacattctccaggagagcgccattcactctcccggtacagtggagaaggaggccaaaaagaaaagaaagttgaagaaaaaggcgaaaaaggtcgcttccgtagactcagccgttgccgccaccacccctacttccatggcgaccgtgcagaaacaaaaatctggagagctcaatggcgaccaggtgtccttgggaactaaaaaaaagaaaaaggctaagaaggcgagcgagacaagccccttcccccctgctaagagtgcgaccgccatccccgccaattag

SEQ ID NO: 104331 - DNA, 666 bp, Artificial Sequence
  derived and/or modified sequence
atgttctgccagaaccctggggccgccaacagccagctgagcaccagccagcccagcctgcggcacaaggtgaatgaacatgagcaggatggaaatgagctgcagaccaccccagagttccgggcccacgtggccaagaagctgggcgccctgctggacagcttcatcaccatcagcgaggccgccaaggagcccgccaaggccaaggtgcagaaggtggccctggaggatgatggcttccgcctcttcttcacctctgtgcctgggggccgggagaaggaggagagcccccagcccaggaggaagaggcagcccagcagcagcagcagtgaagattctgatgaggagtggaggcgctgccgggaggccgctgtgtctgccagtgacatcctgcaggagagcgccatccacagccctggcaccgtggagaaggaggccaagaagaagaggaagctgaagaagaaggccaagaaggtggcctctgtggacagcgctgtggccgccaccacccccacctccatggccaccgtgcagaagcagaagagcggggagctgaatggagaccaggtgtccctgggcaccaagaagaagaagaaggccaagaaggccagcgagaccagccccttccccccagccaagagcgccacagccatcccagccaactag

SEQ ID NO: 104332 - DNA, 666 bp, Artificial Sequence
  derived and/or modified sequence
atgttctgccagaaccccggcgccgccaacagccagctgagcacctctcagccatcgctgcgccataaagttaacgaacacgagcaggacggaaacgaactgcagactactccggaatttagggcccatgtggcaaagaaactcggtgcactgctggacagcttcataactataagcgaggcagcaaaggagcccgccaaagccaaagtgcagaaagtcgcccttgaagacgacggattccggctgttttttacctcagtgccaggcggccgagaaaaagaggaaagcccccagccccggaggaagagacaaccatcatcttcctccagtgaggactctgacgaggagtggagaaggtgtcgggaggccgctgtgagcgcaagtgacattcttcaggaatcagccatccactcacccgggactgtggagaaagaagctaagaaaaaacgaaaactgaaaaagaaagctaagaaggtcgcgtctgtggattccgctgttgccgcaacgactccgacgtctatggccactgtgcagaagcagaaatccggggagcttaatggcgaccaggtatcactcggcacaaaaaagaaaaagaaggccaagaaggcctctgagacaagtcccttccctcctgccaaaagtgccactgctattccagcgaattag

SEQ ID NO: 104333 - DNA, 666 bp, Artificial Sequence
  derived and/or modified sequence
atgttctgtcaaaaccctggcgcagccaacagccagctcagcacttcgcaaccctcgctgcgacataaggtaaacgaacatgaacaagacggaaacgagctgcaaacaaccccagagtttcgcgcacatgtcgcaaagaaactgggagccctgttggattcttttatcaccatcagcgaagccgctaaggagccagctaaagccaaagtgcagaaagtggccctggaggatgacggcttcaggttattttttacgagcgtgccagggggtcgggagaaagaggagtcgccacagccgcgaagaaagagacagccttctagctcttcctccgaagactctgatgaggaatggcgacggtgtagggaagctgctgtgagcgctagtgatatcttgcaggaaagtgccatccattcccctggaaccgtggaaaaggaggccaagaagaagcgaaaactcaagaaaaaggcaaaaaaagttgcttcagtggacagtgctgtggcagccacaaccccgacctccatggctacagtgcagaaacagaaatccggtgagctcaacggcgaccaggtgtctcttgggactaaaaagaagaaaaaggcaaagaaagcatcggagacaagccccttccctcctgccaaatcagcaactgctattccagccaactag

SEQ ID NO: 104334 - DNA, 1339 bp, Artificial Sequence
  derived and/or modified sequence
gcggtggttcaagatggcggcgcccagtggcacagtgagcgattcggaaagtagtaacagcagtagcgatgcggaggagctggagcggtgccgcgaggcggcaatgccggcttggggcttggagcaacgcccgcacgtggcagggaagccaagagccgtagagatggggtttcaccatgttgaccaggatggtctcgatctcttgacctcgtgatccgcctgcctcagcctcccaaagtgctgggattacaggcgtgagccaccgcgcccggccttgactccatcttaaaagtgcatctatctggagttcacccacttctcaccacatcaattactgcagcagactccgtgttcctgcctttgccccaacagtctcacgctgcacagcagccaaagatgttctgtcaaaacccaggtgctgcaaatagccagttgtcaacctcccaaccgagcctcaggcataaggtgaatgagcatgaacaagatggcaacgagcttcagaccacccctgaattccgagcccacgtagccaagaagctgggagccctgctggacagcttcattaccatctcagaagcagcaaaggagccagcaaaagctaaggtacagaaagtcgctttggaggatgatggtttccgccttttcttcacatctgtccctggaggccgtgagaaggaagagtctccccaaccccgccgaaagcgacagccctccagctccagcagtgaggacagtgacgaggagtggcggcggtgccgggaggcagctgtgtcggcgtccgacatcctacaggagtcagccatccacagccctggaacagtggagaaggaggcaaagaagaaaaggaagttgaaaaagaaagccaagaaggtggccagtgtcgactcggctgtcgctgccaccacccccaccagcatggccacagtccagaagcagaagtcaggtgagctcaacggggaccaggtgtcgcttgggaccaaaaagaagaaaaaggcaaagaaggccagcgagacctctccattcccaccagcaaagagtgctacagctatacctgcaaactgaacccagccatgggcacagggctcagccagctccaaggacaaggtgtcccccccaccctggggacaaggcatttccaagccccacctccctctccaagttcaaggactgggctggcaaacccagactgcccatgagaccctgatggtgatgaaggcttgctcgagagttgggccaaaaaagtggctgtagggtgagaagaccaatcaaggcctgcccctctgtgctcccacggagggctggcgggggcgctgtggttccagaacatttcatgacctca

SEQ ID NO: 104335 - DNA, 666 bp, Artificial Sequence
  derived and/or modified sequence
atgttctgccagaaccccggcgccgccaacagccagctgagcaccagccagcccagcctgagacacaaggtgaacgagcacgagcaggacggcaacgagctgcagaccacccccgagttcagagcccacgtggccaagaagctgggcgccctgctggacagcttcatcaccatcagcgaggccgccaaggagcccgccaaggccaaggtgcagaaggtggccctggaggacgacggcttcagactgttcttcaccagcgtgcccggcggcagagagaaggaggagagcccccagcccagaagaaagagacagcccagcagcagcagcagcgaggacagcgacgaggagtggagaagatgcagagaggccgccgtgagcgccagcgacatcctgcaggagagcgccatccacagccccggcaccgtggagaaggaggccaagaagaagagaaagctgaagaagaaggccaagaaggtggccagcgtggacagcgccgtggccgccaccacccccaccagcatggccaccgtgcagaagcagaagagcggcgagctgaacggcgaccaggtgagcctgggcaccaagaagaagaagaaggccaagaaggccagcgagaccagccccttcccccccgccaagagcgccaccgccatccccgccaactag

SEQ ID NO: 104336 - DNA, 1381 bp, Artificial Sequence
  derived and/or modified sequence
aggtcctcgcgactccgcttctgggccccagggcagcagcacggagcctccggacaacctactgaccacccacgtgctggacaccgcctcagggctcccagccagaggcctctgcctccgcttgtgctggctggaggaccacggccagcagtgggcggagctgaggacaagctacacagacccagatggtcactgtcctggaccagatgaaggcaggcacctacaagctcaccttcgacactgagggctactggaggaagagggggcaggaaagcttctacccacatgtggaggttgttttaaccatcaccagcaaggcccagaagttccacgtgcccctggtcctacatcacctaccgagggagttagagcgaagactggcagcgggaggctgcctgcccgttcccgcacgctggctgcacccacccagccctcaacagagcgggctttgtgctcatcagggagcattggctcaccacttcctagggaagtcccggccccctggagaatcccactgggcagctgtgactcaggtgtcaatgaagttagtgccagcacctgcaaagctgtccattcggtgggacaacagtggcgcgaagacaggcagcacagcgcggcactgccccaacccccaggtgagtgcggggcactctgagaaggtgccgccgactgtggtcggaggtgagaccagggagtaggcctggacacaggctggacgtgcggcacccagggaagggagcgacagggacaccatgggtgagggtcctgcaggtggttctcctccacagagccaggaaagaggatggcaagaacatgtgaaaagctttcatttgctgatgataaaatctaaaaaacttgctgtccttggtgtgataaggggtgtcatcccgagtgttcctaggctggttctctgggctgtggccccccaggggggcagctacgtcggggtgcccaccagtcccgcggggccctggcccagtgtctgtccgatcacagctgtttccaagggcttgaagcccacgttgtccagagggatcccgaaggccagcagctttgcctcatacgtgcgcagcaggtcgttatgggcctgtggagacagggcagtgtcagggagctgagggtccccacgctcaggaccaccagagctgagtgcagctccatggaggggcagcgtgagcatcacggtgcagaaggataaagccaaaggcttatcagtcatttcccgtgtgggacacagctccaagcaccttcactgcgttggctcaggtagcacgacagggagaggctgtcactattcctattccacaaatgacgagacggaggcagagggcagggacactcagggcagagctgtggtctgggagggctctgggccctggct

SEQ ID NO: 104337 - protein, 453 aa, Artificial Sequence
  derived and/or modified sequence
MSKEQVEEHVSRIREELDREREERNYFQLERDKIHTFWEITRRQLEEKKAELRNKDREMEEAEERHQVEIKVYKQKVKHLLYEHQNNLTEMKAEGTVVMKLAQKEHRIQESVLRKDMRALKVELKEQELASEVVVKNLRLKHTEEITRMRNDFERQVREIEAKYDKKMKMLRDELDLRRKTELHEVEERKNGQIHTLMQRHEEAFTDIKNYYNDITLNNLALINSLKEQMEDMRKKEDHLEREMAEVSGQNKRLADPLQKAREEMSEMQKQLANYERDKQILLCTKARLKVREKELKDLQWEHEVLEQRFTKVQQERDELYRKFTAAIQEVQQKTGFKNLVLERKLQALSAAVEKKEVQFNEVLAASNLDPAALTLVSRKLEDVLESKNSTIKDLQYELAQVCKAHNDLLRTYEAKLLAFGIPLDNVGFKPLETAVIGQTLGQGPAGLVGTPT

SEQ ID NO: 104338 - DNA, 1362 bp, Artificial Sequence
  derived and/or modified sequence
atgtctaaagagcaggtcgaggagcatgtctccaggattagggaggaactggacagggaacgggaggaacgaaactacttccagttagaacgagacaagatccacactttctgggagataacaaggcgccagctggaagagaagaaggcagagttgcgtaacaaagaccgcgagatggaggaggctgaggagcggcatcaggtggagatcaaggtgtataagcaaaaggtcaaacacttgctgtacgaacaccagaacaacctgacagaaatgaaagctgaaggaacagtcgtgatgaagctggcgcagaaggagcatcgtatccaggaatctgtgttacgcaaggatatgagggcgctgaaagtcgaattgaaggagcaggaactggcatccgaggtggtggttaaaaatctcagattgaagcataccgaggaaatcacccggatgcgcaacgatttcgagcggcaggtccgtgaaatcgaagccaaatacgacaaaaaaatgaagatgctgcgggacgaattagacctgcggcgaaaaacagagctacacgaggttgaggaacgtaagaacgggcagatacataccctgatgcaaaggcacgaggaagctttcacagacattaagaattattataacgacatcaccctcaataacttagccctcatcaattcactgaaagagcagatggaggacatgagaaaaaaggaagatcatttagagcgggagatggccgaagttagtggccagaacaagcggctagccgatcctctccagaaggcccgggaagaaatgagcgagatgcaaaagcagctcgctaattatgagcgggataaacagattcttctttgtacaaaagctcgcctcaaggttagggagaaagagcttaaggatctccagtgggagcatgaggtgctcgaacaaaggtttactaaggtacagcaggagcgtgacgaactttataggaagttcacagctgcaattcaggaagtccagcagaaaaccgggtttaagaacctggtgctcgagaggaaactccaagctctgagtgctgcagtggaaaagaaagaggttcaattcaacgaggtgcttgccgcctctaacttggatcctgctgcgctcaccctggtctcaaggaaactggaagatgtcctggagagcaagaattctaccattaaagacctccaatacgaattggcccaggtgtgtaaggctcacaacgatctgctgcgtacttatgaagcgaagttgctggcctttggcattccgctggacaatgtcggattcaagcctctcgaaaccgctgtaatagggcaaaccctcgggcaggggcccgcaggcctcgtcgggacacccacctag

SEQ ID NO: 104339 - DNA, 1149 bp, Artificial Sequence
  derived and/or modified sequence
atggtcgaggagcacgtttcccggatccgggaggagttagatagagagcgtgaggaacgtaattacttccaactggagcgggacaaaattcacactttttgggagattaccagacgtcaattagaagagaagaaggctgaactcaggaacaaagacagggagatggaggaggcggaagagcggcatcaggtggaaataaaagtttataaacaaaaggtaaagcatctgctgtacgaacaccaaaataatcttacagagatgaaagccgaaggaaccgttgtgatgaagctcgcccagaaagagcatcgtattcaggagagtgtgttgagaaaggacatgcgggcattaaaagtggagctgaaagaacaggagctggcgagcgaggtggtcgtgaaaaacctgaggctcaagcacactgaagagatcaccaggatgcgcaacgatttcgagcgccaggttcgcgagatcgaagcaaagtacgataagaagatgaaaatgttacgtgacgaactagatctgagaaggaagacagaactgcatgaagtagaagaacgaaaaaacgggcagatacatactttgatgcagcggcacgaagaggcattcacagacattaaaaattattacaatgacatcacacttaacaacctagcattaatcaattcccttaaagagcagatggaagatatgagaaagaaagaagaccacttggaacgggagatggccgaggtgagtggccaaaacaagagactggcggatcccctccaaaaagcacgagaggaaatgtcagaaatgcagaaacagctggccaattacgagagagataagcagattcttttgtgcaccaaggctcgtttgaaggtgcgagagaaagaattgaaggatcttcaatgggagcacgaggtcttggaacagcggttcacaaaggtccagcaggagagggatgagctgtataggaagttcacagcagctatccaggaagtgcagcaaaagacaggatttaaaaatttggtcctcgagaggaaattacaggcattaagcgctgccgtcgagaagaaagaagtgcaatttaacgaggtacttgcagcatccaacctggaccctgctgccctgaccttggtgtcacgcaagctcgaaacgtttttctgctag

SEQ ID NO: 104340 - DNA, 1308 bp, Artificial Sequence
  derived and/or modified sequence
gcttccgggggcgggcgccctggtcccggagtcgccgctgggcctgtccgctggcgtcatggtggaggagcatgtcagccgcatccgggaggagctggaccgcgagcgggaggaacgaaactacttccagctggagcgggacaagatccacaccttctgggagatcacacggaggcagctggaggagaagaaggctgagctgcggaacaaagaccgggagatggaagaagccgaggagaggcaccaggtggagatcaaggtgtacaagcagaaagtgaagcacctgctatatgagcaccagaacaacctgacagagatgaaggctgagggcactgtagtcatgaagctggcacagaaagagcaccgcatacaggagagtgtgctgcgcaaggacatgcgggcactgaaggtggagctcaaggagcaggagctggccagtgaggtggtggtgaagaacctgcggctgaaacacaccgaggagatcaccaggatgcggaatgattttgagaggcaagttcgagaaattgaggccaagtatgataagaagatgaagatgctgagggacgaactcgacttgcggagaaagactgagctccacgaagtggaggagaggaagaatggccagatccacacgctgatgcagcgccacgaggaggccttcaccgacattaagaactactacaacgacatcaccctcaacaacctggccctcatcaactccctcaaggagcagatggaggacatgcggaagaaggaggaccacctggagagggagatggcagaggtgtctgggcagaacaagcgcctggcagaccctctccagaaggctcgggaggagatgagcgagatgcagaaacagctcgcaaactacgagagggacaagcagatcctgctttgcacaaaagcccgtttgaaagtcagggagaaagagctgaaagacctgcagtgggagcatgaagtgttagagcagcgattcaccaaggtgcagcaggagcgggacgagctctatcggaagttcaccgcagccatccaggaggtgcagcagaagacagggttcaagaacctcgtgctagaacgcaagctgcaggctctgagcgccgctgtggagaagaaggaggtgcagttcaacgaggtcctggctgcctctaacctggaccctgcagccctgacgctggtgtcccgcaagctggagacctttttctgctgacaaccctgtgtggatggatgcatccatcaaaccaggctgctattcgctggatctctcagaacgcccactggagtccccaggccgctcccgttgcctcggcc

SEQ ID NO: 104341 - DNA, 1362 bp, Artificial Sequence
  derived and/or modified sequence
atgagcaaggagcaggtggaggagcacgtgagccgcatccgggaggagctggaccgggagcgggaggagaggaactacttccagctggagcgggacaagatccacaccttctgggagatcacccggcggcagctggaggagaagaaggccgagctgaggaacaaggaccgggagatggaggaggccgaggagcggcaccaggtggagatcaaggtgtacaagcagaaggtgaagcacctgctgtatgagcaccagaacaacctgacagagatgaaggccgagggcaccgtggtgatgaagctggcccagaaggagcaccgcatccaggagagcgtgctgaggaaggacatgagggccctgaaggtggagctgaaggagcaggagctggccagcgaggtggtggtgaagaacctgcggctgaagcacacagaggagatcaccaggatgagaaatgactttgagcggcaggtgcgggagattgaggccaagtatgacaagaagatgaagatgctgagagatgagctggacctgcggaggaagacagagctgcacgaggtggaggagaggaagaatggccagatccacaccctgatgcagagacatgaggaggccttcacagacatcaagaactactacaatgacatcaccctgaacaacctggccctgatcaacagcctgaaggagcagatggaggacatgaggaagaaggaggaccacctggagcgggagatggccgaggtgtctggccagaacaagaggctggccgaccccctgcagaaggcccgggaggagatgtctgagatgcagaagcagctggccaactatgagcgggacaagcagatcctgctgtgcaccaaggcccggctgaaggtgcgggagaaggagctgaaggacctgcagtgggagcacgaggtgctggagcagcgcttcaccaaggtgcagcaggagagagatgagctgtacaggaagttcaccgctgccatccaggaggtgcagcagaagacaggcttcaagaacctggtgctggagaggaagctgcaggccctgtctgctgctgtggagaagaaggaggtgcagttcaatgaggtgctggccgccagcaacctggaccctgctgccctgaccctggtgtccaggaagctggaggatgtgctggagagcaagaacagcaccatcaaggacctgcagtatgagctggcccaggtgtgcaaggcccacaatgacctgctgcggacctatgaggccaagctgctggccttcggcatccccctggacaacgtgggcttcaagcccctggagacagctgtgattggccagaccctgggccagggccctgctggcctggtgggcacccccacctag

SEQ ID NO: 104342 - DNA, 1149 bp, Artificial Sequence
  derived and/or modified sequence
atggtggaggagcacgtgagccgcatccgggaggagctggaccgggagcgggaggagaggaactacttccagctggagcgggacaagatccacaccttctgggagatcacccggcggcagctggaggagaagaaggccgagctgaggaacaaggaccgggagatggaggaggccgaggagcggcaccaggtggagatcaaggtgtacaagcagaaggtgaagcacctgctgtatgagcaccagaacaacctgacagagatgaaggccgagggcaccgtggtgatgaagctggcccagaaggagcaccgcatccaggagagcgtgctgaggaaggacatgagggccctgaaggtggagctgaaggagcaggagctggccagcgaggtggtggtgaagaacctgcggctgaagcacacagaggagatcaccaggatgagaaatgactttgagcggcaggtgcgggagattgaggccaagtatgacaagaagatgaagatgctgagagatgagctggacctgcggaggaagacagagctgcacgaggtggaggagaggaagaatggccagatccacaccctgatgcagagacatgaggaggccttcacagacatcaagaactactacaatgacatcaccctgaacaacctggccctgatcaacagcctgaaggagcagatggaggacatgaggaagaaggaggaccacctggagcgggagatggccgaggtgtctggccagaacaagaggctggccgaccccctgcagaaggcccgggaggagatgtctgagatgcagaagcagctggccaactatgagcgggacaagcagatcctgctgtgcaccaaggcccggctgaaggtgcgggagaaggagctgaaggacctgcagtgggagcacgaggtgctggagcagcgcttcaccaaggtgcagcaggagagagatgagctgtacaggaagttcaccgctgccatccaggaggtgcagcagaagacaggcttcaagaacctggtgctggagaggaagctgcaggccctgtctgctgctgtggagaagaaggaggtgcagttcaatgaggtgctggccgccagcaacctggaccctgctgccctgaccctggtgtccaggaagctggagaccttcttctgctag

SEQ ID NO: 104343 - DNA, 1362 bp, Artificial Sequence
  derived and/or modified sequence
atgagcaaggagcaggtggaggagcacgtgagccggatccgggaggagctggatagagagagagaagagagaaactatttccagttggaacgcgataaaattcacaccttctgggaaatcacccgccgccagcttgaagaaaagaaggctgagctgcggaacaaagatcgtgaaatggaagaggcagaagagagacaccaggttgagatcaaagtctataaacaaaaggtgaaacatctgctctacgaacaccaaaataacctaacagaaatgaaggccgaaggcaccgtggtgatgaagctggcacaaaaagaacatcgaattcaggagtctgtgcttcgaaaggacatgcgcgcactgaaagtggagctgaaagaacaggagctggcgagtgaggtcgtcgtgaaaaatctcaggttgaaacatacagaagaaattactcgtatgagaaacgactttgagcgtcaggttagagaaattgaggcgaaatacgacaagaaaatgaaaatgctgcgtgatgagttggaccttaggagaaaaactgagttgcatgaggtggaggagcggaaaaacggccaaatacacaccttgatgcagcgacacgaggaggcttttacggacattaagaactattacaatgacatcacactcaataacctggctctgatcaattcactcaaggagcagatggaggatatgcggaagaaggaagaccacctggaacgagaaatggctgaggtgagtggacagaacaaaaggctggcagatccactccaaaaggctcgggaagaaatgagcgaaatgcagaagcaactggctaattatgaacgagataaacaaattctcctctgtaccaaggctcgactgaaggtgcgtgagaaggaactgaaagatctgcagtgggagcacgaagtcctggagcaaagattcaccaaggtacaacaggagcgagatgaactgtaccggaaatttactgcagcaatccaagaagttcagcaaaaaacaggatttaagaacctggtcctagagcgtaagctccaggcactgagcgccgctgtggagaagaaagaagtgcagttcaatgaggttctcgccgctagcaatctggaccctgccgctctgactctggtctcccgaaagcttgaagacgtgctcgaatctaaaaactcgactatcaaggatctgcagtacgagctggcccaggtatgcaaggcccataacgacctgctgcgcacctatgaagcgaagctcctggcctttggaatccccctggataatgtaggattcaaacccctggagactgccgtgatcggtcagaccctagggcaggggcccgccggactggtgggaacccctacttag

SEQ ID NO: 104344 - DNA, 1149 bp, Artificial Sequence
  derived and/or modified sequence
atggtggaggagcacgtgagccggatccgggaggagctggaccgggagcgtgaagaacgcaattactttcagctcgagagagacaaaatccatacattctgggaaatcaccaggagacagctcgaggagaagaaggctgagctgagaaataaggaccgcgagatggaggaggcagaggaacgccaccaggtggaaattaaagtatacaagcagaaagtgaagcatctgctgtacgaacaccaaaacaacctgaccgagatgaaggccgaaggaactgtggtcatgaagctggcacagaaggaacaccgcatccaggaatcagtgttgagaaaagacatgagagctctgaaggtcgagctcaaggagcaggagcttgcatccgaagtggtcgtgaaaaatctgcggttgaagcatactgaggagatcactcgcatgcggaacgacttcgagcggcaggtacgtgagattgaagccaagtacgacaaaaagatgaagatgctcagagacgaactcgacttgcggaggaaaaccgagctccacgaggtggaggaaagaaagaatggccagatccacactctgatgcagcgacatgaggaggccttcactgatattaagaactactacaatgatatcaccctgaacaatctagctctgatcaattctctgaaagagcagatggaggacatgagaaaaaaagaggatcacctggaacgggaaatggccgaggtgagcggccaaaacaagagactcgctgacccactacaaaaagcccgcgaagaaatgagcgagatgcagaagcagctggcaaactatgaaagagacaaacaaatattgctttgtactaaagcaagactcaaggttagagaaaaagagcttaaggacctccagtgggaacacgaagtcctcgaacaaaggtttacaaaggtacaacaggagcgcgatgagctctatagaaagtttacggcagccatccaagaagtccagcaaaaaaccggcttcaaaaatctggtcttggagcgaaaactgcaggccctctccgcagctgtggagaaaaaggaagttcaattcaacgaagtgcttgccgcgtctaatctcgaccccgccgcactgactcttgtgtcccgaaagctggaaacattcttctgctag

SEQ ID NO: 104345 - DNA, 1362 bp, Artificial Sequence
  derived and/or modified sequence
atgagtaaggagcaggtggaggagcacgtcagccggatccgggaggaactggacagagaacgagaagagaggaattattttcagctggaacgggacaaaatccatacattctgggaaatcacaagaaggcagttagaagagaagaaagcagaactcagaaacaaagaccgcgagatggaggaagcagaagagcgccaccaagtggaaatcaaggtctacaaacagaaggtgaagcatctgttgtatgagcatcaaaataatctgaccgagatgaaagccgagggtaccgtggtgatgaaactggcacagaaagaacatcggatccaagagagtgtcctgaggaaggatatgagggccctgaaagtcgaattgaaggagcaggagctcgcctcagaggtggtggtcaaaaacctgagactcaaacatactgaggagatcactagaatgcgcaatgatttcgaacggcaagtccgggaaatcgaggccaaatacgacaagaaaatgaagatgctgcgcgacgaacttgacctgcgcagaaaaactgagctccatgaggttgaagagaggaagaatggtcaaattcacaccctgatgcaacgccacgaagaagctttcaccgatatcaagaactactataacgacatcaccctcaacaatctggcactgatcaactcactcaaagaacagatggaggatatgcgcaagaaggaggaccacctggagcgggaaatggcagaggtttctgggcagaataagaggctggccgacccactgcagaaagctcgggaggagatgagtgagatgcaaaaacagctggcaaattatgagcgtgataagcagatattactctgcacaaaggccagactcaaggtgcgggaaaaagaactcaaggatttgcaatgggaacacgaagtactcgaacagaggtttaccaaagtgcagcaggaaagagatgaattgtaccgcaagttcactgccgctatacaggaagtgcagcagaagactgggtttaaaaatctcgtgttggagcgcaaactgcaagccctctccgccgctgtggagaagaaagaagtgcagtttaatgaggttctggctgctagcaatttagatccagccgcacttacactcgtgtccagaaagctcgaggacgttttagagagtaaaaattccacgatcaaggacctccaatacgagctggcgcaggtgtgtaaagcccacaatgacctcctcaggacatacgaagctaagctgctggctttcggtatccccctggataacgtcggattcaaaccgttggagactgccgtcatcggccagacactgggacaaggacccgctggactagtgggcacccccacctag

SEQ ID NO: 104346 - DNA, 1149 bp, Artificial Sequence
  derived and/or modified sequence
atggtagaggaacacgtgagccggatccgcgaagaactcgatagggagcgcgaggaacgaaattacttccaactcgagcgggacaaaattcatactttctgggaaatcaccaggcgccaactagaagaaaagaaggccgaactgcgcaacaaggaccgcgagatggaggaagccgaagaacgtcaccaggtcgagatcaaggtgtataagcagaaagtaaagcaccttctgtatgaacaccaaaacaatttaaccgaaatgaaagccgaggggaccgtggtgatgaaacttgcccagaaggaacataggatccaggaatcagttctgcggaaagacatgcgtgcactgaaggttgagctgaaggagcaggaattggccagtgaggtggtggtgaagaatctaagactgaagcatactgaagagattacgcgcatgcggaacgacttcgaacgccaagtccgggaaattgaggccaaatatgacaagaagatgaaaatgttgcgggacgaactggaccttcgtcgaaaaactgagctgcacgaagtggaggaacgaaaaaatggacagatccacacactgatgcagaggcacgaggaagcctttaccgatattaagaactactataatgatatcacccttaataaccttgccttgattaactctctcaaggaacagatggaagacatgagaaagaaggaagaccacctggaacgagaaatggccgaggtgtccggccagaacaagaggttggccgacccactacaaaaggctagggaggagatgagtgaaatgcagaaacaactagcgaactacgagcgagataagcaaatactgctgtgcactaaagcgcgactgaaggtaagagagaaggagctgaaggacctgcagtgggagcatgaagtcttagaacagcgtttcactaaagtgcagcaggagcgggacgagctgtacaggaaatttactgccgctatccaagaagttcagcaaaagaccggatttaagaacttggtattggagagaaaattgcaggctctgtctgcggcagtggaaaaaaaggaagtgcagttcaacgaggtgctagctgcctcaaacctagatcctgccgcacttactctggtttccagaaaacttgaaacgttcttttgttag

SEQ ID NO: 104347 - DNA, 1362 bp, Artificial Sequence
  derived and/or modified sequence
atgagcaaggagcaggtggaggagcacgtgagcagaatcagagaggagctggacagagagagagaggagagaaactacttccagctggagagagacaagatccacaccttctgggagatcaccagaagacagctggaggagaagaaggccgagctgagaaacaaggacagagagatggaggaggccgaggagagacaccaggtggagatcaaggtgtacaagcagaaggtgaagcacctgctgtacgagcaccagaacaacctgaccgagatgaaggccgagggcaccgtggtgatgaagctggcccagaaggagcacagaatccaggagagcgtgctgagaaaggacatgagagccctgaaggtggagctgaaggagcaggagctggccagcgaggtggtggtgaagaacctgagactgaagcacaccgaggagatcaccagaatgagaaacgacttcgagagacaggtgagagagatcgaggccaagtacgacaagaagatgaagatgctgagagacgagctggacctgagaagaaagaccgagctgcacgaggtggaggagagaaagaacggccagatccacaccctgatgcagagacacgaggaggccttcaccgacatcaagaactactacaacgacatcaccctgaacaacctggccctgatcaacagcctgaaggagcagatggaggacatgagaaagaaggaggaccacctggagagagagatggccgaggtgagcggccagaacaagagactggccgaccccctgcagaaggccagagaggagatgagcgagatgcagaagcagctggccaactacgagagagacaagcagatcctgctgtgcaccaaggccagactgaaggtgagagagaaggagctgaaggacctgcagtgggagcacgaggtgctggagcagagattcaccaaggtgcagcaggagagagacgagctgtacagaaagttcaccgccgccatccaggaggtgcagcagaagaccggcttcaagaacctggtgctggagagaaagctgcaggccctgagcgccgccgtggagaagaaggaggtgcagttcaacgaggtgctggccgccagcaacctggaccccgccgccctgaccctggtgagcagaaagctggaggacgtgctggagagcaagaacagcaccatcaaggacctgcagtacgagctggcccaggtgtgcaaggcccacaacgacctgctgagaacctacgaggccaagctgctggccttcggcatccccctggacaacgtgggcttcaagcccctggagaccgccgtgatcggccagaccctgggccagggccccgccggcctggtgggcacccccacctag

SEQ ID NO: 104348 - DNA, 1149 bp, Artificial Sequence
  derived and/or modified sequence
atggtggaggagcacgtgagcagaatcagagaggagctggacagagagagagaggagagaaactacttccagctggagagagacaagatccacaccttctgggagatcaccagaagacagctggaggagaagaaggccgagctgagaaacaaggacagagagatggaggaggccgaggagagacaccaggtggagatcaaggtgtacaagcagaaggtgaagcacctgctgtacgagcaccagaacaacctgaccgagatgaaggccgagggcaccgtggtgatgaagctggcccagaaggagcacagaatccaggagagcgtgctgagaaaggacatgagagccctgaaggtggagctgaaggagcaggagctggccagcgaggtggtggtgaagaacctgagactgaagcacaccgaggagatcaccagaatgagaaacgacttcgagagacaggtgagagagatcgaggccaagtacgacaagaagatgaagatgctgagagacgagctggacctgagaagaaagaccgagctgcacgaggtggaggagagaaagaacggccagatccacaccctgatgcagagacacgaggaggccttcaccgacatcaagaactactacaacgacatcaccctgaacaacctggccctgatcaacagcctgaaggagcagatggaggacatgagaaagaaggaggaccacctggagagagagatggccgaggtgagcggccagaacaagagactggccgaccccctgcagaaggccagagaggagatgagcgagatgcagaagcagctggccaactacgagagagacaagcagatcctgctgtgcaccaaggccagactgaaggtgagagagaaggagctgaaggacctgcagtgggagcacgaggtgctggagcagagattcaccaaggtgcagcaggagagagacgagctgtacagaaagttcaccgccgccatccaggaggtgcagcagaagaccggcttcaagaacctggtgctggagagaaagctgcaggccctgagcgccgccgtggagaagaaggaggtgcagttcaacgaggtgctggccgccagcaacctggaccccgccgccctgaccctggtgagcagaaagctggagaccttcttctgctag

SEQ ID NO: 104349 - DNA, 465 bp, Artificial Sequence
  derived and/or modified sequence
atgaaggaccagatgagcaccagcagcgtgcaggccctggccgagagaaagaacagacaggccctgctgggcgacagcggcagccagaactggagcaccggcaccaccgacaagtacggcagactggacagagagctgcagagagccaacagccacttcatcgaggagcagcaggcccagcagcagctgatcgtggagcagcaggacgagcagctggagctggtgagcggcagcatcggcgtgctgaagaacatgagccagagaatcggcggcgagctggaggagcaggccgtgatgctggaggacttcagccacgagctggagagcacccagagcagactggacaacgtgatgaagaagctggccaaggtgagccacatgaccagcgacagaagacagtggtgcgccatcgccatcctgttcgccgtgctgctggtggtgctgatcctgttcctggtgctgtag

SEQ ID NO: 104350 - DNA, 465 bp, Artificial Sequence
  derived and/or modified sequence
atgaaggatcagatgtctacaagctcagtgcaagcactcgccgaacggaagaaccgacaagcactgctgggagactctggcagccaaaattggagcaccgggacaaccgataagtacgggagacttgaccgcgagttgcagcgcgctaactctcacttcatcgaggaacagcaggcgcagcagcaattgattgtcgaacagcaggacgagcaactcgagcttgtgtctggcagcatcggggtgctaaaaaatatgtctcaacgcatcggcggggaactggaagagcaggctgtcatgcttgaagactttagtcacgaactggaaagtactcaaagtaggctcgacaacgtgatgaagaaattagcaaaggtgtcacatatgacatctgatcgccggcagtggtgcgctatcgccatactcttcgccgtgttgctggtggtcctgattctgtttctcgtattgtag

SEQ ID NO: 104351 - DNA, 465 bp, Artificial Sequence
  derived and/or modified sequence
atgaaggaccagatgagcaccagctctgtgcaggccctggccgagaggaagaaccggcaggccctgctgggggacagcggcagccagaactggagcacaggcaccacagacaagtatggccgcctggaccgggagctgcagagggccaacagccacttcatcgaggagcagcaggcccagcagcagctgattgtggagcagcaggatgagcagctggagctggtgtctggcagcattggagtgctgaagaacatgagccagagaattggaggagagctggaggagcaggccgtgatgctggaggacttcagccatgagctggagagcacccagagccggctggacaacgtgatgaagaagctggccaaggtgagccacatgaccagtgaccggcggcagtggtgtgccatcgccatcctgtttgctgtgctgctggtggtgctgatcctcttcctggtgctgtag

SEQ ID NO: 104352 - DNA, 465 bp, Artificial Sequence
  derived and/or modified sequence
atgaaggaccagatgagcaccagcagcgtgcaggccctggccgagagaaagaaccggcaggcgctgttaggggattccggtagccagaactggtctacgggcacgaccgataagtatgggagacttgacagggaacttcagcgggctaacagccacttcatcgaagagcaacaagcacaacagcagctgatcgtggaacagcaggatgagcagctggaacttgtgtctgggtctattggggtgttgaaaaatatgtcccagagaattgggggtgaactcgaagaacaggccgtaatgttggaggatttttcacatgagctggaatctactcaatcaagacttgataacgtcatgaagaaacttgctaaagtaagtcacatgacttcagacagaagacagtggtgtgcaatcgctatactctttgcggtcctgctggttgtcctgattctgttccttgtcctctag

SEQ ID NO: 104353 - DNA, 465 bp, Artificial Sequence
  derived and/or modified sequence
atgaaggatcagatgtctactagtagcgtgcaggctctcgctgaacgcaagaacagacaggctcttctcggcgactccggctcacaaaactggtctaccggaaccacagataaatacgggagactggacagagagctacagcgcgcaaactctcattttattgaagaacagcaggcccagcaacagctgattgtggagcaacaagatgaacagctcgaattagtctccggctcaattggagtcttgaagaacatgagtcagagaatcggcggtgaacttgaagagcaggctgtcatgctggaagacttctcccacgagcttgaatccactcagtctcgcctcgacaacgtcatgaagaagctggcgaaagttagtcatatgacatccgatagaagacagtggtgcgccatcgcaatcctcttcgcggtactgctagtggtgctcatcctattcctggttctgtag

SEQ ID NO: 104354 - protein, 410 aa, Artificial Sequence
  derived and/or modified sequence
MATCHSHRTNSWQISVPSAFVWSVAPIKNVSRRSWVVDDNVLQHNSLSLHIFSHIQHDSSNGWEHGVTDMMLQDKPYPDWGKSARAFWKKGNVRITLFWTVLFTLTSVVVLVITTDWISWDKLNRGFLPSDEVSRAFLASFILVFDLLIVMQDWEFPHFMGDVDVNLPGLHTPHMQFKIPFFQKIFKEEYRIHITGKWFNYGIIFLVLILDLNMWKNQIFYKPHEYGQYIGPGQKIYTVKDSESLKDLNRTKLSWEWRSNHTNPRTNKTYVEGDMFLHSRFIGASLDVKCLAFVPSLIAFVWFGFFIWFFGRFLKNEPRMENQDKTYTRMKRKSPSEHSKDMGITRENTQASVEDPLNDPSLVCIRSDFNEIVYKSSHLTSENLSSQLNESTSATEADQDPTTSKSTPTN

SEQ ID NO: 104355 - DNA, 1233 bp, Artificial Sequence
  derived and/or modified sequence
atggccacctgccacagccacagaaccaacagctggcagatcagcgtgcccagcgccttcgtgtggagcgtggcccccatcaagaacgtgagcagaagaagctgggtggtggacgacaacgtgctgcagcacaacagcctgagcctgcacatcttcagccacatccagcacgacagcagcaacggctgggagcacggcgtgaccgacatgatgctgcaggacaagccctaccccgactggggcaagagcgccagagccttctggaagaagggcaacgtgagaatcaccctgttctggaccgtgctgttcaccctgaccagcgtggtggtgctggtgatcaccaccgactggatcagctgggacaagctgaacagaggcttcctgcccagcgacgaggtgagcagagccttcctggccagcttcatcctggtgttcgacctgctgatcgtgatgcaggactgggagttcccccacttcatgggcgacgtggacgtgaacctgcccggcctgcacaccccccacatgcagttcaagatccccttcttccagaagatcttcaaggaggagtacagaatccacatcaccggcaagtggttcaactacggcatcatcttcctggtgctgatcctggacctgaacatgtggaagaaccagatcttctacaagccccacgagtacggccagtacatcggccccggccagaagatctacaccgtgaaggacagcgagagcctgaaggacctgaacagaaccaagctgagctgggagtggagaagcaaccacaccaaccccagaaccaacaagacctacgtggagggcgacatgttcctgcacagcagattcatcggcgccagcctggacgtgaagtgcctggccttcgtgcccagcctgatcgccttcgtgtggttcggcttcttcatctggttcttcggcagattcctgaagaacgagcccagaatggagaaccaggacaagacctacaccagaatgaagagaaagagccccagcgagcacagcaaggacatgggcatcaccagagagaacacccaggccagcgtggaggaccccctgaacgaccccagcctggtgtgcatcagaagcgacttcaacgagatcgtgtacaagagcagccacctgaccagcgagaacctgagcagccagctgaacgagagcaccagcgccaccgaggccgaccaggaccccaccaccagcaagagcacccccaccaactag

SEQ ID NO: 104356 - DNA, 1233 bp, Artificial Sequence
  derived and/or modified sequence
atggccacgtgccactctcacagaactaacagctggcaaatctccgtcccatcggcattcgtgtggtctgttgctcctattaaaaatgtgtcgcgtagatcctgggtagtcgacgataacgttctgcagcataatagcttgagtttacatatcttttcacatattcagcacgatagttctaatggatgggagcacggggtaactgacatgatgctgcaggataaaccataccctgactggggtaaatcagcccgagccttctggaagaagggcaatgtgcggattacgttattctggactgtcctgttcacacttactagcgtggtggtgttggtgatcacaactgactggatatcatgggacaaactcaacaggggctttctccccagtgacgaagtatcccgtgccttcctcgcctcattcatcctggtttttgatctgctgatcgtgatgcaggactgggaatttcctcactttatgggagacgtggacgttaaccttccaggactccacaccccacacatgcaattcaaaattcccttctttcagaagatctttaaagaggagtaccgcatccatatcactggaaaatggtttaactatggcatcatttttctggttttgatcttagacctcaacatgtggaagaatcagatcttctacaagcctcatgagtacggccagtacatcggccctggacaaaaaatctatacagtcaaggacagtgaaagtctcaaggatttgaatcgtaccaaattatcctgggagtggagaagcaaccataccaatccaagaaccaacaaaacttatgtggagggtgacatgtttctgcactctcgttttattggcgcatccttggacgtcaaatgtctagctttcgtcccttcgttgattgccttcgtttggttcggattcttcatatggttctttgggcgcttcctgaaaaatgaacctcggatggaaaatcaggataaaacctacacaagaatgaagcgtaagtcgcctagcgagcattccaaggatatgggaattactcgggaaaacacccaggcaagcgttgaggatcccctcaatgatcctagcctagtctgcattcgtagtgactttaatgaaatcgtctacaaaagcagccatcttactagtgagaatctcagctcccaactgaatgaatccacgagtgccaccgaggcagatcaggatcccaccactagtaagagcacaccgactaattag

SEQ ID NO: 104357 - DNA, 1233 bp, Artificial Sequence
  derived and/or modified sequence
atggccacctgccacagccacaggaccaacagctggcagatctctgtgcccagcgcctttgtgtggagcgtggcccccatcaagaatgtgagccgccgctcctgggtggtggatgacaacgtgctgcagcacaacagcctgagcctgcacatcttcagccacatccagcacgacagcagcaatggctgggagcacggcgtgacagacatgatgctgcaggacaagccctacccagactggggcaagagcgcccgggccttctggaagaagggaaatgtgcgcatcaccctcttctggacagtgctcttcaccctgacctctgtggtggtgctggtgatcaccacagactggatctcctgggacaagctgaacagaggcttcctgcccagtgatgaggtgtcccgggccttcctggccagcttcatcctggtgtttgacctgctgattgtgatgcaggactgggagttcccccacttcatgggagatgtggatgtgaacctgcccggcctgcacaccccccacatgcagttcaagatccccttcttccagaagatcttcaaggaggagtaccgcatccacatcaccgggaagtggttcaactacggcatcatcttcctggtgctgatcctggacctgaacatgtggaagaaccagatcttctacaagccccatgaatatggccagtacatcggccctggccagaagatctacacagtgaaggacagcgagagcctgaaggacctgaacagaaccaagctgtcctgggagtggaggagcaaccacaccaaccccaggaccaacaagacctacgtggagggggacatgttcctgcacagccgcttcatcggggccagcctggatgtgaagtgcctggcctttgtgcccagcctcatcgcctttgtgtggtttggcttcttcatctggttcttcggccgcttcctgaagaatgagcccaggatggagaaccaggacaagacctacaccaggatgaagaggaagagccccagcgagcacagcaaggacatgggcatcacccgggagaacacccaggcctctgtggaggaccccctgaatgaccccagcctggtgtgcatccgcagtgacttcaatgagatcgtgtacaagagcagccacctgaccagcgagaacctgagcagccagctgaatgaaagcaccagcgccacagaagctgaccaggaccccaccaccagcaagagcacccccaccaactag

SEQ ID NO: 104358 - DNA, 1233 bp, Artificial Sequence
  derived and/or modified sequence
atggccacctgccacagccaccggaccaacagctggcagatcagcgtaccatcagcatttgtatggtccgtggcgccaatcaagaacgtctccaggagatcctgggtcgtggacgacaatgtcctgcaacacaatagcctgagtcttcacatcttctcacacatccagcacgacagcagtaatggctgggagcacggcgtaactgatatgatgcttcaggacaaaccatatcccgattggggcaaatccgctcgcgccttttggaagaaggggaatgtcaggataacactgttctggaccgtcctgtttaccctcacctcagtggtcgtgctggtgatcaccacagactggattagctgggataaacttaaccgggggttcctgccctctgatgaggttagcagggcctttctggcctcgtttatacttgtgtttgaccttttgattgtgatgcaggattgggagttcccacactttatgggcgacgtggatgtcaacttacccggtctccataccccacatatgcagttcaaaatcccattttttcagaagatattcaaggaagaataccgcattcacataacaggcaaatggttcaattacgggattatctttcttgtgttgattctggacctcaatatgtggaaaaaccagatattctacaaacctcatgagtacgggcagtatataggcccaggtcagaaaatctatacggtgaaagacagcgaatccttgaaagacctgaacaggacaaagctctcctgggagtggcgctccaatcatactaacccccggactaacaaaacgtatgtggagggagacatgttcctgcactcgagattcattggtgcctccctggacgtgaagtgtctcgcctttgtccctagcctaatagctttcgtgtggtttggatttttcatctggttttttgggagatttcttaagaatgaaccaagaatggagaaccaggataagacttacacccgcatgaaacggaagagcccatctgaacattccaaagatatgggcatcacccgcgagaatacacaggcatcagtggaggatccactcaatgatccctctctggtatgcatcaggtctgattttaatgagattgtatacaaaagctctcatctgaccagcgaaaatctgtctagtcagttgaatgagagcacatctgcgacagaggctgatcaagacccaacaacttccaagtctacccccacaaattag

SEQ ID NO: 104359 - DNA, 1233 bp, Artificial Sequence
  derived and/or modified sequence
atggctacctgccattcacataggaccaacagctggcagatctccgttccgagtgcctttgtgtggtccgtagccccaattaaaaacgtgtcaaggcgatcttgggtcgtggacgataacgtgttgcagcataacagcctgagtcttcacatattctcacacatacaacacgactcatctaatgggtgggaacacggcgtgacagatatgatgttgcaggataagccctaccccgattgggggaagtccgctcgagcattttggaagaagggtaatgtgagaatcacactgttttggacggtcctctttaccctcacctcggtggtggtgttggtgatcaccaccgactggatatcctgggataagttaaatcggggattcctgccaagcgatgaggtcagtagggcctttctggcctcgttcatcttggttttcgacctactgatcgttatgcaggactgggagttcccacacttcatgggagacgtggacgtaaacctgcccggtctgcataccccgcatatgcagttcaaaatccccttcttccagaagatcttcaaggaagagtaccgtattcacatcaccggaaaatggtttaactacggaattatcttcttagttctgattctcgacttaaatatgtggaagaaccaaatattctataagccacatgagtatgggcagtacatcggaccgggacaaaagatttataccgtgaaagacagcgagtccctgaaggacttaaacaggacgaagctcagttgggaatggagaagcaatcatacaaatcccagaaccaataagacctatgtcgagggagatatgttccttcactccaggttcatcggcgctagcctggatgtgaagtgcttggcttttgtgccaagcctgattgcatttgtgtggtttggcttctttatatggttcttcggacgctttctgaaaaacgagcctcgtatggagaaccaggacaaaacatacactcgaatgaagaggaagagtccttcggaacactctaaggacatggggattaccagagaaaacactcaagccagcgtggaagatccgctgaacgatccttccttggtgtgcattagaagcgactttaacgagattgtgtacaagagctctcatctgacatcagaaaacttgtcctctcagcttaatgaaagtacatccgctaccgaagccgatcaggatcctacgaccagcaaatccacccctaccaattag

SEQ ID NO: 104360 - DNA, 1233 bp, Artificial Sequence
  derived and/or modified sequence
atggctacttgccattctcacaggactaatagctggcaaatttctgttccatcagcgtttgtttggtcagttgctccgattaaaaatgtttcgagaagatcatgggtcgtggatgacaatgttcttcagcacaattctctttctcttcatattttctcacatatacaacacgattcttctaatggatgggaacatggggtcactgatatgatgcttcaggacaaaccctatcctgactggggaaaatcagcaagagctttctggaagaaaggaaatgttaggatcactttattctggacagttctttttactctgacgtctgtggttgtacttgtgattacaacggactggatcagctgggacaagctgaatcggggatttttgcccagtgatgaagtttccagagcattccttgcttcttttatcttggtctttgaccttcttattgtgatgcaggactgggaattcccacatttcatgggagatgttgatgtaaatctccctggtttgcacacccctcacatgcagttcaagattcctttcttccagaaaatcttcaaggaggaatatcgtattcacataacaggcaaatggtttaactatggaattatcttcctcgtcttgattttggatcttaatatgtggaagaaccaaatattttataaacctcatgaatatgggcaatatatcggcccggggcagaagatatatacagtgaaagactcagaaagtttaaaagatttgaacagaaccaagctatcctgggaatggaggtccaatcacactaaccctcggactaataaaacatatgttgagggagacatgttcttacacagcaggttcataggagccagtcttgatgtcaagtgtctggcctttgttccaagcctgatagcctttgtgtggtttggattctttatttggttctttggacgatttttgaaaaatgagccacgcatggagaatcaagacaaaacttacactcgcatgaaaagaaaatctccatcagaacatagcaaagacatgggaatcactcgagaaaacacccaggcttcagtagaagaccccttgaatgacccttctttggtttgcatcaggtctgacttcaatgagatcgtctacaagtcttcccacctaacctcggaaaacttgagctcacagttgaacgaatctactagtgcaacagaagctgatcaagacccaacgacttctaaaagtacacctacgaactag

SEQ ID NO: 104361 - DNA, 789 bp, Artificial Sequence
  derived and/or modified sequence
atgtacatcaaggactgggagttcccccacttcatgggcgacgtggacgtgaacctgcccggcctgcacaccccccacatgcagttcaagatccccttcttccagaagatcttcaaggaggagtacagaatccacatcaccggcaagtggttcaactacggcatcatcttcctggtgctgatcctggacctgaacatgtggaagaaccagatcttctacaagccccacgagtacggccagtacatcggccccggccagaagatctacaccgtgaaggacagcgagagcctgaaggacctgaacagaaccaagctgagctgggagtggagaagcaaccacaccaaccccagaaccaacaagacctacgtggagggcgacatgttcctgcacagcagattcatcggcgccagcctggacgtgaagtgcctggccttcgtgcccagcctgatcgccttcgtgtggttcggcttcttcatctggttcttcggcagattcctgaagaacgagcccagaatggagaaccaggacaagacctacaccagaatgaagagaaagagccccagcgagcacagcaaggacatgggcatcaccagagagaacacccaggccagcgtggaggaccccctgaacgaccccagcctggtgtgcatcagaagcgacttcaacgagatcgtgtacaagagcagccacctgaccagcgagaacctgagcagccagctgaacgagagcaccagcgccaccgaggccgaccaggaccccaccaccagcaagagcacccccaccaactag

SEQ ID NO: 104362 - DNA, 789 bp, Artificial Sequence
  derived and/or modified sequence
atgtacattaaggactgggaattcccacacttcatgggagatgtggacgtcaaccttccgggcctgcacacccctcatatgcagtttaaaataccgtttttccagaaaatctttaaggaggagtaccggattcatattactggtaagtggttcaactatgggatcatcttcttggtgctcatcttggatttgaatatgtggaagaatcagatcttttacaaaccccacgaatacggccaatatatcgggcctggacaaaagatatatactgttaaggattcagaatcgctgaaggacttgaacaggaccaagctcagttgggagtggcgatccaaccacaccaatccccggaccaacaagacgtacgtcgagggcgacatgtttcttcactctcgattcatcggtgccagtttagatgtgaagtgtttggccttcgtgccatccctgattgctttcgtgtggttcggtttctttatctggtttttcggacgtttcttaaagaatgagccacggatggagaaccaagacaagacttacacacgtatgaagcgaaagagcccgtcggagcattctaaggacatggggattacccgtgaaaacacacaagcaagcgtagaggaccccctcaacgatccttccctggtctgcattcgcagcgacttcaatgagatcgtctacaaatcctcacacctaacctccgaaaatttatccagccagcttaacgagagcacaagcgctacagaggccgaccaggacccaactacaagcaagtcaacccccacaaattag

SEQ ID NO: 104363 - DNA, 789 bp, Artificial Sequence
  derived and/or modified sequence
atgtacatcaaggactgggagttcccccacttcatgggagatgtggatgtgaacctgcccggcctgcacaccccccacatgcagttcaagatccccttcttccagaagatcttcaaggaggagtaccgcatccacatcaccgggaagtggttcaactacggcatcatcttcctggtgctgatcctggacctgaacatgtggaagaaccagatcttctacaagccccatgaatatggccagtacatcggccctggccagaagatctacacagtgaaggacagcgagagcctgaaggacctgaacagaaccaagctgtcctgggagtggaggagcaaccacaccaaccccaggaccaacaagacctacgtggagggggacatgttcctgcacagccgcttcatcggggccagcctggatgtgaagtgcctggcctttgtgcccagcctcatcgcctttgtgtggtttggcttcttcatctggttcttcggccgcttcctgaagaatgagcccaggatggagaaccaggacaagacctacaccaggatgaagaggaagagccccagcgagcacagcaaggacatgggcatcacccgggagaacacccaggcctctgtggaggaccccctgaatgaccccagcctggtgtgcatccgcagtgacttcaatgagatcgtgtacaagagcagccacctgaccagcgagaacctgagcagccagctgaatgaaagcaccagcgccacagaagctgaccaggaccccaccaccagcaagagcacccccaccaactag

SEQ ID NO: 104364 - DNA, 789 bp, Artificial Sequence
  derived and/or modified sequence
atgtacatcaaggactgggagttcccccacttcatgggcgacgtggatgtgaatctgcccggactacatacgcctcacatgcagttcaaaatcccctttttccaaaaaatctttaaggaggagtatcgcatccacatcacggggaagtggttcaattacggaataatttttttggtgcttattctagacctgaatatgtggaagaaccagatcttctacaaaccacacgaatacggacagtatattggaccaggtcagaagatctacactgtcaaagatagtgaatcccttaaagaccttaatagaaccaaactttcttgggagtggaggtctaaccacactaacccgagaactaataaaacttacgtggaaggggatatgttcctccattcgcgttttattggagcttcccttgacgtaaagtgcttggccttcgtgccttcacttatcgccttcgtttggttcgggttttttatttggtttttcggacggtttttgaagaatgagcccaggatggaaaaccaggacaagacttacactcgaatgaaaaggaagagtcctagtgagcatagtaaggatatgggaattacccgcgaaaatacccaggcctccgtggaggacccgctgaacgacccaagtttagtttgcatccggagcgacttcaatgaaattgtgtataagtctagccatcttactagcgaaaatctttcgagccagcttaacgagagcacatcggcaacagaagcagaccaggaccccacaacctccaagagcactcccacaaattag

SEQ ID NO: 104365 - DNA, 789 bp, Artificial Sequence
  derived and/or modified sequence
atgtatattaaggattgggagttcccacattttatgggtgatgttgacgtaaacctcccagggctccacacccctcatatgcagtttaaaatccctttctttcaaaaaatctttaaagaagaatatcgaatccacattacagggaaatggttcaattatggcataattttcctggtcctaatcctggatctaaatatgtggaaaaaccaaatcttttacaaaccccacgagtacggccaatatattggtccgggacaaaagatctacaccgtgaaagattcagaatctctgaaagacctgaatagaaccaaactctcctgggagtggaggagcaatcatacaaaccccagaactaataagacttatgtggagggagacatgttcctgcacagccgctttataggagccagcctggatgtaaaatgcttggcgttcgtgccatctctcatcgccttcgtgtggttcggtttcttcatttggttttttgggagatttcttaaaaacgaacccaggatggagaatcaggataaaacgtacacacggatgaagcgaaagagcccaagcgaacactctaaagacatgggcattacgagggaaaatacgcaggccagtgtggaagatccgctcaatgatccttctctggtctgcattcgcagcgatttcaatgaaatcgtgtacaagagcagtcatttgaccagtgaaaacctgtcttctcagttgaatgaatctactagcgctaccgaagcagatcaggaccctactacttccaagtccactcctactaattag

SEQ ID NO: 104366 - DNA, 1874 bp, Artificial Sequence
  derived and/or modified sequence
atgtacataaaagactgggaattcccacatttcatgggagatgttgatgtaaatctccctggtttgcacacccctcacatgcagttcaagattcctttcttccagaaaatcttcaaggaggaatatcgtattcacataacaggcaaatggtttaactatggaattatcttcctcgtcttgattttggatcttaatatgtggaagaaccaaatattttataaacctcatgaatatgggcaatatatcggcccggggcagaagatatatacagtgaaagactcagaaagtttaaaagatttgaacagaaccaagctatcctgggaatggaggtccaatcacactaaccctcggactaataaaacatatgttgagggagacatgttcttacacagcaggttcataggagccagtcttgatgtcaagtgtctggcctttgttccaagcctgatagcctttgtgtggtttggattctttatttggttctttggacgatttttgaaaaatgagccacgcatggagaatcaagacaaaacttacactcgcatgaaaagaaaatctccatcagaacatagcaaagacatgggaatcactcgagaaaacacccaggcttcagtagaagaccccttgaatgacccttctttggtttgcatcaggtctgacttcaatgagatcgtctacaagtcttcccacctaacctcggaaaacttgagctcacagttgaacgaatctactagtgcaacagaagctgatcaagacccaacgacttctaaaagtacacctacgaactagactcggagatagacttggagataacacaaaaagcaaccttgagtgtaactttaaaaatttagtctttccttttgtatatgtaaggtttacgtagtgttaggtaaaaatatgaacaatgccacaacggtgctcaacatgctttttctaggattcattgttttctatttgtattataatacacgtgcctactgtatactcaacagtcctctagagattgcttttcacaattgcacaagctattactgactttacagcatagtggaagattagctgatgacccatgtatctgatgttcaaccatagtggtgccttgagacattaaactgtttttaactgtaccagaaatgaagtgtggaacagttacctaacctatttcacatgggcgttttgtatacaactattttgatctacacttgatgtctgagcagaaaacagaaatagctaaatgtgactcaggaagtatctcttggtttcttattcagcagcagagttggtgactttgacaactggactgcagagaaacatggtgatcaccttttaatttttattggctgtctgccaaatataaatacagatgcaaaattcagtaataggagatccataacccaacatgggtcactactcgtgaaatgtgactttctcccaccagtaattgaaatgaggtgatgatacctaattatgttttcctaattaaagataaattgctacttgattaaaaatcctgcccttcacctttgggaacaaaggttaagagacacagttgggcgaactctcaaatttattggcatttacacaaagtcccagacaaccaaggaactgaagttttcatcatatgagagcagcacatcccaccatttacaatattcgtatatctttctgcaaatatggctctggatagtgaaaattgaaaaacatatgccaaccctgagcaagggaactcctcaaaaaatcatgcagcggaaccttgtcaggtagagaagccgtgcatgaaagaatttgtttaatgtcttgttttgcgtatgtgttttttgtttttgttttttaagaactaaatattgcacattaataaataagaattatacagc

SEQ ID NO: 104367 - protein, 179 aa, Artificial Sequence
  derived and/or modified sequence
MKTPVELAVSGMQTLGLQHRCRGGYRVKARTSYVDETLFGSPAGTRPTPPDFDPPWVEKANRTRGVGKEASKALGAKGSCETTPSRGSTPTLTPRKKNKYRPISHTPSYCDESLFGSRSEGASFGAPRMAKGDAAKLRALLWTPPPTPRGSHSPRPREAPPPVPPTQMGLRISGLPRQG

SEQ ID NO: 104368 - protein, 293 aa, Artificial Sequence
  derived and/or modified sequence
MLREPRKQGLAGRAHLLSPGTTGSMKTPVELAVSGMQTLGLQHRCRGGYRVKARTSYVDETLFGSPAGTRPTPPDFDPPWVEKANRTRGVGKEASKALGAKGSCETTPSRGSTPTLTPRKKNKYRPISHTPSYCDESLFGSRSEGASFGAPRMAKGDAAKLRALLWTPPPTPRGSHSPRPREAPLRAIHPAGPSKTEPGPAADSQKLSMGGLHSSRPLKRGLSHSLTHLNVPSTGHPATSAPHTNGPQDLRPSTSGVTFRSPLVTSRARSVSISVPSTPRRGGATQKPKPPWK

SEQ ID NO: 104369 - DNA, 882 bp, Artificial Sequence
  derived and/or modified sequence
atgctgagagagcccagaaagcagggcctggccggcagagcccacctgctgagccccggcaccaccggcagcatgaagacccccgtggagctggccgtgagcggcatgcagaccctgggcctgcagcacagatgcagaggcggctacagagtgaaggccagaaccagctacgtggacgagaccctgttcggcagccccgccggcaccagacccaccccccccgacttcgaccccccctgggtggagaaggccaacagaaccagaggcgtgggcaaggaggccagcaaggccctgggcgccaagggcagctgcgagaccacccccagcagaggcagcacccccaccctgacccccagaaagaagaacaagtacagacccatcagccacacccccagctactgcgacgagagcctgttcggcagcagaagcgagggcgccagcttcggcgcccccagaatggccaagggcgacgccgccaagctgagagccctgctgtggacccccccccccacccccagaggcagccacagccccagacccagagaggcccccctgagagccatccaccccgccggccccagcaagaccgagcccggccccgccgccgacagccagaagctgagcatgggcggcctgcacagcagcagacccctgaagagaggcctgagccacagcctgacccacctgaacgtgcccagcaccggccaccccgccaccagcgccccccacaccaacggcccccaggacctgagacccagcaccagcggcgtgaccttcagaagccccctggtgaccagcagagccagaagcgtgagcatcagcgtgcccagcacccccagaagaggcggcgccacccagaagcccaagcccccctggaagtag

SEQ ID NO: 104370 - DNA, 882 bp, Artificial Sequence
  derived and/or modified sequence
atgctgagggaacctaggaagcaggggctggccggccgcgcccatctactgtcacctggaactacaggctctatgaaaacgcccgtggagctggcagtgagcgggatgcagacgctggggttacaacaccgttgcagggggggttatcgcgtgaaggcacggacttcttatgtggacgagacgttattcggaagtcccgctggaactcggcccactccgccggacttcgacccaccttgggttgagaaggccaatcgaacaagaggagtcgggaaagaagcatctaaagccctcggagccaaaggtagctgcgaaaccactccaagccgcgggagtaccccaactctcaccccgaggaaaaagaataaataccggccaatcagccacactccttcttactgcgatgaaagcttgttcgggtctcgctctgaaggggctagctttggcgcaccacgcatggccaagggtgacgcggctaaactgagggctctgctgtggacaccacccccaacaccacgaggtagccacagcccgcggcccagagaagcccccctgagagctattcacccggcaggcccatcaaaaacagaacccggaccagcagcagattcccagaaactatctatgggggggctccattccagtcgcccactcaagagagggttgagccattctctgacccatctaaatgtgccatctacaggacatcccgctaccagcgcgcctcacactaatggcccacaagaccttaggcccagcacttcaggagtaacatttcggagccctctggtcacgagcagggctcgatctgtgtccatctctgttccctccactccgcggagggggggagccacacaaaagcccaaacctccctggaagtag

SEQ ID NO: 104371 - DNA, 882 bp, Artificial Sequence
  derived and/or modified sequence
atgctgcgggagcccaggaagcagggcctggccggccgggcccacctgctgagccctggcaccaccggctccatgaagacccctgtggagctggccgtgtctggcatgcagaccctgggcctgcagcaccgctgccggggcggctacagagtgaaggcccggaccagctatgtggatgagaccctgtttggcagccctgctggcacccggcccaccccaccagactttgaccccccctgggtggagaaggccaacagaacccggggcgtgggcaaggaggccagcaaggccctgggcgccaagggcagctgtgagaccacccccagccggggcagcacccccaccctgacccccaggaagaagaacaagtaccggcccatcagccacacccccagctactgtgatgagagcctgtttggcagccgctctgagggcgccagctttggagcccccaggatggccaagggagatgctgccaagctgcgggccctgctgtggaccccaccacccaccccccggggcagccacagcccccggccccgggaggcccccctgcgggccatccaccctgctggccccagcaagacagagcccggccctgctgctgacagccagaagctgtccatgggcggcctgcacagcagccggcccctgaagaggggcctgagccacagcctgacccacctgaatgtgcccagcacaggccacccagccaccagcgccccccacaccaacggcccccaggacctgcggcccagcaccagcggcgtgaccttccgcagccccctggtgaccagccgggcccggtctgtgtccatctctgtgcccagcaccccccggcggggcggggccacccagaagcccaagccaccctggaagtag

SEQ ID NO: 104372 - DNA, 882 bp, Artificial Sequence
  derived and/or modified sequence
atgctgcgggagccccggaagcagggcctggccggccgggcccacctgctctccccaggcacaacaggctccatgaaaacccccgtagagcttgcggtgtctggtatgcagaccttggggctgcagcaccggtgcagggggggctatcgcgtcaaagcccgtacatcgtatgtggatgagacattatttgggtctcctgctgggaccaggcccaccccgcccgatttcgacccgccatgggttgagaaagccaatagaacaagaggagtgggtaaggaggcctcaaaggctctgggggctaagggatcctgtgaaactactccctccaggggctctactcccacgcttacgcccagaaaaaagaataaatacaggcccatttcacacaccccaagttattgtgacgagtccttatttggatctaggagcgagggtgcctcgtttggggcccccagaatggctaagggtgacgctgctaagcttagggccttactctggacacccccccccactcctcgcggcagtcatagtccaaggccgcgggaggcgccattgcgggcaattcaccccgcggggccaagcaaaacggaaccagggcctgctgctgactcccagaaactgagcatgggcgggttgcactctagcaggccactaaagcgcgggctttctcactcgctcactcacctgaatgtaccaagtactggccaccccgcaactagtgcacctcacactaacggtccgcaggatctccgaccgtcaacttccggggtcacttttcggtcgcctttagtcacctccagagcccggagcgtgagtataagcgtaccttctactccacggagaggcggcgctactcagaaaccaaaacctccatggaagtag

SEQ ID NO: 104373 - DNA, 882 bp, Artificial Sequence
  derived and/or modified sequence
atgctacgcgagccccgaaaacagggtcttgctggacgggctcacttgctgtcgccaggcaccactggctctatgaaaactcccgtggagctggctgtgagcgggatgcagaccctcgggcttcagcaccgctgtaggggcggataccgagtcaaggctagaacgtcgtacgtcgatgaaactcttttcgggtcccccgcagggactaggcctactccaccagacttcgatcctccatgggtcgagaaagccaataggactaggggggtgggaaaggaggcctcaaaggccctcggcgctaagggcagctgcgagacaaccccatctcggggaagtacaccaactctgactcccagaaaaaaaaacaaatacagacctatttcacacaccccctcttattgcgatgagagtctgttcggttctcgaagcgaaggggcttcttttggagcacccaggatggctaaaggagacgccgctaagctccgggctctgctgtggacgccgccaccaacacctaggggcagtcactcccctaggcccagagaggcaccacttcgggcaattcaccccgctggcccttcaaaaactgagcccggaccagcagccgattcccagaaactatccatgggtggactgcactccagccgtccgctgaagcgaggcctctctcactccctgactcatttgaatgttcctagtaccggtcaccccgcaactagtgcccctcacacgaacgggccacaggatctgcgtccctccacttcaggtgtgacctttagatccccgctggtgacttccagggccagaagcgtttcgattagcgtgccttcgaccccccgacgcggaggtgccactcaaaagcccaaaccgccatggaagtag

SEQ ID NO: 104374 - DNA, 1709 bp, Artificial Sequence
  derived and/or modified sequence
agtgcctgcggccctcggcggcctagtacacacgcacctgagtgagtggcaccagaggaccctctccatgtttagggacctcctgggcctcaggagcgtggcgcccgcccctgggcggactccccccatccgcgggcgcgaatggtccgggccgcgtccgcagtgctgctggctgctccctggttgctgggtgcaaagtgctgggttctgggtttctggattcgcgggccgttcacacgtagcctgtgccggctcctcggatgcaccgcgcgcccccgcgccctcaccgacgggtccagacctggtgggaagaaggtgcggggacgggtccctgaggatcccgatgcctacgagccaagatgctcagctttataggtgtgacctacacatgtgacttcacctcagttttgtgatccgtaaaatggacaaattcgaagctacttcacagtgctgttgagaggattaaatgaaacaatgcttgtaaagctctttgcaggagggagcctcggaagcagggcctggccggcagagcacacctgctgtcaccagggaccacaggcagcatgaagacccccgtggagctggccgtcagtgggatgcagaccctcggccttcagcaccgctgccgaggtggctaccgggtcaaggccaggacgtcatatgtggatgagactctgtttggcagcccagcaggcacccggcctaccccaccggacttcgatccgccctgggtggagaaggctaacagaaccagaggcgtgggcaaggaggcatcgaaggccttgggggcaaaggggagctgtgagaccaccccctcaaggggcagcacccccaccctcacaccaaggaagaagaacaaatacagacccatcagccacaccccgtcttactgtgatgagtcgctgtttggctcccgatctgaaggcgccagcttcggggccccgcggatggcgaagggggatgccgcaaagctccgtgctctcttgtggacgccaccacctacccccaggggtagccactcgccccgccccagggaggcaccactgcgagccattcacccagctggtccctccaagacagagccggggccagcggcagactcccagaagttatctatgggtgggttacactcttcacgccccctgaagcggggactttcccattccctcacccacctgaatgtccccagcactggtcatccagccaccagtgccccccacacaaatgggcctcaggatctcaggccttccacgtcaggggtgaccttccggagccccctggtgacttccagggctcgctcagttagcatttcagtgccatctaccccacgacgaggtggggccacccagaaaccaaagcccccttggaaatgatactctttcatcagggttgcctatggggccacggcgacaggtatggccccttgccagggtaggaggacattcatcacccagggaaccccaggtattaaagaagcccctgtgggggcagacagacatagcaggggtgggcagtgcctccctttatcctgacaatctctagtcgattcttgcctttttctcccgattgcggatttgggggccacctctaagatgcctctctccagccctgtctcaaccatactccaaattagtgccaacccaggggcctggcacctcccacatcatccattgtcttgctgccaagtgcgaataaacggcgtgattgcc

SEQ ID NO: 104375 - DNA, 2053 bp, Artificial Sequence
  derived and/or modified sequence
gcggtgaccacgtgacctccgctgagctttcgccagtgcctgcggccctcggcggcctagtacacacgcacctgagtgagtggcaccagaggaccctctccatgtttagggacctcctgggcctcaggagcgtggcgcccgcccctgggcggactccccccatccgcgggcgcgaatggtccgggccgcgtccgcagtgctgctggctgctccctggttgctgggtgcaaagtgctgggttctgggtttctggattcgcgggccgttcacacgtagcctgtgccggctcctcgggtgagtccgtccgcgcgcggtgccccgggacggcctaggctgccgggggtccggggccccaggcattccgggctgcagattgacggggatcccggatgcaccgcgcgcccccgcgccctcaccgacgggtccagacctggtgggaagaaggtgcggggacgggtccctgaggatcccgatgcctacgagccaagatgctcagctttataggtgtgacctacacatgtgacttcacctcagttttgtgatccgtaaaatggacaaattcgaagctacttcacagtgctgttgagaggattaaatgaaacaatgcttgtaaagctctttgcaggagggagcctcggaagcagggcctggccggcagagcacacctgctgtcaccagggaccacaggcagcatgaagacccccgtggagctggccgtcagtgggatgcagaccctcggccttcagcaccgctgccgaggtggctaccgggtcaaggccaggacgtcatatgtggatgagactctgtttggcagcccagcaggcacccggcctaccccaccggacttcgatccgccctgggtggagaaggctaacagaaccagaggcgtgggcaaggaggcatcgaaggccttgggggcaaaggggagctgtgagaccaccccctcaaggggcagcacccccaccctcacaccaaggaagaagaacaaatacagacccatcagccacaccccgtcttactgtgatgagtcgctgtttggctcccgatctgaaggcgccagcttcggggccccgcggatggcgaagggggatgccgcaaagctccgtgctctcttgtggacgccaccacctacccccaggggtagccactcgccccgccccagggaggcaccactgcgagccattcacccagctggtccctccaagacagagccggggccagcggcagactcccagaagttatctatgggtgggttacactcttcacgccccctgaagcggggactttcccattccctcacccacctgaatgtccccagcactggtcatccagccaccagtgccccccacacaaatgggcctcaggatctcaggccttccacgtcaggggtgaccttccggagccccctggtgacttccagggctcgctcagttagcatttcagtgccatctaccccacgacgaggtggggccacccagaaaccaaagcccccttggaaatgatactctttcatcagggttgcctatggggccacggcgacaggtatggccccttgccagggtaggaggacattcatcacccagggaaccccaggtattaaagaagcccctgtgggggcagacagacatagcaggggtgggcagtgcctccctttatcctgacaatctctagtcgattcttgcctttttctcccgattgcggatttgggggccacctctaagatgcctctctccagccctgtctcaaccatactccaaattagtgccaacccaggggcctggcacctcccacatcatccattgtcttgctgccaagtgcgaataaacggcgtgattgccaacctggagggtcccctcttatcccttcaagccaagcttcctgctcaggattagtttccagctaagtctgcaagccctagaggagtttttccaggctgtctgtgaagcctggggaacacaacggcaactgggagatttgtgagtgaacactgtttcatcttaatatgcttctgaatttattttcatgtactaaatagatcagctcatcaaagcca

SEQ ID NO: 104376 - DNA, 2041 bp, Artificial Sequence
  derived and/or modified sequence
gcggtgaccacgtgacctccgctgagctttcgccagtgcctgcggccctcggcggcctagtacacacgcacctgagtgagtggcaccagaggaccctctccatgtttagggacctcctgggcctcaggagcgtggcgcccgcccctgggcggactccccccatccgcgggcgcgaatggtccgggccgcgtccgcagtgctgctggctgctccctggttgctgggtgcaaagtgctgggttctgggtttctggattcgcgggccgttcacacgtagcctgtgccggctcctcgggtgagtccgtccgcgcgcggtgccccgggacggcctaggctgccgggggtccggggccccaggcattccgggctgcagattgacggggatcccggatgcaccgcgcgcccccgcgccctcaccgacgggtccagacctggtgggaagaaggtgcggggacgggtccctgaggatcccgatgcctacgagccaagatgctcaggtgtgacctacacatgtgacttcacctcagttttgtgatccgtaaaatggacaaattcgaagctacttcacagtgctgttgagaggattaaatgaaacaatgcttgtaaagctctttgcaggagggagcctcggaagcagggcctggccggcagagcacacctgctgtcaccagggaccacaggcagcatgaagacccccgtggagctggccgtcagtgggatgcagaccctcggccttcagcaccgctgccgaggtggctaccgggtcaaggccaggacgtcatatgtggatgagactctgtttggcagcccagcaggcacccggcctaccccaccggacttcgatccgccctgggtggagaaggctaacagaaccagaggcgtgggcaaggaggcatcgaaggccttgggggcaaaggggagctgtgagaccaccccctcaaggggcagcacccccaccctcacaccaaggaagaagaacaaatacagacccatcagccacaccccgtcttactgtgatgagtcgctgtttggctcccgatctgaaggcgccagcttcggggccccgcggatggcgaagggggatgccgcaaagctccgtgctctcttgtggacgccaccacctacccccaggggtagccactcgccccgccccagggaggcaccactgcgagccattcacccagctggtccctccaagacagagccggggccagcggcagactcccagaagttatctatgggtgggttacactcttcacgccccctgaagcggggactttcccattccctcacccacctgaatgtccccagcactggtcatccagccaccagtgccccccacacaaatgggcctcaggatctcaggccttccacgtcaggggtgaccttccggagccccctggtgacttccagggctcgctcagttagcatttcagtgccatctaccccacgacgaggtggggccacccagaaaccaaagcccccttggaaatgatactctttcatcagggttgcctatggggccacggcgacaggtatggccccttgccagggtaggaggacattcatcacccagggaaccccaggtattaaagaagcccctgtgggggcagacagacatagcaggggtgggcagtgcctccctttatcctgacaatctctagtcgattcttgcctttttctcccgattgcggatttgggggccacctctaagatgcctctctccagccctgtctcaaccatactccaaattagtgccaacccaggggcctggcacctcccacatcatccattgtcttgctgccaagtgcgaataaacggcgtgattgccaacctggagggtcccctcttatcccttcaagccaagcttcctgctcaggattagtttccagctaagtctgcaagccctagaggagtttttccaggctgtctgtgaagcctggggaacacaacggcaactgggagatttgtgagtgaacactgtttcatcttaatatgcttctgaatttattttcatgtactaaatagatcagctcatcaaa

SEQ ID NO: 104377 - DNA, 1898 bp, Artificial Sequence
  derived and/or modified sequence
ctccgctgagctttcgccagtgcctgcggccctcggcggcctagtacacacgcacctgagtgagtggcaccagaggaccctctccatgtttagggacctcctgggcctcaggagcgtggcgcccgcccctgggcggactccccccatccgcgggcgcgaatggtccgggccgcgtccgcagtgctgctggctgctccctggttgctgggtgcaaagtgctgggttctgggtttctggattcgcgggccgttcacacgtagcctgtgccggctcctcgggtgagtccgtccgcgcgcggtgccccgggacggcctaggctgccgggggtccggggccccaggcattccgggctgcagattgacggggatcccggatgcaccgcgcgcccccgcgccctcaccgacgggtccagacctggtgggaagaaggtgcggggacgggtccctgaggatcccgatgcctacgagccaagatgctcagggagcctcggaagcagggcctggccggcagagcacacctgctgtcaccagggaccacaggcagcatgaagacccccgtggagctggccgtcagtgggatgcagaccctcggccttcagcaccgctgccgaggtggctaccgggtcaaggccaggacgtcatatgtggatgagactctgtttggcagcccagcaggcacccggcctaccccaccggacttcgatccgccctgggtggagaaggctaacagaaccagaggcgtgggcaaggaggcatcgaaggccttgggggcaaaggggagctgtgagaccaccccctcaaggggcagcacccccaccctcacaccaaggaagaagaacaaatacagacccatcagccacaccccgtcttactgtgatgagtcgctgtttggctcccgatctgaaggcgccagcttcggggccccgcggatggcgaagggggatgccgcaaagctccgtgctctcttgtggacgccaccacctacccccaggggtagccactcgccccgccccagggaggcaccactgcgagccattcacccagctggtccctccaagacagagccggggccagcggcagactcccagaagttatctatgggtgggttacactcttcacgccccctgaagcggggactttcccattccctcacccacctgaatgtccccagcactggtcatccagccaccagtgccccccacacaaatgggcctcaggatctcaggccttccacgtcaggggtgaccttccggagccccctggtgacttccagggctcgctcagttagcatttcagtgccatctaccccacgacgaggtggggccacccagaaaccaaagcccccttggaaatgatactctttcatcagggttgcctatggggccacggcgacaggtatggccccttgccagggtaggaggacattcatcacccagggaaccccaggtattaaagaagcccctgtgggggcagacagacatagcaggggtgggcagtgcctccctttatcctgacaatctctagtcgattcttgcctttttctcccgattgcggatttgggggccacctctaagatgcctctctccagccctgtctcaaccatactccaaattagtgccaacccaggggcctggcacctcccacatcatccattgtcttgctgccaagtgcgaataaacggcgtgattgccaacctggagggtcccctcttatcccttcaagccaagcttcctgctcaggattagtttccagctaagtctgcaagccctagaggagtttttccaggctgtctgtgaagcctggggaacacaacggcaactgggagatttgtgagtgaacactgtttcatcttaatatgcttctgaatttattttcatgtactaaatagatcagctcatc

SEQ ID NO: 104378 - DNA, 1020 bp, Artificial Sequence
  derived and/or modified sequence
cctggttgctgggtgcaaagtgctgggttctgggtttctggattcgcgggccgttcacacgtagcctgtgccggctcctcgggtgagtccgtccgcgcgcggtgccccgggacggcctaggctgccgggggtccggggccccaggcattccgggctgcagattgacggggatcccggatgcaccgcgcgcccccgcgccctcaccgacgggtccagacctggtgggaagaaggtgcggggacgggtccctgaggatcccgatgcctacgagccaagatgctcagctttataggtgtgacctacacatgtgacttcacctcagttttgtgatccgtaaaatggacaaattcgaagctacttcacagtgctgttgagaggattaaatgaaacaatgcttgtaaagctctttgcaggagggagcctcggaagcagggcctggccggcagagcacacctgctgtcaccagggaccacaggcagcatgaagacccccgtggagctggccgtcagtgggatgcagaccctcggccttcagcaccgctgccgaggtggctaccgggtcaaggccaggacgtcatatgtggatgagactctgtttggcagcccagcaggcacccggcctaccccaccggacttcgatccgccctgggtggagaaggctaacagaaccagaggcgtgggcaaggaggcatcgaaggccttgggggcaaaggggagctgtgagaccaccccctcaaggggcagcacccccaccctcacaccaaggaagaagaacaaatacagacccatcagccacaccccgtcttactgtgatgagtcgctgtttggctcccgatctgaaggcgccagcttcggggccccgcggatggcgaagggggatgccgcaaagctccgtgctctcttgtggacgccaccacctacccccaggggtagccactcgccccgccccagggaggcaccaccaccagtgccccccacacaaatgggcctcaggatctcaggccttccacgtcaggggtga

SEQ ID NO: 104379 - protein, 387 aa, Artificial Sequence
  derived and/or modified sequence
MALLHSGRVLPGIAAAFHPGLAAAASARASSWWTHVEMGPPDPILGVTEAFKRDTNSKKMNLGVGAYRDDNGKPYVLPSVRKFVTVQTISGTGALRIGASFLQRFFKFSRDVFLPKPTWGNHTPIFRDAGMQLQGYRYYDPKTCGFDFTGAVEDISKIPEQSVLLLHACAHNPTGVDPRPEQWKEIATVVKKRNLFAFFDMAYQGFASGDGDKDAWAVRHFIEQGINVCLCQSYAKNMGLYGERVGAFTMVCKDADEAKRVESQLKILIRPMYSNPPLNGARIAAAILNTPDLRKQWLQEVKVMADRIIGMRTQLVSNLKKEGSTHNWQHITDQIGMFCFTGLKPEQVERLIKEFSIYMTKDGRISVAGVTSSNVGYLAHAIHQVTK

SEQ ID NO: 104380 - DNA, 1164 bp, Artificial Sequence
  derived and/or modified sequence
atggcccttttgcacagcggtagagtcctgccgggcatcgccgccgcgtttcaccccggactggcagccgcggcttcggcaagggcatcttcatggtggactcacgtcgaaatgggtccacctgacccgatactcggcgttacggaggcttttaagagagatactaatagcaagaagatgaaccttggggtcggcgcttatcgagacgacaacggaaagccctacgtcctcccctccgtccgcaagtttgtgacagtccaaaccatctccggaaccggagctctgagaataggggccagtttcctccagaggttttttaaatttagtagggacgttttccttcccaaaccaacttggggaaatcatacaccaatcttccgagacgctggaatgcaactgcaagggtacaggtattatgacccgaagacatgtggatttgattttacaggggccgtcgaggatatcagcaaaatccccgagcaatccgttctgcttctgcacgcgtgcgctcacaaccccacaggagtagaccccaggcctgagcagtggaaagagatagctaccgtagtcaaaaagagaaacttatttgcattctttgatatggcataccagggattcgcttcaggcgacggggataaggacgcctgggctgtccggcacttcattgaacaaggaattaatgtctgcctctgccagtcctatgccaaaaacatgggcttgtacggtgaacgagttggagctttcacaatggtctgtaaagacgcagatgaggccaagcgggttgagtctcagcttaagattctgatcagacccatgtatagcaacccccccttgaatggtgccagaatagccgccgcgatcctaaatacacctgatctgcgaaaacagtggctccaggaagtgaaggtcatggcagaccggatcattgggatgcgcactcaacttgtgtctaacctgaaaaaggagggtagcacccataactggcagcacatcacagaccagattggcatgttttgtttcacaggccttaagcctgagcaggtggaacgcctcattaaggagttctccatatatatgacaaaggatggccgcatcagcgtagcgggcgtgacgagcagtaatgtcgggtacctagctcacgccatacatcaggtcacaaagtag

SEQ ID NO: 104381 - DNA, 1342 bp, Artificial Sequence
  derived and/or modified sequence
accttcagcaggagccggttccctgtgtgtgtgtccgctcgccctctgctccgtcctgcggctgcccactgccctcctacggtccaccatggccctgctgcactccggccgcgtcctccccgggatcgccgccgccttccacccgggcctcgccgccgcggcctctgccagagccagctcctggtggacccatgtggaaatgggacctccagatcccattctgggagtcactgaagcctttaagagggacaccaatagcaaaaagatgaatctgggagttggtgcctaccgggatgataatggaaagccttacgttctgcctagcgtccgcaaggcagaggcccagattgccgcaaaaaatttggacaaggaatacctgcccattgggggactggctgaattttgcaaagattttttaagttcagccgagatgtctttctgcccaaaccaacctggggaaaccacacacccatcttcagggatgctggcatgcagctacaaggttatcggtattatgaccccaagacttgcggttttgacttcacaggcgctgtggaggatatttcaaaaataccagagcagagtgttcttcttctgcatgcctgcgcccacaatcccacgggagtggacccgcgtccggaacagtggaaggaaatagcaacagtggtgaagaaaaggaatctctttgcgttctttgacatggcctaccaaggctttgccagtggtgatggtgataaggatgcctgggctgtgcgccacttcatcgaacagggcattaatgtttgcctctgccaatcatatgccaagaacatgggcttatatggtgagcgtgtaggagccttcactatggtctgcaaagatgcggatgaagccaaaagggtagagtcacagttgaagatcttgatccgtcccatgtattccaaccctcccctcaatggggcccggattgctgctgccattctgaacaccccagatttgcgaaaacaatggctgcaagaagtgaaagtcatggctgaccgcatcattggcatgcggactcaactggtctccaacctcaagaaggagggttccacccacaattggcaacacatcaccgaccaaattggcatgttctgtttcacagggctaaagcctgaacaggtggagcggctgatcaaggagttctccatctacatgacaaaagatggccgcatctctgtggcaggggtcacctccagcaacgtgggctaccttgcccatgccattcaccaggtcaccaagtaatgtccctggtgcgaggaaacagagacaacctttctgtcttcagcctctgctattgagagcttcacacagacaatgagag

SEQ ID NO: 104382 - DNA, 1615 bp, Artificial Sequence
  derived and/or modified sequence
ccctgtccttaccttcagcaggagccggttccctgtgtgtgtgtccgctcgccctctgctccgtcctgcggctgcccactgccctcctacggtccaccatggccctgctgcactccggccgcgtcctccccgggatcgccgccgccttccacccgggcctcgccgccgcggcctctgccagagccagctcctggtggacccatgtggaaatgggacctccagatcccattctgggagtcactgaagcctttaagagggacaccaatagcaaaaagatgaatctgggagttggtgcctaccgggatgataatggaaagccttacgttctgcctagcgtccgcaagtttgtcactgtgcagaccatttctggaactggagccttaaggatcggagccagttttctgcaaagattttttaagttcagccgagatgtctttctgcccaaaccaacctggggaaaccacacacccatcttcagggatgctggcatgcagctacaaggttatcggtattatgaccccaagacttgcggttttgacttcacaggcgctgtggaggatatttcaaaaataccagagcagagtgttcttcttctgcatgcctgcgcccacaatcccacgggagtggacccgcgtccggaacagtggaaggaaatagcaacagtggtgaagaaaaggaatctctttgcgttctttgacatggcctaccaaggctttgccagtggtgatggtgataaggatgcctgggctgtgcgccacttcatcgaacagggcattaatgtttgcctctgccaatcatatgccaagaacatgggcttatatggtgagcgtgtaggagccttcactatggtctgcaaagatgcggatgaagccaaaagggtagagtcacagttgaagatcttgatccgtcccatgtattccaaccctcccctcaatggggcccggattgctgctgccattctgaacaccccagatttgcgaaaacaatggctgcaagaagtgaaagtcatggctgaccgcatcattggcatgcggactcaactggtctccaacctcaagaaggagggttccacccacaattggcaacacatcaccgaccaaattggcatgttctgtttcacagggctaaagcctgaacaggtggagcggctgatcaaggagttctccatctacatgacaaaagatggccgcatctctgtggcaggggtcacctccagcaacgtgggctaccttgcccatgccattcaccaggtcaccaagtaatgtccctggtgcgaggaaacagagacaacctttctgtcttcagcctctgctattgagagcttcacacagacaatgagagagggtggatggtggtgagtggatcatttctttcagccacagtgtgtaacactcagcatttgaatgtttctcagaaaagaacatgtagtgacacagggcagaggcatccatggctggcgtctggaatattaaaccaaactctccccggtccttttttctccaacttttctcaaagagtttacatgtgcaagaaagtcatcgcaccaaaaaacctgtcaattatgccattgcaatatttcagaagctttaactgaagtgtcaggttcctcgtgaga

SEQ ID NO: 104383 - DNA, 1164 bp, Artificial Sequence
  derived and/or modified sequence
atggccctgctgcacagcggccgggtgctgcccggcattgctgctgccttccaccctggcctggccgccgccgccagcgcccgggccagctcctggtggacccacgtggagatgggccccccagaccccatcctgggcgtgacagaggccttcaagagggacaccaacagcaagaagatgaacctgggcgtgggcgcctacagagatgacaatggcaagccctacgtgctgcccagcgtgaggaagtttgtgacagtgcagaccatcagcggcaccggggccctgagaattggagccagcttcctgcagcgcttcttcaagttcagcagagatgtgttcctgcccaagcccacctggggcaaccacacccccatcttcagagatgctggcatgcagctgcagggctaccgctactatgaccccaagacctgtggctttgacttcaccggggctgtggaggacatcagcaagatccctgagcagagcgtgctgctgctgcacgcctgtgcccacaaccccaccggggtggaccccaggcctgagcagtggaaggagatcgccaccgtggtgaagaagaggaacctgtttgccttctttgacatggcctaccagggctttgccagcggagatggagacaaggatgcctgggccgtgcgccacttcatcgagcagggcatcaacgtgtgcctgtgccagagctatgccaagaacatgggcctgtatggagagcgggtgggcgccttcaccatggtgtgcaaggatgctgatgaggccaagagggtggagagccagctgaagatcctgatccggcccatgtacagcaacccccccctgaatggagccagaattgctgctgccatcctgaacaccccagacctgaggaagcagtggctgcaggaggtgaaggtgatggctgaccgcatcatcggcatgaggacccagctggtgagcaacctgaagaaggagggcagcacccacaactggcagcacatcacagaccagatcggcatgttctgcttcaccggcctgaagccagagcaggtggagcggctcatcaaggagttcagcatctacatgaccaaggatggccgcatctctgtggccggcgtgaccagcagcaatgtgggctacctggcccacgccatccaccaggtgaccaagtag

SEQ ID NO: 104384 - DNA, 1164 bp, Artificial Sequence
  derived and/or modified sequence
atggccctgctgcacagcggccgggtgctgcccggcatcgccgccgcgttccacccaggcctggcggctgctgcctcagctagagcctcctcgtggtggacccatgtggagatggggccccctgaccctattctgggtgtcacggaagcatttaagcgcgatacaaactccaaaaaaatgaatctgggcgtcggggcctacagagacgacaacgggaagccctatgtgctcccatccgtcaggaagttcgtgacggtccagacaatctcaggcacaggggcattgcgcatcggcgcgtcgtttcttcagaggttcttcaagtttagccgcgacgttttcctgccaaagccaacatggggaaaccacacaccaatctttcgcgacgccggcatgcaactccaaggatatcgttattatgacccgaaaacctgtggcttcgacttcaccggtgccgtggaagacatttcaaagatccctgagcagtcagtgctcctcctacacgcctgtgcacacaacccaacgggcgtggacccccgcccggagcaatggaaagaaatcgccactgttgtgaagaaacgaaatctatttgcatttttcgacatggcttatcagggcttcgctagtggtgatggggataaagacgcatgggccgtccggcacttcatcgaacagggcatcaacgtatgcctgtgtcagagctatgccaagaatatggggctgtatggcgagagggtcggtgccttcactatggtgtgcaaggacgccgatgaggccaagcgcgtggagagccagctgaagatattgatcagaccaatgtactccaatccccccttgaacggggctaggatcgcggctgccattcttaatacgcctgacctgaggaaacaatggttacaggaagtcaaggtgatggcggacagaataatcggcatgcgtacccaattggtgtctaatctgaaaaaagaaggaagtacgcacaattggcagcacataactgaccagatcggcatgttctgcttcactggccttaagccagagcaggtggagcggttgatcaaagaattcagtatttatatgactaaagacggaagaatttccgttgccggcgtaacatcatctaacgtcggctacctggcacacgccatccaccaggtaaccaagtag

SEQ ID NO: 104385 - DNA, 1164 bp, Artificial Sequence
  derived and/or modified sequence
atggccttactccattcgggcagagtgcttccaggaattgctgctgcttttcatcctgggctggctgccgcagctagcgcacgggcatcctcttggtggactcatgtggaaatgggacctccagatcctattttaggggtaactgaagctttcaaacgggacaccaacagcaagaagatgaacttgggcgtgggagcctaccgcgacgacaatgggaagccctacgtgttacccagcgtccggaagttcgtgacagtgcagacaatatctgggaccggagccctcagaattggagccagcttccttcaaaggtttttcaagtttagcagggacgtgtttctgcctaagccaacctggggaaaccataccccaatttttagagatgccggtatgcagctgcagggctaccgttactacgacccaaagacatgcggattcgacttcacaggcgcagttgaagacatctcaaagatccctgagcaatcagtgctgctgcttcacgcgtgcgcacataaccccactggagtcgatccaaggcctgagcagtggaaagaaatcgccacagtggtgaagaagagaaatctgtttgccttttttgacatggcatatcagggcttcgcctccggcgacggagataaagacgcgtgggccgtgcgacactttattgagcaagggatcaatgtatgcctttgccaatcgtacgctaaaaacatggggttatacggcgagagagtgggggcttttacaatggtctgcaaggacgcagacgaagcaaagcgcgttgagtcgcagcttaaaatattaatcagacctatgtactccaaccctcctctgaacggtgccaggatagctgctgctatcctgaatacaccagatctgagaaagcagtggttgcaagaggtgaaagtcatggccgacagaattatcggcatgcgaacccaattggtgtcaaaccttaagaaggaaggctccacgcataattggcaacatattacagatcagattgggatgttctgctttacagggctcaagccagagcaggtggaaaggctgatcaaagaatttagtatctacatgacaaaagacggtagaatctctgttgctggcgtcacttcatctaacgtgggctacctggctcacgccattcatcaggtaactaaatag

SEQ ID NO: 104386 - DNA, 1164 bp, Artificial Sequence
  derived and/or modified sequence
atggccctgctgcacagcggcagagtgctgcccggcatcgccgccgccttccaccccggcctggccgccgccgccagcgccagagccagcagctggtggacccacgtggagatgggcccccccgaccccatcctgggcgtgaccgaggccttcaagagagacaccaacagcaagaagatgaacctgggcgtgggcgcctacagagacgacaacggcaagccctacgtgctgcccagcgtgagaaagttcgtgaccgtgcagaccatcagcggcaccggcgccctgagaatcggcgccagcttcctgcagagattcttcaagttcagcagagacgtgttcctgcccaagcccacctggggcaaccacacccccatcttcagagacgccggcatgcagctgcagggctacagatactacgaccccaagacctgcggcttcgacttcaccggcgccgtggaggacatcagcaagatccccgagcagagcgtgctgctgctgcacgcctgcgcccacaaccccaccggcgtggaccccagacccgagcagtggaaggagatcgccaccgtggtgaagaagagaaacctgttcgccttcttcgacatggcctaccagggcttcgccagcggcgacggcgacaaggacgcctgggccgtgagacacttcatcgagcagggcatcaacgtgtgcctgtgccagagctacgccaagaacatgggcctgtacggcgagagagtgggcgccttcaccatggtgtgcaaggacgccgacgaggccaagagagtggagagccagctgaagatcctgatcagacccatgtacagcaacccccccctgaacggcgccagaatcgccgccgccatcctgaacacccccgacctgagaaagcagtggctgcaggaggtgaaggtgatggccgacagaatcatcggcatgagaacccagctggtgagcaacctgaagaaggagggcagcacccacaactggcagcacatcaccgaccagatcggcatgttctgcttcaccggcctgaagcccgagcaggtggagagactgatcaaggagttcagcatctacatgaccaaggacggcagaatcagcgtggccggcgtgaccagcagcaacgtgggctacctggcccacgccatccaccaggtgaccaagtag

SEQ ID NO: 104387 - DNA, 180 bp, Artificial Sequence
  derived and/or modified sequence
atgcagaccggcggctgcgagcccaagcaccggcggatgtgccccgacgatagctctgagaatattatgaagtggcgaaccttcctacccgaggagagaaccgtcacacaggctggcgacgtcacccatactttgggttcaaaaggccctaaagccggggtgccatttacgggcccatag

SEQ ID NO: 104388 - DNA, 1230 bp, Artificial Sequence
  derived and/or modified sequence
atgctatttaatagtgtactgagacagccgcagctgggcgtgttacgcaacggctggtcatcacaatacccactccagtctctgcttactgggtatcagtgttccggcaatgacgaacacacctcatacggagagacaggcgttccggtgcccccctttgggtgtacatttagctcagatgacaacaccctgaagatctggcggctcaatcgcggtctggaggagaagccaggaggcgataagttgagcaccgttggttgggcgagtcagaaaaagaaagaatccagaccgggccttgtcacggtgacttcttctcagtctaccccagcaaaggccccacgcgcgaaatgcaacccgagcaatagctccccctcatccgccgcttgtgcccctagttgtgccggtgatctcccgcttccctctaatactccgacctttagtattaaaacgtcaccggccaaggcccgttctcctattaaccgccgagggtccgtcagcagtgtgtcacctaaaccaccctcctcgttcaaaatgtcgatcagaaactgggtgacacgcaccccttcctcctctccacccattaccccccctgctagcgagaccaagataatgtcacccaggaaggccttaatccctgtttcacagaagagttcccaagccgaggcttgtagtgaatccaggaacagggtgaagcgccgactggatagtagctgcctggagagtgtgaagcagaagtgtgtgaaatcatgtaactgcgtgacagagcttgacggtcaggtagagaatctgcacctggacctctgttgtctcgccggcaatcaagaggaccttagtaaggactcgctgggcccaacaaagtcatcaaagatagaaggcgcaggaacctcaatttccgagcctcctagccccatttcgccttacgcctccgaatcttgcggtaccttgccgctccctctccggccgtgcggggaaggatctgagatggtgggcaaggagaacagtagtcccgaaaacaagaactggcttctggccatggccgccaaaagaaaagctgagaaccccagtccccgctccccttcttcgcagacaccgaactctcgacgccagtccggcaagaagcttccaagccctgtgaccattactccaagctccatgagaaaaatctgcacatacttccaccgcaaaagccaggaagacttttgcggccccgagcattccacagagctgtag

SEQ ID NO: 104389 - DNA, 1230 bp, Artificial Sequence
  derived and/or modified sequence
atgctgttcaacagcgtgctgcggcagccccagctgggcgtgctgagaaatggctggagcagccagtaccccctgcagagcctgctgaccggctaccagtgcagcggaaatgatgagcacaccagctatggagagaccggggtgcctgtgcccccatttggctgcaccttcagcagtgatgacaacaccctgaagatctggaggctgaacagaggcctggaggagaagccaggaggagacaagctgagcacagtgggctgggccagccagaagaagaaggagagcaggcctggcctggtgacagtgaccagcagccagagcaccccagccaaggccccccgggccaagtgcaaccccagcaacagcagccccagcagcgctgcctgtgcccccagctgtgccggggacctgcccctgcccagcaacacccccaccttcagcatcaagaccagccctgccaaggcccggagccccatcaacagaagaggctctgtgtcctctgtgagccccaagccacccagcagcttcaagatgagcatccggaactgggtgaccaggacccccagcagcagcccccccatcaccccaccagccagcgagaccaagatcatgagccccaggaaggccctgatccctgtgtcccagaagagcagccaggccgaggcctgcagcgagagcaggaacagagtgaagaggcggctggacagcagctgcctggagagcgtgaagcagaagtgtgtgaagagctgcaactgtgtgacagagctggatggccaggtggagaacctgcacctggacctgtgctgcctggccggcaaccaggaggacctgagcaaggacagcctgggccccaccaagagcagcaagattgagggcgccggcaccagcatcagcgagccccccagccccatcagcccctatgccagcgagagctgtggcaccctgcccctgcccctgcggccctgtggggagggcagcgagatggtgggcaaggagaacagcagccctgagaacaagaactggctgctggccatggccgccaagaggaaggccgagaaccccagccccaggagccccagcagccagacccccaacagccggcggcagagcggcaagaagctgcccagccctgtgaccatcacccccagctccatgaggaagatctgcacctacttccacaggaagagccaggaggacttctgtggccctgagcacagcacagagctgtag

SEQ ID NO: 104390 - DNA, 1230 bp, Artificial Sequence
  derived and/or modified sequence
atgctgttcaacagcgtgctgcggcagccccagctgggcgtgctgaggaatggctggtcttcccagtatccactgcagtcattactgaccggctaccaatgcagtggtaacgacgaacatactagttacggggaaaccggcgtgcccgttccaccattcgggtgtacatttagttccgatgacaatacgcttaaaatctggcgcctgaatcgcggcctggaggagaagccaggaggcgacaagctgtccactgtgggctgggcgtcacagaaaaagaaggagagccggccaggattagtcactgtgacctcaagtcagagtaccccggcgaaggctccccgcgccaagtgtaaccctagtaattccagtccctcttctgccgcttgcgcaccctcctgcgctggagacctcccactgccctctaatacacctacttttagcatcaaaacgtccccagccaaggctagaagtcccattaatcgccggggttccgtcagcagcgtgtcaccaaagcccccatccagtttcaagatgtccatcaggaactgggtgaccaggaccccctcctcatcacctcctataactccacccgcctccgaaaccaagataatgtcccctagaaaagcactgatacctgttagtcaaaagtcaagtcaggccgaagcatgttcagagtctagaaatcgtgttaagcgtaggcttgattcatcttgcctggagtccgttaaacaaaagtgcgttaagtcatgcaattgcgttacagaactggacggccaggtagaaaacctacatttagatttgtgttgcctggcggggaaccaggaagacctgtctaaggattcactgggccctaccaagagctctaagatagagggcgccggcacatcgatcagcgaacctccctcacctattagtccgtacgcgagcgaaagctgtggaacattgcccctccctctacggccctgtggcgaagggtctgaaatggtcggcaaggagaacagcagcccagagaacaagaactggctcttagccatggcagccaaaaggaaagctgagaatccttcaccaagaagccctagcagtcaaactccgaactcaaggcgccagagcggaaagaaactcccttcccccgtgaccattacacccagctctatgcgtaaaatttgtacatacttccacagaaaaagccaagaagatttttgcggaccagaacattctaccgaactttag

SEQ ID NO: 104391 - DNA, 1230 bp, Artificial Sequence
  derived and/or modified sequence
atgttgttcaactccgtcctaagacagcctcagctgggcgtcttgcgcaacggatggtcctcccagtaccccctgcagtctctgctgaccggctatcaatgcagcggtaacgatgagcacacttcatacggagagactggtgtgccggttcccccattcgggtgcacgttctcatccgatgataacaccctcaagatctggaggctgaataggggcctggaggagaagccgggaggtgataagctgagcacagtcggatgggcatctcagaaaaaaaaggagtcccgtcccggattggtcaccgtgactagctcacagagtacgcccgctaaagcccctcgcgctaagtgcaatccttccaactcttctccttcatctgccgcttgtgcaccatcatgcgctggcgatctccctttgccatctaacactccaactttctccataaagacaagcccagcgaaggctcggagtcctatcaacaggcgagggtcagtgtctagcgtcagcccaaaaccaccatcctcgttcaagatgtcaatccgtaactgggtgacgaggacacctagctcaagtcccccaataactccaccggcttcagaaaccaagattatgtcgcccaggaaggccctgatccccgtctcacaaaaatcctcccaggccgaggcctgctccgagagcagaaacagggtgaaacggaggctggactcatcctgtcttgaatccgtcaagcagaagtgtgttaaaagttgcaattgtgtgactgagctggacggccaggttgaaaatcttcacttggacctgtgctgccttgctggcaatcaggaggatttgtccaaggactctttgggacctaccaaatcaagcaaaatcgagggcgcagggaccagcatttctgagcccccttctccaatctcaccctatgctagcgagagctgtggaactctccctctgccactgcggccatgtggggaagggagtgaaatggttgggaaggaaaacagtagcccagaaaataaaaactggctgctagccatggcagccaagcggaaggccgagaacccaagtcctcgatccccctcctcacagacccccaatagccgcagacagtccggaaaaaagctcccgtcacctgtgacaattaccccttccagtatgcggaagatatgcacatactttcacaggaaatctcaggaagacttttgcggtccagagcactcgactgaactgtag

SEQ ID NO: 104392 - DNA, 1230 bp, Artificial Sequence
  derived and/or modified sequence
atgctgttcaacagcgtgctgagacagccccagctgggcgtgctgagaaacggctggagcagccagtaccccctgcagagcctgctgaccggctaccagtgcagcggcaacgacgagcacaccagctacggcgagaccggcgtgcccgtgccccccttcggctgcaccttcagcagcgacgacaacaccctgaagatctggagactgaacagaggcctggaggagaagcccggcggcgacaagctgagcaccgtgggctgggccagccagaagaagaaggagagcagacccggcctggtgaccgtgaccagcagccagagcacccccgccaaggcccccagagccaagtgcaaccccagcaacagcagccccagcagcgccgcctgcgcccccagctgcgccggcgacctgcccctgcccagcaacacccccaccttcagcatcaagaccagccccgccaaggccagaagccccatcaacagaagaggcagcgtgagcagcgtgagccccaagccccccagcagcttcaagatgagcatcagaaactgggtgaccagaacccccagcagcagcccccccatcaccccccccgccagcgagaccaagatcatgagccccagaaaggccctgatccccgtgagccagaagagcagccaggccgaggcctgcagcgagagcagaaacagagtgaagagaagactggacagcagctgcctggagagcgtgaagcagaagtgcgtgaagagctgcaactgcgtgaccgagctggacggccaggtggagaacctgcacctggacctgtgctgcctggccggcaaccaggaggacctgagcaaggacagcctgggccccaccaagagcagcaagatcgagggcgccggcaccagcatcagcgagccccccagccccatcagcccctacgccagcgagagctgcggcaccctgcccctgcccctgagaccctgcggcgagggcagcgagatggtgggcaaggagaacagcagccccgagaacaagaactggctgctggccatggccgccaagagaaaggccgagaaccccagccccagaagccccagcagccagacccccaacagcagaagacagagcggcaagaagctgcccagccccgtgaccatcacccccagcagcatgagaaagatctgcacctacttccacagaaagagccaggaggacttctgcggccccgagcacagcaccgagctgtag

SEQ ID NO: 104393 - DNA, 1637 bp, Artificial Sequence
  derived and/or modified sequence
aacgatttgtgttgtgagaggcgcaagctgcgatttctgctgaacttggaggcatttctacgacttttctctcagctgaggcttttcctccgaccctgatgctcttcaattcggtgctccgccagccccagcttggcgtcctgagaaatggatggtcttcacaataccctcttcaatcccttctgactggttatcagtgcagtggtaatgatgaacacacttcttatggagaaacaggagtcccagttcctccttttggatgtaccttctcttctgatgacaatacactaaaaatctggcgcttgaatagaggcttagaggagaaaccaggaggtgataaactttccacggtgggttgggcctctcagaagaaaaaagagtcaagacctggcctagtaacagtaacgagtagccagagtactcctgccaaagcccccagggcaaagtgcaatccatccaattcttccccgtcatccgcagcttgtgccccaagctgtgctggagacctccctcttccttcaaatactcctacgttctctattaaaacctctcctgccaaggcccggtctcccatcaacagaagaggctctgtctcctccgtctctcccaagccaccttcatctttcaagatgtcgattagaaactgggtgacccgaacaccttcctcatcaccacccatcactccacctgcttcggagaccaagatcatgtctccgagaaaagcccttattcctgtgagccagaagtcatcccaagcagaggcttgctctgagtctagaaatagagtaaagaggaggctagactcaagctgtctggagagtgtgaaacaaaagtgtgtgaagagttgtaactgtgtgactgagcttgatggccaagttgaaaatcttcatttggatctgtgctgccttgctggtaaccaggaagaccttagtaaggactctctaggtcctaccaaatcaagcaaaattgaaggagctggtaccagtatctcagagcctccgtctcctatcagtccgtatgcttcagaaagctgtggaacgctacctcttcctttgagaccttgtggagaagggtctgaaatggtaggcaaagagaatagttccccagagaataaaaactggttgttggccatggcagccaaacggaaggctgagaatccatctccacgaagtccgtcatcccagacacccaattccaggagacagagcggaaagaaattgccaagcccggtcaccatcacgcccagctccatgaggaaaatctgcacatacttccatagaaagtcccaggaggacttctgtggtcctgaacactcaacagaattatagattctaatctgagtgagttactgagctttggtccactaaaacaagctgagctttggtccactaaaacaagatgaaaaatacaagagtgactctataactctggtctttaagaaagctgccttttcatttttagacaaaatcttttcaacgctgaaatgtacctaatctggttctactaccataatgtatatgcagcttcccgaggatgaatgctgtgtttaaatttcataaagtaaatttgtcactctagcattttgaatgaatagtcttcactttttaaattattcatcttctctataataatgacat

SEQ ID NO: 104394 - protein, 688 aa, Artificial Sequence
  derived and/or modified sequence
MLFNSVLRQPQLGVLRNAPNMEHVLAVANEEGFVRLYNTESQSFRKKCFKEWMAHWNAVFDLAWVPGELKLVTAAGDQTAKFWDVKAGELIGTCKGHQCSLKSVAFSKFEKAVFCTGGRDGNIMVWDTRCNKKDGFYRQVNQISGAHNTSDKQTPSKPKKKQNSKGLAPSVDFQQSVTVVLFQDENTLVSAGAVDGIIKVWDLRKNYTAYRQEPIASKSFLYPGSSTRKLGYSSLILDSTGSTLFANCTDDNIYMFNMTGLKTSPVAIFNGHQNSTFYVKSSLSPDDQFLVSGSSDEAAYIWKVSTPWQPPTVLLGHSQEVTSVCWCPSDFTKIATCSDDNTLKIWRLNRGLEEKPGGDKLSTVGWASQKKKESRPGLVTVTSSQSTPAKAPRAKCNPSNSSPSSAACAPSCAGDLPLPSNTPTFSIKTSPAKARSPINRRGSVSSVSPKPPSSFKMSIRNWVTRTPSSSPPITPPASETKIMSPRKALIPVSQKSSQAEACSESRNRVKRRLDSSCLESVKQKCVKSCNCVTELDGQVENLHLDLCCLAGNQEDLSKDSLGPTKSSKIEGAGTSISEPPSPISPYASESCGTLPLPLRPCGEGSEMVGKENSSPENKNWLLAMAAKRKAENPSPRSPSSQTPNSRRQSGKKLPSPVTITPSSMRKICTYFHRKSQEDFCGPEHSTEL

SEQ ID NO: 104395 - DNA, 2067 bp, Artificial Sequence
  derived and/or modified sequence
atgctcttcaattccgtgctcagacagcctcagctcggagtcttgcggaatgctcccaacatggaacatgtgcttgccgtggcaaatgaagagggattcgtgaggttatataatacagaatcacagtccttcagaaagaagtgttttaaagaatggatggcccactggaacgctgtatttgacctggcatgggttcctggtgaattaaagctggtcaccgcagctggcgatcagaccgcaaagttctgggacgtgaaggcaggagaactcattgggacgtgcaaggggcaccagtgcagcctgaaaagcgtggctttcagcaaattcgaaaaagctgttttttgcaccggcggccgcgatgggaacatcatggtgtgggataccagatgcaacaagaaggatggattctaccggcaggtgaatcagatttcgggtgcacataatacctccgataaacaaaccccgtctaaacctaaaaagaagcagaattctaagggccttgcccccagtgtcgattttcagcaaagcgtgacggtcgtactcttccaggacgagaatacgctggtgtctgcgggcgctgtagacgggataatcaaggtctgggacctacgcaagaactacacagcgtatcggcaggaacctatcgcttccaagagctttctctatccaggaagctcgacccgaaaactggggtattcttccctgatactggactcgactggctccaccctcttcgccaactgcacagacgataatatctatatgttcaatatgacaggtctgaaaacctctcccgtcgccatctttaatggccaccagaacagtaccttttacgtaaagagcagcctcagccctgacgaccagtttctggtgtcgggaagtagcgacgaggctgcctacatttggaaagtaagtaccccatggcaaccccctacggtcctgttggggcactcccaggaggtaacttcggtttgttggtgtcccagtgactttacgaagatcgccacttgtagtgatgacaacactcttaaaatttggcgcctgaatcgcggacttgaagagaaacctggcggtgacaagctctccacggtcggctgggcatcacaaaaaaaaaaggaatcccgtccagggctggttactgtgacatcttctcagagtacccccgccaaggcccctcgagctaaatgtaacccatcgaacagcagcccttcatctgccgcatgcgccccctcttgtgccggcgacctcccacttccatctaatactcccactttctccataaagacttctcccgctaaagctcggtcccctatcaacaggcgcggatcagtcagcagcgtgtctcccaaaccaccttcaagctttaaaatgagcatccgtaactgggtgactaggaccccttcatcgagcccccccatcaccccccctgcctccgagacgaagataatgagtcctagaaaggccttaatccccgttagtcaaaagtctagccaggccgaggcttgctctgaatctcgaaatagagtgaaacgccgtcttgactccagctgtcttgaaagcgtcaagcaaaagtgtgttaagtcatgcaactgtgtcactgagcttgacggtcaagttgaaaacctgcatctggacctctgctgcctggctgggaaccaagaagacctgtcaaaggactcactgggcccgactaagtcatctaagattgagggcgccggtacatcaatctccgagccaccatcgccaattagcccatacgccagtgaatcctgcggcactctgcccctgccactgagaccttgtggggagggaagcgagatggtgggtaaggaaaactcatccccagagaacaagaattggctgctggctatggctgcaaagcgtaaagccgagaatccttctcccagaagcccatcgtcacagacgccaaactcacggcgacagtctggaaaaaagctgccatcaccagtgacaattactccctcaagcatgaggaaaatctgtacatattttcataggaagagtcaagaggatttttgtggacctgagcactcgaccgagctctag

SEQ ID NO: 104396 - DNA, 2067 bp, Artificial Sequence
  derived and/or modified sequence
atgctgttcaacagcgtgctgcggcagccccagctgggcgtgctgagaaatgcccccaacatggagcacgtgctggccgtggccaatgaggagggctttgtgcggctgtacaacacagagagccagagcttcaggaagaagtgcttcaaggagtggatggcccactggaatgctgtgtttgacctggcctgggtgcctggagagctgaagctggtgacagctgctggggaccagacagccaagttctgggatgtgaaggccggggagctgattggcacctgcaagggccaccagtgcagcctgaagtctgtggccttcagcaagtttgagaaggctgtgttctgcaccggcggcagagatggcaacatcatggtgtgggacacccgctgcaacaagaaggatggcttctaccggcaggtgaaccagatcagcggggcccacaacaccagtgacaagcagacccccagcaagcccaagaagaagcagaacagcaagggcctggcccccagcgtggacttccagcagagcgtgacagtggtgctcttccaggatgagaacaccctggtgtctgctggagctgtggatggcatcatcaaggtgtgggacctgaggaagaactacacagcctaccggcaggagcccatcgccagcaagagcttcctgtacccaggcagcagcaccaggaagctgggctacagcagcctcatcctggacagcacaggcagcaccctgtttgccaactgcacagatgacaacatctacatgttcaacatgacaggcctgaagaccagccctgtggccatcttcaacggccaccagaacagcaccttctacgtgaagagcagcctgagcccagatgaccagttcctggtgtctggcagcagtgatgaggccgcctacatctggaaggtgtccaccccctggcagccccccaccgtgctgctgggccacagccaggaggtgacctctgtgtgctggtgccccagcgacttcaccaagatcgccacctgcagtgatgacaacaccctgaagatctggaggctgaacagaggcctggaggagaagccaggaggagacaagctgagcacagtgggctgggccagccagaagaagaaggagagccggcccggcctggtgacagtgaccagcagccagagcaccccagccaaggccccccgggccaagtgcaaccccagcaacagcagccccagcagcgctgcctgtgcccccagctgtgccggggacctgcccctgcccagcaacacccccaccttcagcatcaagaccagccctgccaaggcccggagccccatcaacagaagaggctctgtgtcctctgtgagccccaagccacccagcagcttcaagatgagcatccggaactgggtgaccaggacccccagcagcagcccccccatcaccccaccagccagcgagaccaagatcatgagccccaggaaggccctgatccctgtgtcccagaagagcagccaggccgaggcctgcagcgagagcaggaacagagtgaagaggcggctggacagcagctgcctggagagcgtgaagcagaagtgtgtgaagagctgcaactgtgtgacagagctggatggccaggtggagaacctgcacctggacctgtgctgcctggccggcaaccaggaggacctgagcaaggacagcctgggccccaccaagagcagcaagattgaaggagctggcaccagcatcagcgagccccccagccccatcagcccctatgccagcgagagctgtggcaccctgcccctgcccctgcggccctgtggggagggcagcgagatggtgggcaaggagaacagcagccctgagaacaagaactggctgctggccatggccgccaagaggaaggccgagaaccccagccccaggagccccagcagccagacccccaacagccggcggcagagcggcaagaagctgcccagccctgtgaccatcacccccagctccatgaggaagatctgcacctacttccacaggaagagccaggaggacttctgtggccctgagcacagcacagagctgtag

SEQ ID NO: 104397 - DNA, 2067 bp, Artificial Sequence
  derived and/or modified sequence
atgctgttcaacagcgtgctgcggcagccccagctgggcgtgctgcgtaacgcccccaatatggaacatgtgctggccgttgcaaatgaggaaggttttgtgcgtctgtacaacacggagtctcagagctttcgtaagaagtgcttcaaggagtggatggcgcactggaatgcagtgtttgacctagcctgggttccgggggaactgaaactggtcaccgcagccggcgaccaaaccgccaagttttgggatgttaaggccggggaattgatcggcacatgcaagggccatcagtgtagccttaagagtgtcgcattttcaaaattcgaaaaagctgtcttttgtaccggcggacgagacggaaacatcatggtgtgggatactagatgcaataaaaaggatgggttttacagacaggttaaccaaatcagtggagcccacaatacttctgacaagcaaacccccagcaaacccaaaaagaaacagaacagtaaagggctggcaccctctgtcgactttcagcagtcggtgaccgtggtgttgtttcaggacgagaacacactggtgtcggctggggcagtagatggcataatcaaggtttgggatctgaggaagaattatacagcttataggcaagaacccattgccagcaagtcctttctgtaccctgggagcagtactcgaaagctgggatacagctccctcatcttagattcaacaggcagtacactgtttgccaactgcaccgatgataatatttatatgttcaacatgaccggcctcaagacatcccctgttgccatctttaacggccaccaaaatagtactttctatgtaaaaagcagcctgagccccgacgaccaatttttggtgagtggaagctccgacgaggctgcatacatctggaaggtctctacaccatggcagccacctactgttctgctgggtcacagccaagaggtaacctccgtttgctggtgtccaagtgattttactaagatagcgacttgttccgacgacaacaccttgaagatctggcggctgaaccgcggacttgaggagaaacccggcggtgacaagctttcgacggtggggtgggcctctcaaaagaaaaaggaaagccgccccggattagtcacagtgacctcatcccagagtacgccagccaaggctccaagggccaagtgtaaccccagcaactcctcaccatcctctgcagcctgcgcgccctcttgtgccggcgaccttcccttgcctagcaatacaccaacattcagtattaaaacgtcaccagccaaggcacgatccccaatcaaccggcgcggctccgtatcatcagtgtctcctaaacccccctcctcctttaaaatgtccatcaggaactgggtgactcgtaccccctcttcctcccctcccattacgcctcccgcaagcgagaccaaaatcatgtcccctcggaaagctcttatacccgtgtctcagaagtcctctcaggcggaggcctgctctgagagccgtaacagagtaaagagacgcctagatagttcttgtctcgaaagcgtgaagcagaaatgcgtgaaaagctgtaattgtgtgacagagctcgacggccaagtcgagaatctccacttagatttgtgctgtctggctgggaaccaggaagacctgagcaaggattcccttggtcctaccaagagttccaagatcgagggcgcaggaacttccatcagcgaaccaccatctcctatctctccatatgcatccgagtcttgtgggactcttcccctgccactgagaccgtgcggcgaaggatcggagatggtcgggaaggaaaactcctcccccgagaataagaactggctgctcgccatggccgccaaaaggaaagccgaaaatccaagccccagatcaccctcatcacagactcccaactcaaggcgccagtctggaaaaaagctgccgtctcctgtgacgattacaccgtcctcgatgagaaaaatctgtacgtattttcatagaaagtctcaagaagacttctgcggcccagaacattcgacagaactttag

SEQ ID NO: 104398 - DNA, 2067 bp, Artificial Sequence
  derived and/or modified sequence
atgctgttcaattcggtgctgagacagcctcagctcggggtgctcagaaatgctcctaacatggagcacgtgctggccgtggccaacgaagaggggtttgtgcggttgtacaacaccgagagtcaaagcttcaggaagaaatgcttcaaggagtggatggcgcattggaatgctgttttcgaccttgcatgggtgcctggtgaactaaaactcgtgaccgctgcaggtgaccagactgctaagttttgggacgtgaaggctggagaactgatcgggacttgcaaaggccatcagtgcagcttaaaaagcgttgcctttagtaaattcgagaaagcagttttctgcaccggcggacgcgacggtaacattatggtgtgggacacaaggtgcaacaaaaaagatggattttataggcaagttaaccaaatcagcggagctcacaacacttccgataagcagacgccaagcaagcctaaaaaaaaacagaactccaagggacttgccccaagcgtcgacttccagcagtccgtaacggtggtgctctttcaggacgagaatacactcgtatctgctggtgctgtggacggcataataaaggtttgggacctgcgaaaaaactacacagcctacagacaggaaccaattgcttccaaatctttcctctatcccggaagtagcacaagaaagctgggctactcatcccttattctggactcgacaggcagcactctgttcgctaactgtacagatgataacatctacatgttcaatatgacagggctcaagacatcgcctgtcgctatcttcaacgggcatcagaattccacattttatgtgaagtcttctctgagtcctgatgaccaattcctagtcagcggatcttctgacgaggcagcctatatctggaaggtgagtactccttggcagcctcccaccgtccttctcggccatagccaggaggtgacatccgtctgctggtgcccatccgactttactaaaatcgccacttgttctgatgacaataccctaaagatatggagactgaacaggggcctggaagagaagccaggcggagataaactctcaactgtgggatgggccagtcagaagaagaaggaatcacgacctggactggtgacagtgacctcttcccaatctaccccagcaaaggcacctcgggctaagtgtaacccctcaaactcatccccttcctcagctgcgtgtgcacccagttgcgccggtgatctgccactgcctagcaacacacccaccttctcaatcaaaacctcacccgcaaaagcccgtagcccaataaaccgcagggggtctgtatccagtgttagtccaaaaccaccatcctcctttaagatgtctatccggaattgggttacccgtaccccgtccagcagcccccctattactccacctgcgagtgagaccaaaattatgagccctcggaaagccctcatccccgtgagtcagaaatctagccaggccgaagcatgctctgaatcgcggaaccgggtgaagcgacgcttagactccagctgcttagagagcgttaaacagaaatgcgtcaaaagctgtaattgcgtcaccgagctggacggccaagtggaaaatctgcatttagacctctgttgtctcgccggaaaccaagaggacttatcaaaagactctctgggcccaactaaatccagtaaaatcgagggagcgggaacatccatatcggaacccccatcaccaatctcgccatacgctagtgagtcttgcggcactcttccacttccactgcggccatgtggggaagggagtgagatggtcggaaaggaaaattcatccccagagaacaaaaactggctcttagccatggctgccaaaaggaaagccgagaaccccagtcccaggagcccctcaagccagacacctaacagccgcaggcaatctggcaaaaagctccctagccccgtcaccattactcccagctccatgagaaagatttgtacttacttccaccgaaaaagccaagaagacttttgtggcccagaacatagcactgaactttag

SEQ ID NO: 104399 - DNA, 2067 bp, Artificial Sequence
  derived and/or modified sequence
atgctgttcaacagcgtgctgagacagccccagctgggcgtgctgagaaacgcccccaacatggagcacgtgctggccgtggccaacgaggagggcttcgtgagactgtacaacaccgagagccagagcttcagaaagaagtgcttcaaggagtggatggcccactggaacgccgtgttcgacctggcctgggtgcccggcgagctgaagctggtgaccgccgccggcgaccagaccgccaagttctgggacgtgaaggccggcgagctgatcggcacctgcaagggccaccagtgcagcctgaagagcgtggccttcagcaagttcgagaaggccgtgttctgcaccggcggcagagacggcaacatcatggtgtgggacaccagatgcaacaagaaggacggcttctacagacaggtgaaccagatcagcggcgcccacaacaccagcgacaagcagacccccagcaagcccaagaagaagcagaacagcaagggcctggcccccagcgtggacttccagcagagcgtgaccgtggtgctgttccaggacgagaacaccctggtgagcgccggcgccgtggacggcatcatcaaggtgtgggacctgagaaagaactacaccgcctacagacaggagcccatcgccagcaagagcttcctgtaccccggcagcagcaccagaaagctgggctacagcagcctgatcctggacagcaccggcagcaccctgttcgccaactgcaccgacgacaacatctacatgttcaacatgaccggcctgaagaccagccccgtggccatcttcaacggccaccagaacagcaccttctacgtgaagagcagcctgagccccgacgaccagttcctggtgagcggcagcagcgacgaggccgcctacatctggaaggtgagcaccccctggcagccccccaccgtgctgctgggccacagccaggaggtgaccagcgtgtgctggtgccccagcgacttcaccaagatcgccacctgcagcgacgacaacaccctgaagatctggagactgaacagaggcctggaggagaagcccggcggcgacaagctgagcaccgtgggctgggccagccagaagaagaaggagagcagacccggcctggtgaccgtgaccagcagccagagcacccccgccaaggcccccagagccaagtgcaaccccagcaacagcagccccagcagcgccgcctgcgcccccagctgcgccggcgacctgcccctgcccagcaacacccccaccttcagcatcaagaccagccccgccaaggccagaagccccatcaacagaagaggcagcgtgagcagcgtgagccccaagccccccagcagcttcaagatgagcatcagaaactgggtgaccagaacccccagcagcagcccccccatcaccccccccgccagcgagaccaagatcatgagccccagaaaggccctgatccccgtgagccagaagagcagccaggccgaggcctgcagcgagagcagaaacagagtgaagagaagactggacagcagctgcctggagagcgtgaagcagaagtgcgtgaagagctgcaactgcgtgaccgagctggacggccaggtggagaacctgcacctggacctgtgctgcctggccggcaaccaggaggacctgagcaaggacagcctgggccccaccaagagcagcaagatcgagggcgccggcaccagcatcagcgagccccccagccccatcagcccctacgccagcgagagctgcggcaccctgcccctgcccctgagaccctgcggcgagggcagcgagatggtgggcaaggagaacagcagccccgagaacaagaactggctgctggccatggccgccaagagaaaggccgagaaccccagccccagaagccccagcagccagacccccaacagcagaagacagagcggcaagaagctgcccagccccgtgaccatcacccccagcagcatgagaaagatctgcacctacttccacagaaagagccaggaggacttctgcggccccgagcacagcaccgagctgtag

SEQ ID NO: 104400 - DNA, 2530 bp, Artificial Sequence
  derived and/or modified sequence
agtttggcggccggggcttacagtggcgggagttggaggcgataacgatttgtgttgtgagaggcgcaagctgcgatttctgctgaacttggaggcatttctacgacttttctctcagctgaggcttttcctccgaccctgatgctcttcaattcggtgctccgccagccccagcttggcgtcctgagaaatgctcccaatatggaacatgtactagcagttgccaatgaagaaggctttgttcgattgtataacacagaatcacaaagtttcagaaagaagtgcttcaaagaatggatggctcactggaatgccgtctttgacctggcctgggttcctggtgaacttaaacttgttacagcagcaggtgatcaaacagccaaattttgggacgtaaaagctggtgagctgattggaacatgcaaaggtcatcaatgcagcctcaagtcagttgccttttctaagtttgagaaagctgtattctgtacgggtggaagagatggcaacattatggtctgggataccaggtgcaacaaaaaagatgggttttataggcaagtgaatcaaatcagtggagctcacaatacctcagacaagcaaaccccttcaaaacccaagaagaaacagaattcaaaaggacttgctccttctgtggatttccagcaaagtgttactgtggtcctctttcaagacgagaataccttagtctcagcaggagctgtggatgggataatcaaagtatgggatttacgtaagaattatactgcttatcgacaagaacccatagcatccaagtctttcctgtacccaggtagcagcactcgaaaacttggatattcaagtctgattttggattccactggctctactttatttgctaattgcacagacgataacatctacatgtttaatatgactgggttgaagacttctccagtggctattttcaatggacaccagaactctaccttttatgtaaaatccagccttagtccagatgaccagtttttagtcagtggctcaagtgatgaagctgcctacatatggaaggtctccacaccctggcaacctcctactgtgctcctgggtcattctcaagaggtcacgtctgtgtgctggtgtccatctgacttcacaaagattgctacctgttctgatgacaatacactaaaaatctggcgcttgaatagaggcttagaggagaaaccaggaggtgataaactttccacggtgggttgggcctctcagaagaaaaaagagtcaagacctggcctagtaacagtaacgagtagccagagtactcctgccaaagcccccagggcaaagtgcaatccatccaattcttccccgtcatccgcagcttgtgccccaagctgtgctggagacctccctcttccttcaaatactcctacgttctctattaaaacctctcctgccaaggcccggtctcccatcaacagaagaggctctgtctcctccgtctctcccaagccaccttcatctttcaagatgtcgattagaaactgggtgacccgaacaccttcctcatcaccacccatcactccacctgcttcggagaccaagatcatgtctccgagaaaagcccttattcctgtgagccagaagtcatcccaagcagaggcttgctctgagtctagaaatagagtaaagaggaggctagactcaagctgtctggagagtgtgaaacaaaagtgtgtgaagagttgtaactgtgtgactgagcttgatggccaagttgaaaatcttcatttggatctgtgctgccttgctggtaaccaggaagaccttagtaaggactctctaggtcctaccaaatcaagcaaaattgaaggagctggtaccagtatctcagagcctccgtctcctatcagtccgtatgcttcagaaagctgtggaacgctacctcttcctttgagaccttgtggagaagggtctgaaatggtaggcaaagagaatagttccccagagaataaaaactggttgttggccatggcagccaaacggaaggctgagaatccatctccacgaagtccgtcatcccagacacccaattccaggagacagagcggaaagaaattgccaagcccggtcaccatcacgcccagctccatgaggaaaatctgcacatacttccatagaaagtcccaggaggacttctgtggtcctgaacactcaacagaattatagattctaatctgagtgagttactgagctttggtccactaaaacaagctgagctttggtccactaaaacaagatgaaaaatacaagagtgactctataactctggtctttaagaaagctgccttttcatttttagacaaaatcttttcaacgctgaaatgtacctaatctggttctactaccataatgtatatgcagcttcccgaggatgaatgctgtgtttaaatttcataaagtaaatttgtcactctagcattttgaatgaatagtcttcactttttaaattattcatcttctctataataatgacatcccagttcatgga

SEQ ID NO: 104401 - protein, 497 aa, Artificial Sequence
  derived and/or modified sequence
MDNRQNVTPALIFAITVATIGSFQFGYNTGVINAPETIIKEFINKTLTDKANAPPSEVLLTNLWSLSVAIFSVGGMIGSFSVGLFVNRFGRRNSMLIVNLLAATGGCLMGLCKIAESVEMLILGRLVIGLFCGLCTGFVPMYIGEISPTALRGAFGTLNQLGIVIGILVAQIFGLELILGSEELWPVLLGFTILPAILQSAALPCCPESPRFLLINRKKEENATRILQRLWGTQDVSQDIQEMKDESARMSQEKQVTVLELFRVSSYRQPIIISIVLQLSQQLSGINAVFYYSTGIFKDAGVQQPIYATISAGVVNTIFTLLSLFLVERAGRRTLHMIGLGGMAFCSTLMTVSLLLKNHYNGMSFVCIGAILVFVACFEIGPGPIPWFIVAELFSQGPRPAAMAVAGCSNWTSNFLVGLLFPSAAYYLGAYVFIIFTGFLITFLAFTFFKVPETRGRTFEDITRAFEGQAHGADRSGKDGVMGMNSIEPAKETTTNV

SEQ ID NO: 104402 - protein, 141 aa, Artificial Sequence
  derived and/or modified sequence
MDNRQNVTPALIFAITVATIGSFQFGYNTGVINAPETIIKEFINKTLTDKANAPPSEVLLTNLWSLSVAIFSVGGMIGSFSVGLFVNRFGRRNSMLIVNLLAATGGCLMGLCKIAESVEMLILGRLVIGLFCGLCTGFVPM

SEQ ID NO: 104403 - protein, 47 aa, Artificial Sequence
  derived and/or modified sequence
MDNRQNVTPALIFAITVATIGSFQFGYNTGVINAPETIIKEFINKTL

SEQ ID NO: 104404 - protein, 22 aa, Artificial Sequence
  derived and/or modified sequence
MDNRQNVTPALIFAITVATIGS

SEQ ID NO: 104405 - protein, 152 aa, Artificial Sequence
  derived and/or modified sequence
MDNRQNVTPALIFAITVATIGSFQFGYNTGVINAPETIIKEFINKTLTDKANAPPSEVLLTNLWSLSVAIFSVGGMIGSFSVGLFVNRFGRRNSMLIVNLLAATGGCLMGLCKIAESVEMLILGRLVIGLFCGLCTGFVPMYIGEISPTALR

SEQ ID NO: 104406 - protein, 84 aa, Artificial Sequence
  derived and/or modified sequence
MDNRQNVTPALIFAITVATIGSFQFGYNTGVINAPETIIKEFINKTLTDKANAPPSEVLLTNLWSLSVAIFSVGGMIGSFSVGL

SEQ ID NO: 104407 - protein, 169 aa, Artificial Sequence
  derived and/or modified sequence
MDNRQNVTPALIFAITVATIGSFQFGYNTGVINAPETIIKEFINKTLTDKANAPPSEVLLTNLWSLSVAIFSVGGMIGSFSVGLFVNRFGRRNSMLIVNLLAATGGCLMGLCKIAESVEMLILGRLVIGLFCGLCTGFVPMYIGEISPTALRGAFGTLNQLGIVIGILV

SEQ ID NO: 104408 - DNA, 1494 bp, Artificial Sequence
  derived and/or modified sequence
atggacaaccgtcagaacgtcactcctgcactgatcttcgctataacagtggctaccattggctcttttcagttcggctacaacacaggagttatcaacgcccctgaaaccatcattaaggaattcatcaacaagacattaactgacaaggcgaatgccccaccctcagaggtcttacttacaaatctgtggtctctatccgtggccatcttctctgttgggggaatgatcggatctttcagcgtgggtctctttgtgaataggttcggccgcagaaactctatgctgatcgtgaatttgctcgcagccaccggcggctgcctgatgggtctgtgtaagattgccgagtctgtggagatgcttatactgggaaggctggttatagggttgttttgtggcctgtgcacagggttcgtccctatgtatattggagaaataagtcctacggccttgcgcggggccttcggaacgcttaaccagttgggcattgtcataggtatcctcgtggcacagatttttggactggaacttatattaggaagtgaagaactctggcccgtgctgctgggcttcactattctgcccgcaatcctccagagtgcagcactcccatgctgcccggagtcacctaggtttctcctgattaatagaaaaaaagaggagaacgccacccggattctgcagcgactgtggggaactcaagacgttagccaggacattcaggagatgaaagatgaaagcgcaagaatgtctcaagagaaacaggttaccgtgctggagctgtttcgtgtttccagttaccggcaaccgatcattatcagtattgtcctacagttgagtcaacagctatccggaatcaatgccgtgttctactactcgactggtattttcaaagatgccggtgtccaacagccgatttatgccactatttctgccggcgtggtcaatacgatcttcacactgctgtctttgttcctcgtggagcgagccggtagacgcacgctccacatgattggactaggcggcatggccttctgttcgaccctcatgactgtttccctcctgctgaaaaaccattacaacggcatgagtttcgtctgcatcggagccatcctggttttcgtagcttgcttcgaaatcggaccaggccccataccgtggttcattgtggccgagctctttagtcaaggtcccaggcccgctgcgatggcagtcgccggctgttccaactggacatccaacttcttggtgggactgctcttcccgtccgcggcatattacctgggcgcctatgtgttcattatcttcacaggtttcttaatcaccttcttggcctttacattttttaaggttcccgagactcggggcaggactttcgaggacattaccagagctttcgaaggacaggcacacggtgccgatcggagtggcaaggacggtgtgatgggcatgaacagcatcgagccagcgaaagagaccactaccaatgtctag

SEQ ID NO: 104409 - DNA, 1494 bp, Artificial Sequence
  derived and/or modified sequence
atggacaaccgccagaacgttaccccggcactgattttcgcaattaccgtggcgacgatcggatcattccagttcggctacaacactggcgtcatcaacgccccggaaaccattatcaaggagtttatcaataaaactctgaccgataaggcgaacgctccaccgtcagaagtgctcctgacgaacctgtggagcctgagtgtggcaattttctctgtcggcggtatgattggcagtttcagcgtgggactgtttgtgaaccgattcggccggcggaactccatgctgatcgttaatctcctggcagcaaccgggggatgtctcatgggactgtgtaaaatcgctgaatccgtggaaatgctgatccttgggcgcctggtcattggattgttctgcggcctgtgcactggcttcgtgccaatgtacattggggagatctctccgacagcgttgcgaggtgcctttggtactcttaatcagttaggcatcgtaattgggattctggtcgctcagatattcgggttggagttaattctgggcagcgaggagctgtggcccgtgttactaggattcactatcctgccagctattttgcagtcagcagccctgccttgttgcccagaatccccccggttccttctaataaaccggaaaaaagaggaaaatgctacacgaatcctacagcgactatggggcactcaggacgtcagccaagacattcaagaaatgaaagacgagagcgcgcggatgtcccaggagaagcaggtcacagtgctagaactcttcagggtctctagctaccggcagccaattattattagcatcgtgttgcaactgtcacagcagctgtctggaattaacgccgtgttttattattcaactgggatattcaaggatgctggcgttcagcaaccaatctacgccaccattagtgcaggagtggtgaacacaatctttaccctgctgagtttgtttcttgtagagagggccggccggaggacactccatatgataggactgggcggaatggcgttttgtagcactctgatgaccgtatccttgctcctcaaaaatcactacaatgggatgtcattcgtctgcataggcgcgatacttgtgttcgtggcatgtttcgaaatagggcccgggccaatcccttggtttattgtggccgagctgttctcacaggggcccaggcctgccgctatggccgtggctggatgttctaactggactagcaactttttagttggactgttgtttcccagcgccgcatattatctcggagcctacgtcttcatcatcttcacagggtttctaatcaccttcttggcctttacgttcttcaaagtgccagagacgcgtggccgtactttcgaagatattacccgtgctttcgaagggcaggctcatggcgccgatcgcagtggcaaggatggtgtaatgggcatgaattccattgagccagccaaggagacaaccacaaatgtgtag

SEQ ID NO: 104410 - DNA, 426 bp, Artificial Sequence
  derived and/or modified sequence
atggataatagacagaacgtcacccctgccctcatattcgccatcactgtcgcaaccattggatcttttcagttcggatataacactggagtgatcaatgcgcccgagacaattatcaaggagttcatcaacaagacccttacggacaaggccaatgcaccaccgtccgaagttttacttactaatctttggtctctctccgtggccatttttagcgtgggcggaatgatcggttcatttagcgtgggactattcgttaacaggtttggacggcggaactccatgttaattgttaatctgctggctgctacaggcggatgtctgatggggctgtgtaaaattgccgaatccgtcgagatgttgattcttggccggctcgtgattgggctcttctgtggcctgtgcactggctttgtgccaatgtag

SEQ ID NO: 104411 - DNA, 144 bp, Artificial Sequence
  derived and/or modified sequence
atggacaaccgtcaaaacgtgactcctgcgctcattttcgccatcacagtggccaccatcgggagttttcagtttggctacaacactggcgtgatcaacgcgcctgaaaccattattaaggagtttattaacaaaaccttatag

SEQ ID NO: 104412 - DNA, 69 bp, Artificial Sequence
  derived and/or modified sequence
atggataaccgccagaatgtgacacctgcgttgatctttgctatcacagtggcgaccatcggctcgtag

SEQ ID NO: 104413 - DNA, 459 bp, Artificial Sequence
  derived and/or modified sequence
atggacaacaggcaaaacgtcactcccgctctcatattcgcaatcacagttgccactatcggctccttccagtttgggtacaacacaggcgtcatcaacgccccggaaaccattataaaagagttcatcaacaagaccctgacagacaaagctaatgcaccacctagtgaggttctcctcactaatctgtggagcctgtctgtggccatcttcagcgttggcggaatgatcggcagcttcagtgttggcctattcgtgaacaggttcggaaggcgaaactccatgctgattgtaaacctactagcggctacaggcgggtgcctgatgggactctgcaagatagctgaaagtgtggagatgctaatactaggtcgcttggtaatcgggctgttttgcggtctgtgcacagggttcgtccctatgtatatcggcgagatctcccccaccgccctgcgatag

SEQ ID NO: 104414 - DNA, 255 bp, Artificial Sequence
  derived and/or modified sequence
atggacaatcgccagaatgtgactccggcgctgatcttcgccattacggtggcgacaatcggaagcttccagtttggttacaacaccggggttatcaatgcccccgaaaccataatcaaggagtttatcaataaaactttaaccgacaaggcaaacgccccccctagcgaagtgttgctaactaatctttggagcctcagcgtcgccatcttttcagtgggtggaatgatcggttccttcagcgtgggactgtag

SEQ ID NO: 104415 - DNA, 510 bp, Artificial Sequence
  derived and/or modified sequence
atggataatagacagaacgtgacaccagccttaatcttcgctattaccgtagcaacaatcggctcctttcaatttggatacaatacaggcgtgatcaacgcccccgagacaatcataaaggaattcattaataagactcttactgacaaggcaaatgcacctccttcagaagtcctgctgacaaatttatggagcctgtcagtggcgatcttttctgtcggcggaatgatcggctcattcagtgtgggtcttttcgtgaacagattcggcaggcgcaattctatgctgatcgtcaatctcttagctgcaactggcggctgtctaatggggctatgcaagatcgccgagagtgtcgagatgctcatactgggccggctagtgattggcctgttctgtggcctgtgcactgggtttgttcccatgtatattggtgaaatttcccctaccgctctgaggggcgcattcggcaccctgaatcagctgggaatcgtgatcggcattctcgtgtag

SEQ ID NO: 104416 - DNA, 1494 bp, Artificial Sequence
  derived and/or modified sequence
atggacaaccggcagaatgtgaccccagccctgatctttgccatcaccgtggccaccatcggcagcttccagtttggctacaacacaggagtcatcaatgcccctgagaccatcatcaaggagttcatcaacaagaccctgacagacaaggccaatgccccacccagcgaggtgctgctgaccaacctgtggagcctgtctgtggccatcttctctgtgggcggcatgattggcagcttctctgtgggcctgtttgtgaacagatttggaagaagaaacagcatgctgattgtgaacctgctggccgccaccggcggctgcctgatgggcctgtgcaagattgctgagagcgtggagatgctgatcctgggccgcctggtgattggcctcttctgtggcctgtgcaccggctttgtgcccatgtacatcggggagatcagccccacagccctgcggggggccttcggcaccctgaaccagctgggcatcgtgattggcatcctggtggcccagatcttcggcctggagctgatcctgggcagcgaggagctgtggcctgtgctgctgggcttcaccatcctgcctgccatcctgcagagcgctgccctgccctgctgcccagagagcccccgcttcctgctgatcaacaggaagaaggaggagaatgccacccgcatcctgcagaggctgtggggcacccaggatgtgtcccaggacatccaggagatgaaggatgaaagtgccaggatgagccaggagaagcaggtgacagtgctggagctgttccgggtgagcagctaccggcagcccatcatcatcagcatcgtgctgcagctgagccagcagctgagcggcatcaatgctgtgttctactacagcacaggcatcttcaaggatgctggggtgcagcagcccatctatgccaccatctctgctggggtggtgaacaccatcttcaccctgctgagcctcttcctggtggagcgggccggccgccgcaccctgcacatgattggcctgggcggcatggccttctgcagcaccctgatgacagtgtccctgctgctgaagaaccactacaacggcatgagctttgtgtgcatcggggccatcctggtgtttgtggcctgctttgagatcggccctggccccatcccctggttcatcgtggccgagctgttcagccagggccccaggcctgctgccatggctgtggccggctgcagcaactggaccagcaacttcctggtgggcctgctcttccccagcgctgcctactacctgggcgcctacgtgttcatcatcttcaccggcttcctgatcaccttcctggccttcaccttcttcaaggtgcctgagacccggggccgcacctttgaggacatcacccgggcctttgagggccaggcccatggagctgacagaagtggcaaggatggagtgatgggcatgaacagcattgaaccagccaaggagaccaccaccaacgtgtag

SEQ ID NO: 104417 - DNA, 426 bp, Artificial Sequence
  derived and/or modified sequence
atggacaaccggcagaatgtgaccccagccctgatctttgccatcaccgtggccaccatcggcagcttccagtttggctacaacacaggagtcatcaatgcccctgagaccatcatcaaggagttcatcaacaagaccctgacagacaaggccaatgccccacccagcgaggtgctgctgaccaacctgtggagcctgtctgtggccatcttctctgtgggcggcatgattggcagcttctctgtgggcctgtttgtgaacagatttggaagaagaaacagcatgctgattgtgaacctgctggccgccaccggcggctgcctgatgggcctgtgcaagattgctgagagcgtggagatgctgatcctgggccgcctggtgattggcctcttctgtggcctgtgcaccggctttgtgcccatgtag

SEQ ID NO: 104418 - DNA, 144 bp, Artificial Sequence
  derived and/or modified sequence
atggacaaccggcagaatgtgaccccagccctgatctttgccatcaccgtggccaccatcggcagcttccagtttggctacaacacaggagtcatcaatgcccctgagaccatcatcaaggagttcatcaacaagaccctgtag

SEQ ID NO: 104419 - DNA, 69 bp, Artificial Sequence
  derived and/or modified sequence
atggacaaccggcagaatgtgaccccagccctgatctttgccatcaccgtggccaccatcggcagctag

SEQ ID NO: 104420 - DNA, 459 bp, Artificial Sequence
  derived and/or modified sequence
atggacaaccggcagaatgtgaccccagccctgatctttgccatcaccgtggccaccatcggcagcttccagtttggctacaacacaggagtcatcaatgcccctgagaccatcatcaaggagttcatcaacaagaccctgacagacaaggccaatgccccacccagcgaggtgctgctgaccaacctgtggagcctgtctgtggccatcttctctgtgggcggcatgattggcagcttctctgtgggcctgtttgtgaacagatttggaagaagaaacagcatgctgattgtgaacctgctggccgccaccggcggctgcctgatgggcctgtgcaagattgctgagagcgtggagatgctgatcctgggccgcctggtgattggcctcttctgtggcctgtgcaccggctttgtgcccatgtacatcggggagatcagccccacagccctgaggtag

SEQ ID NO: 104421 - DNA, 255 bp, Artificial Sequence
  derived and/or modified sequence
atggacaaccggcagaatgtgaccccagccctgatctttgccatcaccgtggccaccatcggcagcttccagtttggctacaacacaggagtcatcaatgcccctgagaccatcatcaaggagttcatcaacaagaccctgacagacaaggccaatgccccacccagcgaggtgctgctgaccaacctgtggagcctgtctgtggccatcttctctgtgggcggcatgattggcagcttctctgtgggcctgtag

SEQ ID NO: 104422 - DNA, 510 bp, Artificial Sequence
  derived and/or modified sequence
atggacaaccggcagaatgtgaccccagccctgatctttgccatcaccgtggccaccatcggcagcttccagtttggctacaacacaggagtcatcaatgcccctgagaccatcatcaaggagttcatcaacaagaccctgacagacaaggccaatgccccacccagcgaggtgctgctgaccaacctgtggagcctgtctgtggccatcttctctgtgggcggcatgattggcagcttctctgtgggcctgtttgtgaacagatttggaagaagaaacagcatgctgattgtgaacctgctggccgccaccggcggctgcctgatgggcctgtgcaagattgctgagagcgtggagatgctgatcctgggccgcctggtgattggcctcttctgtggcctgtgcaccggctttgtgcccatgtacatcggggagatcagccccacagccctgcggggggccttcggcaccctgaaccagctgggcatcgtgattggcatcctggtgtag

SEQ ID NO: 104423 - DNA, 1494 bp, Artificial Sequence
  derived and/or modified sequence
atggacaaccggcagaacgtgacccccgccctgatcttcgccatcactgtagccaccatcggatcattccagttcggatacaataccggagtaatcaacgcccccgagacaatcatcaaagaatttatcaataaaacactcacggataaggcgaatgctccacccagtgaggtcctgcttacaaacctgtggtcactctccgtggctatatttagtgtgggaggaatgatcggctcttttagcgtagggctgtttgtcaaccgtttcggtcgtaggaactcaatgttaattgtcaatctgctggcggcaaccggtgggtgcctgatgggcctgtgcaagatcgcagaatcagtcgaaatgctgattctcgggaggctggtgatcggccttttctgcggtctgtgcacgggatttgtgcccatgtatatcggggagattagtcccacagccctgcgaggagcttttggcacattgaaccagttaggaatcgtcataggaatcctggtggctcaaatctttggactggagttaatcctgggctcagaagaactgtggcccgtgctcctggggtttaccatcctccctgcaatactgcagagcgccgctctcccctgttgtcctgagtctcctcggttccttctgattaataggaagaaggaagaaaatgccacacgaatattgcagagactgtgggggacacaggatgtgtcacaagatattcaagaaatgaaggatgagtcggcccgcatgtcacaggagaagcaagtgaccgtgctcgaattatttagggtaagcagttatagacaacctattatcatatccatagtgctgcagcttagccagcagctttctggaattaacgctgtattctactattctaccggaatatttaaggatgctggagtccagcagcccatttacgctaccatctcggctggcgtagttaatacgatatttactctcctgtcactattcctcgttgaacgggcgggaaggagaaccctccatatgatcggattgggggggatggccttttgttcgactctgatgaccgttagcttactcctgaagaaccactacaacgggatgtccttcgtttgtataggcgccatcctcgtattcgtggcatgctttgagattgggcccggacctatcccttggttcattgtggcagaactcttcagccaaggtcctcggcctgccgctatggcagtggccggctgcagcaattggaccagcaattttttggtgggcctcctgtttccaagtgccgcctattacctgggcgcttatgtgtttatcattttcacaggctttctcattactttcctcgcctttacgttcttcaaggttcccgagacaaggggacgcacattcgaggacatcacccgcgcctttgaagggcaggcccacggcgccgatcgcagcggaaaagatggcgtcatgggcatgaacagcatcgagcctgcaaaggaaacaactactaacgtctag

SEQ ID NO: 104424 - DNA, 1494 bp, Artificial Sequence
  derived and/or modified sequence
atggacaaccggcagaacgtgacccccgccctgatcttcgccatcacggtcgctacaattggatccttccaatttggctacaatacaggcgtgattaatgcccccgaaactattatcaaggaattcattaataaaactttgaccgataaggctaacgcaccaccgtcagaggtgttgctaacaaacctttggtccttgagcgtggctatttttagcgtcggcgggatgatcggctcattcagtgtcgggcttttcgttaatcgttttgggcggaggaactctatgctgatcgtaaacctcctggccgctaccggggggtgcctcatgggcctgtgtaaaatcgccgagtctgtggaaatgctcatacttggccggctggtcatcggtctattttgtggtctctgtactggcttcgtacctatgtacattggggagatcagcccaaccgccctgaggggcgcttttggaacactcaaccaactcggcatcgtcatagggattctggttgcacagattttcggactggagttgattctgggcagtgaagagctctggcccgttctgctggggtttacaatcctgccagccatcctgcagtccgccgctctcccctgctgtccagaatctccgcgctttcttctgatcaacaggaagaaggaagaaaatgctaccaggattctgcagcgattatgggggacccaggatgtgagccaagacatccaagagatgaaggatgaatccgcaaggatgtcacaggaaaagcaggttacggtgttggagctgttcagagtcagctcataccgacagcctattatcatttctatagttttacagctgtcccagcagctatcaggtatcaacgctgtgttctactactccaccggaatatttaaagacgccggggtgcaacagccaatctacgctaccatttccgccggtgtggttaatacgatttttacactgttgtcgctgttccttgttgagagagcaggtcgaagaaccttgcacatgatcggactcggagggatggccttttgctctacccttatgaccgtgagccttctactgaagaaccactacaacggaatgtccttcgtgtgcattggtgcaatcctcgtgttcgtcgcctgtttcgaaattggtcctggacccatcccatggttcatcgtcgctgagcttttttctcagggccctaggcccgccgctatggccgtggctggttgctccaactggacgtcaaactttcttgtaggcctgctcttccccagcgccgcttactatctgggggcctatgtgtttattatttttacaggctttttgataacctttctggcctttacctttttcaaagtcccagagacgcggggccgcacatttgaggatattacgcgagcattcgagggtcaggcccatggagctgaccgtagcggcaaggacggggtgatgggcatgaacagcatcgagcctgccaaagagactaccacaaatgtgtag

SEQ ID NO: 104425 - DNA, 426 bp, Artificial Sequence
  derived and/or modified sequence
atggacaaccggcagaacgtgacccccgccctgatcttcgccatcaccgtggccaccataggctcattccagtttggatacaacacaggggtaattaacgccccggagaccatcattaaggagtttattaacaagactcttaccgataaagctaatgcacccccaagcgaggtcctgctgaccaatctctggtccctatccgtggccatctttagcgttggcggaatgatcggttccttctccgttggactgttcgtcaaccgattcggccggcgaaacagtatgcttattgtcaatttgctggcggcgaccggaggctgtctgatgggcctgtgcaaaatcgcagagtccgtcgaaatgcttatcctgggccgcctcgtaatcggactcttctgcggcctctgtacgggttttgtaccaatgtag

SEQ ID NO: 104426 - DNA, 144 bp, Artificial Sequence
  derived and/or modified sequence
atggacaaccggcagaacgtgacccccgccctgatcttcgccatcaccgtggccacaattgggagcttccagttcggctacaataccggggtaatcaatgcccccgagactatcataaaggaattcattaataaaacactatag

SEQ ID NO: 104427 - DNA, 69 bp, Artificial Sequence
  derived and/or modified sequence
atggacaaccggcagaacgtgacccccgccctgatcttcgccatcacggtggccacaatcggctcgtag

SEQ ID NO: 104428 - DNA, 459 bp, Artificial Sequence
  derived and/or modified sequence
atggacaaccggcagaacgtgacccccgccctgatcttcgccatcaccgtcgcaacaatcggatctttccagtttggttacaacacaggggttatcaacgcccctgaaaccatcattaaagaatttatcaacaaaacgctcacggataaagccaatgcccccccatccgaagtgctcctgaccaacctgtggtccctgtccgtagcaatttttagcgtagggggcatgataggatctttctctgttggcttattcgttaacagatttggaagacggaacagcatgctaatcgtcaacttgctcgctgcgactggtggttgcttgatgggcctgtgtaaaatcgccgagagcgtggagatgcttattttaggtagattagtgatcggcctgttctgcggactctgtacaggatttgttccaatgtatattggcgagatttccccaacagctctgagatag

SEQ ID NO: 104429 - DNA, 255 bp, Artificial Sequence
  derived and/or modified sequence
atggacaaccggcagaacgtgacccccgccctgatcttcgccatcaccgtcgcaaccattggatctttccagtttgggtacaacacaggggtgattaacgcccccgaaacaatcatcaaagagttcatcaacaagacgctcaccgataaagccaacgctcccccttcggaggtgctgctcactaacctgtggtccttgagcgtggcaatctttagcgtcggcggaatgattggaagcttttccgtgggactgtag

SEQ ID NO: 104430 - DNA, 510 bp, Artificial Sequence
  derived and/or modified sequence
atggacaaccggcagaacgtgacccccgccctgatcttcgccatcacagtcgccaccatcggatccttccagttcgggtacaacacaggggtaatcaacgcaccagaaaccatcatcaaggaattcataaacaaaacccttacagataaagctaacgcgccaccatctgaagtattgttgaccaacctctggtctctctctgtggcaattttcagcgtcgggggcatgatcggctctttctctgtgggtctatttgttaatcggtttggccggagaaactctatgttaattgtcaatcttttggctgctactggcggctgcctgatgggactttgcaaaattgccgaaagtgtggaaatgctgatacttgggcggctggtcattggactgttttgcggcctgtgtaccggatttgtgcctatgtatatcggcgagatttcacccaccgcgctgagaggggcctttggaacactcaaccaactcggcatcgttatcggcatcctggtctag

SEQ ID NO: 104431 - DNA, 1494 bp, Artificial Sequence
  derived and/or modified sequence
atggacaatcgacagaacgtaacccctgccctgattttcgctataaccgtcgccaccataggaagcttccagttcgggtacaataccggggtgatcaacgccccagaaacaattattaaggaatttatcaacaaaactctgacagataaggcaaatgcccctccgagcgaggtgctgcttacaaacctgtggtcactctccgtcgcgatttttagcgttggtgggatgatcggttcttttagcgtcggactgtttgtgaacaggtttggtaggaggaattccatgctaattgtgaacctgttagccgctaccggtgggtgtctgatggggctatgtaaaatcgcagaatcagtagagatgcttattctgggtcgcttggtgattggactattctgtggtctgtgtaccgggttcgtgcccatgtatattggggaaattagcccaaccgcattgaggggcgcatttggcacactgaaccagttagggattgtcattggcattttggtggcacagatcttcggccttgaacttattctggggagcgaagaactgtggcccgtccttttgggcttcactatccttcccgcaatcctgcagagtgctgcgttaccgtgctgtcctgagtctcccaggttcctgctgattaatcggaaaaaggaggagaacgctaccaggatcctccagcgcctctgggggacacaagacgtgagccaggatattcaagagatgaaagacgagtccgcccgaatgagccaggagaagcaggtgaccgtcctggaactgttcagagtgtcttcctataggcagccaatcattatttcgattgttctgcaactcagtcagcagttatctgggatcaacgcagtgttctactattccactgggatattcaaagacgcaggagtccagcagcccatttacgctactatctcagctggcgtggtaaatacaatttttaccctgctgtccttattcctggttgaacgagctggccgacgaacattgcatatgatcggcctgggcggaatggctttctgtagcactcttatgactgtttcactgctgctgaaaaaccattacaatggaatgtcctttgtctgcataggagccatcctggtgttcgtggcatgtttcgaaattggcccagggcctatcccctggttcattgttgccgagcttttttctcagggcccacgccctgctgctatggccgtggctgggtgtagtaattggacttccaacttccttgtcggtttactgttcccatccgccgcttattatcttggcgcatacgtctttatcatcttcacaggtttcctcatcacctttctggcctttacgttctttaaagtaccagagacacggggtcgcacctttgaagacatcaccagagcatttgagggccaagcccatggcgcagataggtccgggaaggacggcgtaatgggcatgaactcaatcgagcccgcaaaagagaccactactaacgtctag

SEQ ID NO: 104432 - DNA, 1494 bp, Artificial Sequence
  derived and/or modified sequence
atggataacaggcagaatgtgacccctgccctcatttttgcgataactgtcgccaccatcggatccttccaattcgggtacaataccggggtgataaacgcccctgagaccatcattaaagaattcatcaacaagacactaaccgacaaagccaatgcaccgccttcagaggtactcttgactaacctgtggagcctcagcgtggccattttctcagtgggtggcatgatcggcagcttttctgtcgggctctttgtcaaccgattcggacggaggaattccatgctgatagtaaacttgctagctgctactgggggatgtcttatgggactgtgtaagatcgcagagtctgtggaaatgcttatccttggacggctggtcattggtttgttttgtggactctgtactgggttcgtcccaatgtacattggagaaattagtcccaccgccctcaggggagccttcggaaccttgaaccagctggggattgtgatcggtatcttggtggcccaaatttttggcctcgagctgatattgggaagtgaggagctctggcctgttctcctcggatttacgatcctcccggctattctgcagagcgccgcattaccctgttgccccgagtctccccgtttcttgctcatcaaccggaaaaaggaggaaaatgctactagaatcttacagcgtctgtggggcactcaggatgtatctcaggatatacaggaaatgaaagatgaatcagctcggatgagccaggaaaagcaggtcacagtgctggagctgtttagggtctctagctatcgtcagcccataattataagtattgtgctccagttaagccagcaattatccgggatcaacgcagtgttttactacagcacgggtatatttaaagacgccggtgtccagcaacctatctacgctactatcagcgcaggcgtcgtcaacaccatctttacccttctcagcctgttcctcgtcgaacgggcagggaggcgcaccctgcacatgataggattgggtggaatggctttttgtagcactctgatgaccgttagccttctccttaaaaatcactataatgggatgagctttgtctgtatcggcgcaatcctggtgttcgtggcttgtttcgaaatcggccctggacctataccttggtttatcgtggctgagctgttctctcaggggcctagaccagctgcgatggctgtcgccggatgctcgaactggacctcaaattttctcgttgggttactgttcccatcggccgcttattatctgggagcatatgtctttattatctttacaggcttcctcattaccttcttggcctttacttttttcaaagtgccagaaacccggggtcggactttcgaagacattacgcgggctttcgaaggacaggcccatggcgctgacagatctggcaaggatggtgtgatgggcatgaattccattgaaccggcaaaggagactaccacaaacgtttag

SEQ ID NO: 104433 - DNA, 426 bp, Artificial Sequence
  derived and/or modified sequence
atggacaataggcagaacgtaacccctgccctaattttcgccataaccgttgctaccattggctcgttccaatttggctacaacaccggggtgatcaatgcacctgagacgatcatcaaagagttcataaacaaaaccctcacagacaaggcaaatgcccctccctctgaggtgttattgaccaatctctggtcgctgagcgtcgcaatctttagcgttggcggaatgattggttcattttccgtcggcctgttcgtgaatcgctttgggcgtagaaactccatgctgattgtcaacctgctcgccgcaacagggggatgccttatgggcctgtgcaagatcgctgagtccgtggaaatgctgattctgggacggctggtgattggcctgttctgcggattgtgcacagggtttgtgcctatgtag

SEQ ID NO: 104434 - DNA, 144 bp, Artificial Sequence
  derived and/or modified sequence
atggacaaccgccagaacgtgacccccgcactaatattcgctattacggtggctacaatcgggagctttcagtttggctataatactggcgttatcaacgctccggaaactataattaaggagttcattaacaagaccctttag

SEQ ID NO: 104435 - DNA, 69 bp, Artificial Sequence
  derived and/or modified sequence
atggataaccgacaaaatgtcacgcccgctctgatctttgccataactgtcgcgaccataggttcttag

SEQ ID NO: 104436 - DNA, 459 bp, Artificial Sequence
  derived and/or modified sequence
atggataatcggcaaaatgtgaccccagccctaatctttgcaattactgtcgccactattgggagcttccagtttggatataatactggagttatcaacgcccctgagactattattaaagagttcatcaataagacactgacagacaaagcaaatgcccctccttcagaggtcttgctgactaacctgtggagtctttctgttgcaatctttagcgttggaggaatgatcgggtccttctcagtgggcctgttcgttaacaggttcggcaggaggaatagtatgctgatcgtgaacctccttgcggctactggagggtgcctgatgggattgtgcaaaattgcagaatctgttgaaatgttaatcctgggcaggctggtcatcggtctcttctgcggactctgcacaggttttgtacccatgtatatcggtgaaatttcgccaactgccttgcgctag

SEQ ID NO: 104437 - DNA, 255 bp, Artificial Sequence
  derived and/or modified sequence
atggacaacaggcagaatgttacccctgccctgattttcgcgataacagtggccacaatcgggtccttccaatttggctataacacgggtgtgatcaacgcaccagagactataattaaggaatttatcaataagaccctgacagataaagcaaacgcccctcccagcgaagtgcttctcactaacttgtggagcctgtctgtggccatcttcagcgttggcggaatgattggatcctttagtgtggggctctag

SEQ ID NO: 104438 - DNA, 510 bp, Artificial Sequence
  derived and/or modified sequence
atggataaccgacagaacgtaactccagcccttatcttcgcgattacagttgccactatcggaagctttcagttcggctacaacacaggagtgatcaacgctcccgaaactatcattaaggagtttatcaacaagacgctcacagataaggctaatgctccgccaagcgaagtgctcctgacaaacctgtggtccctatcagtggcaatcttttccgttggaggcatgatcgggtccttctcagtgggactttttgtgaacaggttcggacgacggaactcgatgctgattgttaacctgctggccgcaacgggcggatgtttgatgggactctgtaaaatagccgaatccgtggagatgctgattctcggtagattggtcataggcttattttgcggtctgtgtaccggcttcgtgcctatgtacatcggcgaaatcagccctacggctctcaggggcgcatttggcacactaaaccagttggggattgtcatagggattctcgtgtag

SEQ ID NO: 104439 - DNA, 3699 bp, Artificial Sequence
  derived and/or modified sequence
gttgagcgaagccgcggggcccaaccgcagtcgcggggtctgggagccctctattggagattctgcctcccctgggacagatggcttcttgagcacactcccacgatgggtggctgctctgggtattcatccatggggttcttccgcggtgaagccagcttgtcgtgctgtcccccttgtcattgaagccatcatggttctggtcaatcatgttgaaagcctccttaaactcctggatgtggaactggtcgaacatcacgaagacattggatgtggccccttgtgctgtggtcgcttcttggtggtcttggctttggtccacttgctgaacattttggcttcaggaagcagtaccttgaagagaaattggagagggagtcaattcctaggatagcagagagatggacaacagacagaatgtcaccccagctctgatctttgccatcacagttgctacaatcggctctttccagtttggctacaacactggggtcatcaatgctcctgagacgatcataaaggaatttatcaataaaactttgacggacaaggcaaatgcccctccctctgaggtgctgctcacgaatctctggtccttgtctgtggccatattttccgtcgggggtatgatcggctccttttccgtcggactctttgttaaccgctttggcaggcgcaattcaatgctgattgtcaacctgttggctgccactggtggctgccttatgggactgtgtaaaatagctgagtcagttgaaatgctgatcctgggccgcttggttattggcctcttctgcggactctgcacaggttttgtgcccatgtacattggagagatctcgcctactgccctgaggggtgcctttggcactctcaaccagctgggcatagttattggaattctggtggcccagatctttggtctggaactcatccttgggtctgaagagctatggccggtgctattaggctttaccatccttccagctatcctgcaaagtgcagcccttccatgttgccctgaaagtcccagatttttgctcattaacagaaaaaaagaggagaatgctacgcggatcctccagcggttgtggggcacccaggatgtatcccaagacatccaggagatgaaagatgagagtgcaaggatgtcacaagaaaagcaagtcaccgtgctggagctctttagagtgtccagctaccgacagcccatcatcatttccattgtgctccagctctctcagcagctctctgggatcaatgctgtgttctattactcaacaggaatcttcaaggatgcaggtgttcaacagcccatctatgccaccatcagcgcgggtgtggttaatactatcttcactttactttctctatttctggtggaaagggcaggaagaaggactctgcatatgataggccttggagggatggctttttgttccacgctcatgactgtttctttgttattaaagaatcactataatgggatgagctttgtctgtattggggctatcttggtctttgtggcctgttttgaaattggaccaggccccattccctggtttattgtggccgaactcttcagccagggcccccgcccagctgcgatggcagtggccggctgctccaactggacctccaacttcctagtcggattgctcttcccctctgctgcttactatttaggagcctacgtttttattatcttcaccggcttcctcattaccttcttggcctttaccttcttcaaagtccctgagacccgtggcaggacttttgaggatatcacacgggcctttgaagggcaggcacacggtgcagatagatctgggaaggacggcgtcatggggatgaacagcatcgagcctgctaaggagaccaccaccaatgtctaagtcatgcctccttccacctccctcccggcatgggaaagccacctctccctcaacaagggagagactttatcaggatgaacccaggactgcttctgaatgctgctacttgatttctttctcatcccacgcactccatgagcaccccaaggctgcagtttgttggatcttcaatggctttttaaattttatttcctggacatcctcttctgcttaggagagaccgagtgaacctaccttcatttcaggagggattggccgcttggcacatgacaactttgccagcttttcctcccttgggttctgatattgccgcactagaggatataggagaggaaaagtaaggtgcagttgccccaacctcagacttaccaggaagcagatacatatgagtgtggaagccggagggtgtttatgtaagagcaccttcctcacttccatacagctctacgcggcaaattaacttgagttttatttatcttatcctctggtttaattacataaatatttattttttaagtgtaattttgccaaataataaaaacagaaggaaattgagattagagggaggtgtttaaagagaggttatagagtaaaagatttgatgctggagaggttaaggtgcaataagaattcagggagaaatgttgttcattattggagggtaaatgatgtggtgcctgaggtctgtacattacctcttaacaatttctgtccttcagatggaaactctttgatttctcagaaaagttgtatgcctatttaataaagctactcatttcctttggaactttatctttaagataatagtttacatgtagtagtacttgaaatctaggattattaactaatatgggcattgtagttaatggcggttgatgggttctaattttggatggagtccagggaagagaaagtgatttctagaaagcctgttcccctcactggacgaaataactccttgtagtagtctcattacttttgaagtaatcccgccacctatctagtgggagagccatccaaatgagaaacctaaaataattggttcttggtagagattcattatttctccactttgttctttaggagattttaggtgttgattttctgttttattttaactcatacctttaaaggaattccccaaagaatgtttacagcaaacttggaatttgtaacctcagctctgggagaggatttttttctgagcgattattatctaaagtgtgttgttgctttaggctcacggcacgcttgcgtatgtctgttaccatgtcactgtggtcctatgccgaatgccctcaggggacttgaatctttccaataaaccaggtttagacagtatgagtcaatgtgcagtgcagcccacacttgagaggatgaatgtatgtgcactgtcactttgctctgggtggaagtatgttattgttgacttattttctctgtgtttgttcctacagcccctttttcatatgttgctcagtctccctttcccttcttggtgcttacacatctcagaccctttagccaaacccttgccagtgacagtattttggttctcagttctcactgttccctctgctcctggagcctttgaataaaaatgcacgtagctatggagtggggtttagctggaaaggtggccttccaacttcacgtcaacttctggctcctcagtttggcagtaaggcagggaagttgttttcctatttctcactgagaagattgtgaatatttccatatggattttccattattgtttgtttgattctttgttttaaaataaaaattctgaatgtacatgaca

SEQ ID NO: 104440 - DNA, 3458 bp, Artificial Sequence
  derived and/or modified sequence
agttagtgggtcccaacggctgcaggcggggccggcgggggcgcagcggcccgggaggtgcgtggttgagcgaagccgcggggcccaaccgcagtcgcggggtctgggaggaagcagtaccttgaagagaaattggagagggagtcaattcctaggatagcagagagatggacaacagacagaatgtcaccccagctctgatctttgccatcacagttgctacaatcggctctttccagtttggctacaacactggggtcatcaatgctcctgagacgatcataaaggaatttatcaataaaactttgacggacaaggcaaatgcccctccctctgaggtgctgctcacgaatctctggtccttgtctgtggccatattttccgtcgggggtatgatcggctccttttccgtcggactctttgttaaccgctttggcaggcgcaattcaatgctgattgtcaacctgttggctgccactggtggctgccttatgggactgtgtaaaatagctgagtcagttgaaatgctgatcctgggccgcttggttattggcctcttctgcggactctgcacaggttttgtgcccatgtacattggagagatctcgcctactgccctgaggggtgcctttggcactctcaaccagctgggcatagttattggaattctggtggcccagatctttggtctggaactcatccttgggtctgaagagctatggccggtgctattaggctttaccatccttccagctatcctgcaaagtgcagcccttccatgttgccctgaaagtcccagatttttgctcattaacagaaaaaaagaggagaatgctacgcggatcctccagcggttgtggggcacccaggatgtatcccaagacatccaggagatgaaagatgagagtgcaaggatgtcacaagaaaagcaagtcaccgtgctggagctctttagagtgtccagctaccgacagcccatcatcatttccattgtgctccagctctctcagcagctctctgggatcaatgctgtgttctattactcaacaggaatcttcaaggatgcaggtgttcaacagcccatctatgccaccatcagcgcgggtgtggttaatactatcttcactttactttctctatttctggtggaaagggcaggaagaaggactctgcatatgataggccttggagggatggctttttgttccacgctcatgactgtttctttgttattaaagaatcactataatgggatgagctttgtctgtattggggctatcttggtctttgtggcctgttttgaaattggaccaggccccattccctggtttattgtggccgaactcttcagccagggcccccgcccagctgcgatggcagtggccggctgctccaactggacctccaacttcctagtcggattgctcttcccctctgctgcttactatttaggagcctacgtttttattatcttcaccggcttcctcattaccttcttggcctttaccttcttcaaagtccctgagacccgtggcaggacttttgaggatatcacacgggcctttgaagggcaggcacacggtgcagatagatctgggaaggacggcgtcatggggatgaacagcatcgagcctgctaaggagaccaccaccaatgtctaagtcatgcctccttccacctccctcccggcatgggaaagccacctctccctcaacaagggagagactttatcaggatgaacccaggactgcttctgaatgctgctacttgatttctttctcatcccacgcactccatgagcaccccaaggctgcagtttgttggatcttcaatggctttttaaattttatttcctggacatcctcttctgcttaggagagaccgagtgaacctaccttcatttcaggagggattggccgcttggcacatgacaactttgccagcttttcctcccttgggttctgatattgccgcactagaggatataggagaggaaaagtaaggtgcagttgccccaacctcagacttaccaggaagcagatacatatgagtgtggaagccggagggtgtttatgtaagagcaccttcctcacttccatacagctctacgcggcaaattaacttgagttttatttatcttatcctctggtttaattacataaatatttattttttaagtgtaattttgccaaataataaaaacagaaggaaattgagattagagggaggtgtttaaagagaggttatagagtaaaagatttgatgctggagaggttaaggtgcaataagaattcagggagaaatgttgttcattattggagggtaaatgatgtggtgcctgaggtctgtacattacctcttaacaatttctgtccttcagatggaaactctttgatttctcagaaaagttgtatgcctatttaataaagctactcatttcctttggaactttatctttaagataatagtttacatgtagtagtacttgaaatctaggattattaactaatatgggcattgtagttaatggcggttgatgggttctaattttggatggagtccagggaagagaaagtgatttctagaaagcctgttcccctcactggacgaaataactccttgtagtagtctcattacttttgaagtaatcccgccacctatctagtgggagagccatccaaatgagaaacctaaaataattggttcttggtagagattcattatttctccactttgttctttaggagattttaggtgttgattttctgttttattttaactcatacctttaaaggaattccccaaagaatgtttacagcaaacttggaatttgtaacctcagctctgggagaggatttttttctgagcgattattatctaaagtgtgttgttgctttaggctcacggcacgcttgcgtatgtctgttaccatgtcactgtggtcctatgccgaatgccctcaggggacttgaatctttccaataaaccaggtttagacagtatgagtcaatgtgcagtgcagcccacacttgagaggatgaatgtatgtgcactgtcactttgctctgggtggaagtatgttattgttgacttattttctctgtgtttgttcctacagcccctttttcatatgttgctcagtctccctttcccttcttggtgcttacacatctcagaccctttagccaaacccttgccagtgacagtattttggttctcagttctcactgttccctctgctcctggagcctttgaataaaaatgcacgtagctatggagtggggtttagctggaaaggtggccttccaacttcacgtcaacttctggctcctcagtttggcagtaaggcagggaagttgttttcctatttctcactgagaagattgtgaatatttccatatggattttccattattgtttgtttgattctttgttttaaaataaaaattctgaatgta

SEQ ID NO: 104441 - DNA, 561 bp, Artificial Sequence
  derived and/or modified sequence
gtgcgccgcgccgtccctgcggccggggggtgcgggaatgaggacctgagctggggtagaggtggccgagctagagtagaggaagcagtaccttgaagagaaattggagagggagtcaattcctaggatagcagagagatggacaacagacagaatgtcaccccagctctgatctttgccatcacagttgctacaatcggctctttccagtttggctacaacactggggtcatcaatgctcctgagacgatcataaaggaatttatcaataaaactttgacggacaaggcaaatgcccctccctctgaggtgctgctcacgaatctctggtccttgtctgtggccatattttccgtcgggggtatgatcggctccttttccgtcggactctttgttaaccgctttggcaggcgcaattcaatgctgattgtcaacctgttggctgccactggtggctgccttatgggactgtgtaaaatagctgagtcagttgaaatgctgatcctgggccgcttggttattggcctcttctgcggactctgcacaggttttgtgcccatg

SEQ ID NO: 104442 - DNA, 665 bp, Artificial Sequence
  derived and/or modified sequence
tttttagtaaagactgggtttcgccatgttggccaggctggtctcgaacccctgacctcaagttatccgctctcctcggcctccaaaagtgctaggattacaggtgtgagccaccgtgcgcggcccgaaataactctttacaggatctcgccctgggccttcccagcccagccggcccgcccgcggggatagcccgggcactatctccctgctgcaggcggtgaggggctcgggtatctttgaaaatagatacgttcacaccctcctaacggcggcgccaagggtggtgggtcccaaaactgtttccccgtaaagagttcccccgcccggtcgcaggaagacgcctgagggggcgctcggagggatccccagcagccgccggggctggaccgtgcggtgcgcaggtgagaagccgggaggggccggacaaccccgaccgcgagccggacccctgctctgaccgcaggaagcagtaccttgaagagaaattggagagggagtcaattcctaggatagcagagagatggacaacagacagaatgtcaccccagctctgatctttgccatcacagttgctacaatcggctctttccagtttggctacaacactggggtcatcaatgctcctgagacgatcataaaggaatttatcaataaaactttga

SEQ ID NO: 104443 - DNA, 682 bp, Artificial Sequence
  derived and/or modified sequence
tgaccgcaggtgggtgcttgtcttgcttacggagggctcccgatgaaccgagtcacgttttgtaaccacattaacggaccattcaaagtcgaatcctaggcttttcgaggcagttagtgggtcccaacggctgcaggcggggccggcgggggcgcagcggcccgggaggaagcagtaccttgaagagaaattggagagggagtcaattcctaggatagcagagagatggacaacagacagaatgtcaccccagctctgatctttgccatcacagttgctacaatcggctctttccagtttggctacaacactggggtcatcaatgctcctgagacgatcataaaggaatttatcaataaaactttgacggacaaggcaaatgcccctccctctgaggtgctgctcacgaatctctggtccttgtctgtggccatattttccgtcgggggtatgatcggctccttttccgtcggactctttgttaaccgctttggcaggcgcaattcaatgctgattgtcaacctgttggctgccactggtggctgccttatgggactgtgtaaaatagctgagtcagttgaaatgctgatcctgggccgcttggttattggcctcttctgcggactctgcacaggttttgtgcccatgtacattggagagatctcgcctactgccctgaggg

SEQ ID NO: 104444 - DNA, 580 bp, Artificial Sequence
  derived and/or modified sequence
tttggcaggagacctgaatgaaatgagggagccttgggagcatgatccaggcggagggaactggattcgggaggaggaactgccttggccttgaaagatacctaccaggagttcaagtgctgtgcgggtgcatcagctttgtagatttgtgcaagatgaaaattggaattgtcttaggaaattatggatcattcatttattcagtgctggattcattcagtgatttatgtctgaagtgtgacagaaggggagtaaggccaagtgtccttggaagcagtaccttgaagagaaattggagagggagtcaattcctaggatagcagagagatggacaacagacagaatgtcaccccagctctgatctttgccatcacagttgctacaatcggctctttccagtttggctacaacactggggtcatcaatgctcctgagacgatcataaaggaatttatcaataaaactttgacggacaaggcaaatgcccctccctctgaggtgctgctcacgaatctctggtccttgtctgtggccatattttccgtcgggggtatgatcggctccttttccgtcggactct

SEQ ID NO: 104445 - DNA, 854 bp, Artificial Sequence
  derived and/or modified sequence
gcagcggcccgggaggtgcgtggttgagcgaagccgcggggcccaaccgcagtcgcggggtctgggaggtattcatccatggggttcttccgcggtgaagccagcttgtcgtgctgtcccccttgtcattgaagccatcatggttctggtcaatcatgttgaaagcctccttaaactcctggatgtggaactggtcgaacatcacgaagacattggatgtggccccttgtgctgtggtcgcttcttggtggtcttggctttggtccacttgctgaacattttggcttcaggaagcagtaccttgaagagaaattggagagggagtcaattcctaggatagcagagagatggacaacagacagaatgtcaccccagctctgatctttgccatcacagttgctacaatcggctctttccagtttggctacaacactggggtcatcaatgctcctgagacgatcataaaggaatttatcaataaaactttgacggacaaggcaaatgcccctccctctgaggtgctgctcacgaatctctggtccttgtctgtggccatattttccgtcgggggtatgatcggctccttttccgtcggactctttgttaaccgctttggcaggcgcaattcaatgctgattgtcaacctgttggctgccactggtggctgccttatgggactgtgtaaaatagctgagtcagttgaaatgctgatcctgggccgcttggttattggcctcttctgcggactctgcacaggttttgtgcccatgtacattggagagatctcgcctactgccctgaggggtgcctttggcactctcaaccagctgggcatagttattggaattctggtg

SEQ ID NO: 104446 - DNA, 1494 bp, Artificial Sequence
  derived and/or modified sequence
atggacaacagacagaacgtgacccccgccctgatcttcgccatcaccgtggccaccatcggcagcttccagttcggctacaacaccggcgtgatcaacgcccccgagaccatcatcaaggagttcatcaacaagaccctgaccgacaaggccaacgccccccccagcgaggtgctgctgaccaacctgtggagcctgagcgtggccatcttcagcgtgggcggcatgatcggcagcttcagcgtgggcctgttcgtgaacagattcggcagaagaaacagcatgctgatcgtgaacctgctggccgccaccggcggctgcctgatgggcctgtgcaagatcgccgagagcgtggagatgctgatcctgggcagactggtgatcggcctgttctgcggcctgtgcaccggcttcgtgcccatgtacatcggcgagatcagccccaccgccctgagaggcgccttcggcaccctgaaccagctgggcatcgtgatcggcatcctggtggcccagatcttcggcctggagctgatcctgggcagcgaggagctgtggcccgtgctgctgggcttcaccatcctgcccgccatcctgcagagcgccgccctgccctgctgccccgagagccccagattcctgctgatcaacagaaagaaggaggagaacgccaccagaatcctgcagagactgtggggcacccaggacgtgagccaggacatccaggagatgaaggacgagagcgccagaatgagccaggagaagcaggtgaccgtgctggagctgttcagagtgagcagctacagacagcccatcatcatcagcatcgtgctgcagctgagccagcagctgagcggcatcaacgccgtgttctactacagcaccggcatcttcaaggacgccggcgtgcagcagcccatctacgccaccatcagcgccggcgtggtgaacaccatcttcaccctgctgagcctgttcctggtggagagagccggcagaagaaccctgcacatgatcggcctgggcggcatggccttctgcagcaccctgatgaccgtgagcctgctgctgaagaaccactacaacggcatgagcttcgtgtgcatcggcgccatcctggtgttcgtggcctgcttcgagatcggccccggccccatcccctggttcatcgtggccgagctgttcagccagggccccagacccgccgccatggccgtggccggctgcagcaactggaccagcaacttcctggtgggcctgctgttccccagcgccgcctactacctgggcgcctacgtgttcatcatcttcaccggcttcctgatcaccttcctggccttcaccttcttcaaggtgcccgagaccagaggcagaaccttcgaggacatcaccagagccttcgagggccaggcccacggcgccgacagaagcggcaaggacggcgtgatgggcatgaacagcatcgagcccgccaaggagaccaccaccaacgtgtag

SEQ ID NO: 104447 - DNA, 426 bp, Artificial Sequence
  derived and/or modified sequence
atggacaacagacagaacgtgacccccgccctgatcttcgccatcaccgtggccaccatcggcagcttccagttcggctacaacaccggcgtgatcaacgcccccgagaccatcatcaaggagttcatcaacaagaccctgaccgacaaggccaacgccccccccagcgaggtgctgctgaccaacctgtggagcctgagcgtggccatcttcagcgtgggcggcatgatcggcagcttcagcgtgggcctgttcgtgaacagattcggcagaagaaacagcatgctgatcgtgaacctgctggccgccaccggcggctgcctgatgggcctgtgcaagatcgccgagagcgtggagatgctgatcctgggcagactggtgatcggcctgttctgcggcctgtgcaccggcttcgtgcccatgtag

SEQ ID NO: 104448 - DNA, 144 bp, Artificial Sequence
  derived and/or modified sequence
atggacaacagacagaacgtgacccccgccctgatcttcgccatcaccgtggccaccatcggcagcttccagttcggctacaacaccggcgtgatcaacgcccccgagaccatcatcaaggagttcatcaacaagaccctgtag

SEQ ID NO: 104449 - DNA, 69 bp, Artificial Sequence
  derived and/or modified sequence
atggacaacagacagaacgtgacccccgccctgatcttcgccatcaccgtggccaccatcggcagctag

SEQ ID NO: 104450 - DNA, 459 bp, Artificial Sequence
  derived and/or modified sequence
atggacaacagacagaacgtgacccccgccctgatcttcgccatcaccgtggccaccatcggcagcttccagttcggctacaacaccggcgtgatcaacgcccccgagaccatcatcaaggagttcatcaacaagaccctgaccgacaaggccaacgccccccccagcgaggtgctgctgaccaacctgtggagcctgagcgtggccatcttcagcgtgggcggcatgatcggcagcttcagcgtgggcctgttcgtgaacagattcggcagaagaaacagcatgctgatcgtgaacctgctggccgccaccggcggctgcctgatgggcctgtgcaagatcgccgagagcgtggagatgctgatcctgggcagactggtgatcggcctgttctgcggcctgtgcaccggcttcgtgcccatgtacatcggcgagatcagccccaccgccctgagatag

SEQ ID NO: 104451 - DNA, 255 bp, Artificial Sequence
  derived and/or modified sequence
atggacaacagacagaacgtgacccccgccctgatcttcgccatcaccgtggccaccatcggcagcttccagttcggctacaacaccggcgtgatcaacgcccccgagaccatcatcaaggagttcatcaacaagaccctgaccgacaaggccaacgccccccccagcgaggtgctgctgaccaacctgtggagcctgagcgtggccatcttcagcgtgggcggcatgatcggcagcttcagcgtgggcctgtag

SEQ ID NO: 104452 - DNA, 510 bp, Artificial Sequence
  derived and/or modified sequence
atggacaacagacagaacgtgacccccgccctgatcttcgccatcaccgtggccaccatcggcagcttccagttcggctacaacaccggcgtgatcaacgcccccgagaccatcatcaaggagttcatcaacaagaccctgaccgacaaggccaacgccccccccagcgaggtgctgctgaccaacctgtggagcctgagcgtggccatcttcagcgtgggcggcatgatcggcagcttcagcgtgggcctgttcgtgaacagattcggcagaagaaacagcatgctgatcgtgaacctgctggccgccaccggcggctgcctgatgggcctgtgcaagatcgccgagagcgtggagatgctgatcctgggcagactggtgatcggcctgttctgcggcctgtgcaccggcttcgtgcccatgtacatcggcgagatcagccccaccgccctgagaggcgccttcggcaccctgaaccagctgggcatcgtgatcggcatcctggtgtag

SEQ ID NO: 104453 - protein, 411 aa, Artificial Sequence
  derived and/or modified sequence
MLLRRRNSMLIVNLLAATGGCLMGLCKIAESVEMLILGRLVIGLFCGLCTGFVPMYIGEISPTALRGAFGTLNQLGIVIGILVAQIFGLELILGSEELWPVLLGFTILPAILQSAALPCCPESPRFLLINRKKEENATRILQRLWGTQDVSQDIQEMKDESARMSQEKQVTVLELFRVSSYRQPIIISIVLQLSQQLSGINAVFYYSTGIFKDAGVQQPIYATISAGVVNTIFTLLSLFLVERAGRRTLHMIGLGGMAFCSTLMTVSLLLKNHYNGMSFVCIGAILVFVACFEIGPGPIPWFIVAELFSQGPRPAAMAVAGCSNWTSNFLVGLLFPSAAYYLGAYVFIIFTGFLITFLAFTFFKVPETRGRTFEDITRAFEGQAHGADRSGKDGVMGMNSIEPAKETTTNV

SEQ ID NO: 104454 - DNA, 1236 bp, Artificial Sequence
  derived and/or modified sequence
atgctcctccgacggcgcaacagtatgctgatcgtgaacctgctagccgctactggcggctgtctgatggggttatgcaaaatcgctgagagtgtggagatgctgatccttggacgactggtgatcgggctcttttgtggcctctgcaccggcttcgtgcctatgtacatcggtgaaatcagtccgacggccttgcggggcgccttcggcaccttgaaccagctcggcatcgtaatagggatcctggttgcccagatttttgggctggaattgatactgggctcagaagaactctggccagttctgttgggcttcacaatactccccgctattctccagtcagctgcactcccatgttgccccgagtcccctcgttttctgttaatcaatcgcaagaaagaggagaatgccacccgaattctgcagaggctatgggggacccaggatgtgtcacaggatatccaagagatgaaagatgaatccgctcggatgagtcaggaaaagcaggttacggtgctggaactgttccgcgtttcttcatacaggcagccaattattatctctatcgttctacagctgtcccagcagttgagcgggatcaacgccgtgttttattactcaaccgggattttcaaggatgctggggtacaacagccaatctacgcaacgatctctgccggtgtagtgaacaccatctttactttgctctcattgttcttagtggaacgggcaggaaggagaaccctgcatatgattggcctggggggcatggccttctgttcaacactgatgaccgtttctcttctgttgaagaatcactataacggcatgtctttcgtgtgcatcggcgctatcctagtgtttgtcgcgtgcttcgagattgggcctggtcctattccatggttcatcgttgccgagctgttctcccaaggaccacggccagccgccatggctgtggctggctgctctaattggacaagcaatttccttgtggggctgctgttcccatctgcggcctactatcttggggcttatgtatttatcattttcacaggttttctcatcacattccttgctttcactttttttaaggtacccgagacccgaggacgaactttcgaagacatcacacgagcttttgagggccaagcacacggcgctgaccgttcaggcaaagacggtgttatgggtatgaacagcatcgagccagccaaggagactacaaccaatgtatag

SEQ ID NO: 104455 - DNA, 486 bp, Artificial Sequence
  derived and/or modified sequence
atgattgggcttggaggcatggctttctgcagcacgctgatgacagtgtccctgctactgaagaatcactataatggtatgtccttcgtgtgcataggcgccattctagtgttcgtggcctgcttcgaaatcggccccggaccaatcccttggttcatcgtggctgaactgttctcccagggccctcgaccagctgctatggccgtcgccggttgttcaaactggactagtaactttctcgtcggattattgttcccttccgccgcctattacttgggcgcttatgtcttcatcatctttactggtttcctcatcacttttctcgcgtttacatttttcaaagtacccgagacacgcggacggaccttcgaagacattactagggcgttcgaaggacaagcccacggcgcggacaggtccgggaaagacggcgtaatgggaatgaactcaatcgagccggccaaggagactaccaccaatgtatag

SEQ ID NO: 104456 - DNA, 1236 bp, Artificial Sequence
  derived and/or modified sequence
atgctcctgagacgcaggaattctatgctcattgtgaatctacttgccgcaactggcgggtgcttaatggggctctgcaagatcgctgagagcgtagaaatgctgatcttgggtaggctggtaatcgggctcttttgcgggttgtgtactggctttgtgccaatgtatatcggggaaattagccctacggcacttcgcggagccttcggcacattgaatcagctcggcatcgtgattggcatactcgttgcccagatttttggcctggagctcatcctcgggagtgaagaactgtggcccgtgctgctcggcttcactattttgccagcaattttacagtccgccgccctgccctgctgtccagagagtcccaggttcctgctaatcaatcgcaaaaaggaagagaacgccaccaggatactgcagcgcttgtggggcacccaagacgtttcccaagacattcaggagatgaaagacgaatctgcccgaatgagtcaggagaaacaagtcactgttttggaactttttcgtgtgagcagctaccgacagcccatcattataagcatagtgctgcagttatcacaacaactgtctggaattaatgctgttttctactactccactggcatttttaaggacgccggagtccagcagccaatttacgctaccattagtgcaggtgtggtgaatacaatttttactctgctgagcctgttccttgtggagcgggctggacgccgcactttacatatgattggcctggggggcatggccttttgctctacactgatgacagtgtcactgctgctcaagaaccactataacggaatgtcatttgtttgcataggtgccatcctggtcttcgtggcttgcttcgagattggcccagggcccatcccatggttcatcgtggccgaactattctcacaaggaccaaggccggcggcgatggcagtcgccggttgtagtaactggacatctaacttccttgtgggcctactctttccatctgccgcttattatcttggcgcctatgtgtttattattttcacaggcttccttatcactttcctagctttcacgtttttcaaagtaccagagacccgcgggcgcacctttgaagatattacccgtgcatttgaaggccaggcccacggggctgacaggtcaggcaaggatggcgtcatgggaatgaatagcatcgagcccgcgaaggagactactactaatgtctag

SEQ ID NO: 104457 - DNA, 1236 bp, Artificial Sequence
  derived and/or modified sequence
atgctgctgcggcggaggaacagcatgctgattgtgaacctgctggccgccaccggcggctgcctgatgggcctgtgcaagattgctgagagcgtggagatgctgatcctgggccgcctggtgattggcctcttctgtggcctgtgcaccggctttgtgcccatgtacatcggggagatcagccccacagccctgcggggggccttcggcaccctgaaccagctgggcatcgtgattggcatcctggtggcccagatcttcggcctggagctgatcctgggcagcgaggagctgtggcctgtgctgctgggcttcaccatcctgcctgccatcctgcagagcgctgccctgccctgctgcccagagagcccccgcttcctgctgatcaacaggaagaaggaggagaatgccacccgcatcctgcagaggctgtggggcacccaggatgtgtcccaggacatccaggagatgaaggatgaaagtgccaggatgagccaggagaagcaggtgacagtgctggagctgttccgggtgagcagctaccggcagcccatcatcatcagcatcgtgctgcagctgagccagcagctgagcggcatcaatgctgtgttctactacagcacaggcatcttcaaggatgctggggtgcagcagcccatctatgccaccatctctgctggggtggtgaacaccatcttcaccctgctgagcctcttcctggtggagcgggccggccgccgcaccctgcacatgattggcctgggcggcatggccttctgcagcaccctgatgacagtgtccctgctgctgaagaaccactacaacggcatgagctttgtgtgcatcggggccatcctggtgtttgtggcctgctttgagatcggccctggccccatcccctggttcatcgtggccgagctgttcagccagggccccaggcctgctgccatggctgtggccggctgcagcaactggaccagcaacttcctggtgggcctgctcttccccagcgctgcctactacctgggcgcctacgtgttcatcatcttcaccggcttcctgatcaccttcctggccttcaccttcttcaaggtgcctgagacccggggccgcacctttgaggacatcacccgggcctttgagggccaggcccatggagctgacagaagtggcaaggatggagtgatgggcatgaacagcattgaaccagccaaggagaccaccaccaacgtgtag

SEQ ID NO: 104458 - DNA, 486 bp, Artificial Sequence
  derived and/or modified sequence
atgattggcctgggcggcatggccttctgcagcaccctgatgacagtgtccctgctgctgaagaaccactacaacggcatgagctttgtgtgcatcggggccatcctggtgtttgtggcctgctttgagatcggccctggccccatcccctggttcatcgtggccgagctgttcagccagggccccaggcctgctgccatggctgtggccggctgcagcaactggaccagcaacttcctggtgggcctgctcttccccagcgctgcctactacctgggcgcctacgtgttcatcatcttcaccggcttcctgatcaccttcctggccttcaccttcttcaaggtgcctgagacccggggccgcacctttgaggacatcacccgggcctttgagggccaggcccatggagctgacagaagtggcaaggatggagtgatgggcatgaacagcattgaaccagccaaggagaccaccaccaacgtgtag

SEQ ID NO: 104459 - DNA, 1236 bp, Artificial Sequence
  derived and/or modified sequence
atgctgctgcggcggcggaacagcatgctgatcgtgaacctgctggcagccaccgggggttgcctgatgggcctgtgcaaaatcgccgagagcgtcgagatgcttatcttaggcaggttagtgataggtttgttttgtgggctgtgcaccggattcgtgcctatgtacatcggtgagatttctccgaccgctctccgaggggcattcggtaccctgaatcaacttggcatcgtgattgggatcttggtagcgcagattttcgggctggagttgattctggggagcgaagaactgtggccagtcttgctgggcttcactatcctgcccgccattctgcagagtgcagcacttccctgctgccctgaatctcctcgctttctgttaatcaaccgcaagaaggaggaaaacgctaccagaattctacagaggctttggggcacacaagacgtcagccaggacatccaagagatgaaggacgagtccgccaggatgagccaggaaaagcaggtgacagtcttggagctattccgggtttcttcctatcggcagccgattatcatctcaatagttctgcagctgagccaacagctgtctgggatcaacgctgtcttctactattcaactggcatcttcaaggatgcaggggtgcaacagcccatatacgctacaatcagtgctggagttgtgaacacaatcttcaccctcctgtccctatttctggttgagcgtgccgggagacggacactgcacatgataggactggggggaatggcgttttgcagtactctgatgacagtctctcttctgttaaagaaccattacaatggtatgtctttcgtgtgcattggggcaattctcgtttttgttgcttgtttcgagattggccccggaccgatcccatggttcatcgttgctgaactgttctcacagggcccgcgaccagctgcgatggcagtggccggctgttccaattggacaagcaacttcctcgtggggctgttgttcccatcggcggcatactacctaggggcatacgtgttcataatcttcaccgggtttcttattacgttccttgcgttcaccttctttaaggtgccagagactaggggcaggactttcgaagacattacacgagcatttgagggccaggcccacggcgccgacagaagtggtaaggacggtgtgatgggaatgaactcaatagagcctgctaaggaaacaaccacaaatgtttag

SEQ ID NO: 104460 - DNA, 486 bp, Artificial Sequence
  derived and/or modified sequence
atgatcggcctgggcggcatggccttctgcagcaccctgatgaccgtgagtctattgcttaagaaccactacaacggcatgtctttcgtctgcatcggcgccatcttggtcttcgtagcctgcttcgaaattggacccggtccaatcccttggtttatcgtggccgagttgttctcccaaggtccgagacctgccgcaatggctgtggccgggtgttctaattggacgagcaatttcctggtgggcctactcttccccagtgccgcctactatctgggtgcctacgttttcatcatttttacaggctttctcataacattcctggcatttactttttttaaggttcctgagacaaggggacgaacattcgaagacatcacgcgggccttcgaaggccaggcccatggcgccgaccgatcaggaaaggacggagttatgggaatgaacagtattgaacctgcaaaggaaacaaccactaacgtctag

SEQ ID NO: 104461 - DNA, 1236 bp, Artificial Sequence
  derived and/or modified sequence
atgctgctgcggcggcggaacagcatgctgatcgtgaacctgctggctgctacaggaggatgcctcatggggctgtgcaagatcgcagaaagtgttgagatgctcatactgggaagactcgtgatcgggcttttctgcggactgtgcaccggattcgtcccaatgtatatcggtgagataagccctacagccctgagaggggcctttgggaccttaaatcagcttggtatagtaattggcatcctcgtggcacagatttttggcctggagttgattctcggctccgaagagctgtggccagtgttgctcggattcaccattctgcccgccatattgcagtccgctgctctgccctgttgccctgagagccctcggttcttgctaatcaaccgaaaaaaggaggagaacgcaactcgcatcttacaacggttgtggggaacccaggatgtatctcaggatattcaggaaatgaaggatgaaagcgcacgtatgtcacaagaaaagcaggtgaccgttctggaattattccgagtgtcctcttacagacagccaattattatttcaatcgtcttacagttgtctcaacagctgagcggaatcaacgcggttttctactacagtaccggcattttcaaagatgccggcgttcagcagccaatttacgctacgattagcgccggcgtagttaataccatctttactttactttctctgttcctcgttgaacgtgccggccgccggaccctgcacatgatcgggctgggaggcatggctttttgctctacgttgatgacagtgagtttactgctgaaaaaccattataatgggatgagcttcgtgtgcattggtgcaatcttagtgttcgtcgcatgctttgagataggccccggcccgattccctggtttatagtagcagaattattttcccagggccctcgcccggctgccatggctgtcgcgggctgctctaattggacaagcaattttctcgtcgggcttctgttcccttcagctgcttactacctgggcgcatatgtcttcataattttcactggttttcttattaccttcttggccttcacgttctttaaagtccccgagactcgaggcaggacttttgaagacataacccgcgccttcgagggccaggcacacggtgccgacagatcaggtaaagacggcgtgatgggcatgaatagcattgaaccagctaaggagacaactacaaacgtctag

SEQ ID NO: 104462 - DNA, 1236 bp, Artificial Sequence
  derived and/or modified sequence
atgcttctaaggagaaggaactctatgctgattgtgaacctcctggctgcgactggcggttgcctgatgggactttgcaagattgcggaaagcgtggagatgctgatcctcggaaggctcgttatcggcctgttctgtggactttgtaccgggttcgtcccaatgtatattggcgagatttccccaaccgccctgcggggtgccttcgggaccttgaaccagctcgggattgtaatcgggatactcgtcgcccagatcttcggcctggagctcatactgggaagcgaagaactctggccagttctactgggattcaccattctgcccgcaattctgcagagcgctgccctgccctgctgtccagaatcaccgagatttctcttaattaataggaagaaagaggagaatgccacgagaatactgcaacgcctgtggggaacccaagacgtgtcccaggacatacaagagatgaaagacgagagtgctagaatgagtcaggagaaacaggtcaccgttctcgagctgttccgggtaagttcttatcggcagcccatcatcatcagtattgtcctccagctgagccaacagctgtccggcattaatgccgtgttctattattctacagggattttcaaagacgcaggcgtccagcagcccatctatgccacaatatcggctggcgtagtgaacaccatattcactttattatccctcttcctggtggaaagggcaggtcggaggaccttgcacatgattggactcggcggtatggccttttgctccaccctgatgacggtctccctgctgctcaaaaaccactacaatgggatgagttttgtctgtatcggtgcaatcctagtattcgtcgcctgttttgaaatcggccctggtccgatcccctggttcatcgttgcggaacttttcagtcagggccctaggcctgcagctatggccgtggcgggttgttcaaattggacatctaatttcctggtaggccttctgttcccctcagctgcctattacctcggggcatacgtgttcataatatttacagggttcctaattaccttcctggcgttcacgttctttaaggtgccagagaccagagggagaaccttcgaggacattacaagagcctttgagggccaggctcatggagccgacaggagcgggaaagatggagtaatgggaatgaacagcatcgagccagcgaaagagacaacaacaaatgtttag

SEQ ID NO: 104463 - DNA, 486 bp, Artificial Sequence
  derived and/or modified sequence
atgattgggttagggggtatggccttctgtagtacccttatgaccgtctcactgctgcttaagaatcactacaacggcatgtcctttgtgtgtattggcgctattctggtgttcgttgcttgcttcgaaattggacccggtcctatcccttggttcatcgtcgctgagctcttctcacaggggccacgaccagcagctatggcagtggccggatgtagtaactggactagtaatttcctcgtggggctgctcttccccagtgcagcttactacctgggggcttatgtatttattattttcactggtttcctcatcacgttccttgcctttacctttttcaaggttccagagaccagaggacgaactttcgaggatataacacgggctttcgaagggcaggcgcatggtgccgaccggtccgggaaggacggagtaatgggtatgaactcgatcgagcctgctaaggagaccactactaatgtgtag

SEQ ID NO: 104464 - DNA, 1236 bp, Artificial Sequence
  derived and/or modified sequence
atgctgctgagaaggcgcaattccatgctcatagtgaatctgttggccgcaacaggaggctgtcttatgggcttatgtaagattgccgagtccgtggagatgttgatccttgggaggctcgtcattgggctgttttgcggcttgtgcactggcttcgtacctatgtatattggcgagatctctccaacagcacttagaggcgcattcgggaccttgaatcagctgggcatcgtgatcggcatcctggtggcacagatcttcggattagagctcattctagggtctgaagagttatggccggttctgcttggtttcaccatactgcctgcaatcctccagtccgccgcactaccttgctgtccagaaagtccaaggttccttttgataaaccggaaaaaagaggagaatgcaacgcgtatcttgcagagactttggggcactcaggatgtctcacaggatatccaagaaatgaaggatgagtctgctaggatgtctcaggagaagcaagtgaccgttctggagctgttcagggtgtcatcatatagacagcccatcataatcagcatagtgcttcaattgtctcaacaactgtctggcataaacgccgttttttactatagtaccggaatttttaaagatgccggagtgcaacagcctatctatgccaccatctccgctggtgtggttaataccatatttacactactctcgcttttccttgtggagcgagccggaagaaggacactgcacatgatcgggcttggcggaatggctttttgtagtaccctgatgacagtgtcgctacttttgaaaaatcactacaatggaatgagcttcgtgtgcataggggctatccttgtattcgtggcttgttttgagattggcccaggacccatcccatggttcattgtcgccgagctatttagccaggggcctcggccagcagcaatggcagtggccggttgctccaattggacatctaacttcctggtggggttgctttttccctctgctgcatattacttgggagcctacgtgttcattatctttactggctttctgatcactttccttgctttcaccttttttaaagtgccagagactagaggaagaacgtttgaggatataactagggcctttgagggacaggcgcacggcgctgataggtcaggtaaagacggagttatggggatgaacagtattgagccagccaaagagaccactaccaatgtatag

SEQ ID NO: 104465 - DNA, 1732 bp, Artificial Sequence
  derived and/or modified sequence
gttgagcgaagccgcggggcccaaccgcagtcgcggggtctgggaggaagcagtaccttgaagagaaattggagagggagtcaattcctaggatagcagagagatggacaacagacagaatgtcaccccagctctgatctttgccatcacagttgctacaatcggctctttccagtttggctacaacactggggtcatcaatgctcctgagacggcgcaattcaatgctgattgtcaacctgttggctgccactggtggctgccttatgggactgtgtaaaatagctgagtcagttgaaatgctgatcctgggccgcttggttattggcctcttctgcggactctgcacaggttttgtgcccatgtacattggagagatctcgcctactgccctgaggggtgcctttggcactctcaaccagctgggcatagttattggaattctggtggcccagatctttggtctggaactcatccttgggtctgaagagctatggccggtgctattaggctttaccatccttccagctatcctgcaaagtgcagcccttccatgttgccctgaaagtcccagatttttgctcattaacagaaaaaaagaggagaatgctacgcggatcctccagcggttgtggggcacccaggatgtatcccaagacatccaggagatgaaagatgagagtgcaaggatgtcacaagaaaagcaagtcaccgtgctggagctctttagagtgtccagctaccgacagcccatcatcatttccattgtgctccagctctctcagcagctctctgggatcaatgctgtgttctattactcaacaggaatcttcaaggatgcaggtgttcaacagcccatctatgccaccatcagcgcgggtgtggttaatactatcttcactttactttctctatttctggtggaaagggcaggaagaaggactctgcatatgataggccttggagggatggctttttgttccacgctcatgactgtttctttgttattaaagaatcactataatgggatgagctttgtctgtattggggctatcttggtctttgtggcctgttttgaaattggaccaggccccattccctggtttattgtggccgaactcttcagccagggcccccgcccagctgcgatggcagtggccggctgctccaactggacctccaacttcctagtcggattgctcttcccctctgctgcttactatttaggagcctacgtttttattatcttcaccggcttcctcattaccttcttggcctttaccttcttcaaagtccctgagacccgtggcaggacttttgaggatatcacacgggcctttgaagggcaggcacacggtgcagatagatctgggaaggacggcgtcatggggatgaacagcatcgagcctgctaaggagaccaccaccaatgtctaagtcatgcctccttccacctccctcccggcatgggaaagccacctctccctcaacaagggagagactttatcaggatgaacccaggactgcttctgaatgctgctacttgatttctttctcatcccacgcactccatgagcaccccaaggctgcagtttgttggatcttcaatggctttttaaattttatttcctggacatcctcttctgcttaggagagaccgagtgaacctaccttcatttcaggagggattggccgcttggcacatgacaactttgccagcttttcctcccttg

SEQ ID NO: 104466 - DNA, 1650 bp, Artificial Sequence
  derived and/or modified sequence
gtatctttgaaaatagatacgttcacaccctcctaacggcggcgccaagggtggtgggtcccaaaactgtttccccgtaaagagttcccccgcccggtcgcaggaagacgcctgagggggcgctcggagggatccccagcagccgccggggctggaccgtgcggtgcgcaggtgagaagccgggaggggccggacaaccccgaccgcgagccggacccctgctctgaccgcaggtgttctattactcaacaggaatcttcaaggatgcaggtgttcaacagcccatctatgccaccatcagcgcgggtgtggttaatactatcttcactttactttctctatttctggtggaaagggcaggaagaaggactctgcatatgataggccttggagggatggctttttgttccacgctcatgactgtttctttgttattaaagaatcactataatgggatgagctttgtctgtattggggctatcttggtctttgtggcctgttttgaaattggaccaggccccattccctggtttattgtggccgaactcttcagccagggcccccgcccagctgcgatggcagtggccggctgctccaactggacctccaacttcctagtcggattgctcttcccctctgctgcttactatttaggagcctacgtttttattatcttcaccggcttcctcattaccttcttggcctttaccttcttcaaagtccctgagacccgtggcaggacttttgaggatatcacacgggcctttgaagggcaggcacacggtgcagatagatctgggaaggacggcgtcatggggatgaacagcatcgagcctgctaaggagaccaccaccaatgtctaagtcatgcctccttccacctccctcccggcatgggaaagccacctctccctcaacaagggagagactttatcaggatgaacccaggactgcttctgaatgctgctacttgatttctttctcatcccacgcactccatgagcaccccaaggctgcagtttgttggatcttcaatggctttttaaattttatttcctggacatcctcttctgcttaggagagaccgagtgaacctaccttcatttcaggagggattggccgcttggcacatgacaactttgccagcttttcctcccttgggttctgatattgccgcactagaggatataggagaggaaaagtaaggtgcagttgccccaacctcagacttaccaggaagcagatacatatgagtgtggaagccggagggtgtttatgtaagagcaccttcctcacttccatacagctctacgcggcaaattaacttgagttttatttatcttatcctctggtttaattacataaatatttattttttaagtgtaattttgccaaataataaaaacagaaggaaattgagattagagggaggtgtttaaagagaggttatagagtaaaagatttgatgctggagaggttaaggtgcaataagaattcagggagaaatgttgttcattattggagggtaaatgatgtggtgcctgaggtctgtacattacctcttaacaatttctgtccttcagatggaaactctttgatttctcagaaaagttgtatgcctatttaataaagctactcatttcctttggaa

SEQ ID NO: 104467 - DNA, 1613 bp, Artificial Sequence
  derived and/or modified sequence
aggtcaccccagctctgatctttgccatcacagttgctacaatcggctctttccagtttggctacaacactggggtcatcaatgctcctgagacggcgcaattcaatgctgattgtcaacctgttggctgccactggtggctgccttatgggactgtgtaaaatagctgagtcagttgaaatgctgatcctgggccgcttggttattggcctcttctgcggactctgcacaggttttgtgcccatgtacattggagagatctcgcctactgccctgaggggtgcctttggcactctcaaccagctgggcatagttattggaattctggtggcccagatctttggtctggaactcatccttgggtctgaagagctatggccggtgctattaggctttaccatccttccagctatcctgcaaagtgcagcccttccatgttgccctgaaagtcccagatttttgctcattaacagaaaaaaagaggagaatgctacgcggatcctccagcggttgtggggcacccaggatgtatcccaagacatccaggagatgaaagatgagagtgcaaggatgtcacaagaaaagcaagtcaccgtgctggagctctttagagtgtccagctaccgacagcccatcatcatttccattgtgctccagctctctcagcagctctctgggatcaatgctgtgttctattactcaacaggaatcttcaaggatgcaggtgttcaacagcccatctatgccaccatcagcgcgggtgtggttaatactatcttcactttactttctctatttctggtggaaagggcaggaagaaggactctgcatatgataggccttggagggatggctttttgttccacgctcatgactgtttctttgttattaaagaatcactataatgggatgagctttgtctgtattggggctatcttggtctttgtggcctgttttgaaattggaccaggccccattccctggtttattgtggccgaactcttcagccagggcccccgcccagctgcgatggcagtggccggctgctccaactggacctccaacttcctagtcggattgctcttcccctctgctgcttactatttaggagcctacgtttttattatcttcaccggcttcctcattaccttcttggcctttaccttcttcaaagtccctgagacccgtggcaggacttttgaggatatcacacgggcctttgaagggcaggcacacggtgcagatagatctgggaaggacggcgtcatggggatgaacagcatcgagcctgctaaggagaccaccaccaatgtctaagtcatgcctccttccacctccctcccggcatgggaaagccacctctccctcaacaagggagagactttatcaggatgaacccaggactgcttctgaatgctgctacttgatttctttctcatcccacgcactccatgagcaccccaaggctgcagtttgttggatcttcaatggctttttaaattttatttcctggacatcctcttctgcttaggagagaccgagtgaacctaccttcatttcaggagggattggccgcttggcacatgacaactttgccagcttttcctcccttg

SEQ ID NO: 104468 - DNA, 1236 bp, Artificial Sequence
  derived and/or modified sequence
atgctgctgagaagaagaaacagcatgctgatcgtgaacctgctggccgccaccggcggctgcctgatgggcctgtgcaagatcgccgagagcgtggagatgctgatcctgggcagactggtgatcggcctgttctgcggcctgtgcaccggcttcgtgcccatgtacatcggcgagatcagccccaccgccctgagaggcgccttcggcaccctgaaccagctgggcatcgtgatcggcatcctggtggcccagatcttcggcctggagctgatcctgggcagcgaggagctgtggcccgtgctgctgggcttcaccatcctgcccgccatcctgcagagcgccgccctgccctgctgccccgagagccccagattcctgctgatcaacagaaagaaggaggagaacgccaccagaatcctgcagagactgtggggcacccaggacgtgagccaggacatccaggagatgaaggacgagagcgccagaatgagccaggagaagcaggtgaccgtgctggagctgttcagagtgagcagctacagacagcccatcatcatcagcatcgtgctgcagctgagccagcagctgagcggcatcaacgccgtgttctactacagcaccggcatcttcaaggacgccggcgtgcagcagcccatctacgccaccatcagcgccggcgtggtgaacaccatcttcaccctgctgagcctgttcctggtggagagagccggcagaagaaccctgcacatgatcggcctgggcggcatggccttctgcagcaccctgatgaccgtgagcctgctgctgaagaaccactacaacggcatgagcttcgtgtgcatcggcgccatcctggtgttcgtggcctgcttcgagatcggccccggccccatcccctggttcatcgtggccgagctgttcagccagggccccagacccgccgccatggccgtggccggctgcagcaactggaccagcaacttcctggtgggcctgctgttccccagcgccgcctactacctgggcgcctacgtgttcatcatcttcaccggcttcctgatcaccttcctggccttcaccttcttcaaggtgcccgagaccagaggcagaaccttcgaggacatcaccagagccttcgagggccaggcccacggcgccgacagaagcggcaaggacggcgtgatgggcatgaacagcatcgagcccgccaaggagaccaccaccaacgtgtag

SEQ ID NO: 104469 - DNA, 486 bp, Artificial Sequence
  derived and/or modified sequence
atgatcggcctgggcggcatggccttctgcagcaccctgatgaccgtgagcctgctgctgaagaaccactacaacggcatgagcttcgtgtgcatcggcgccatcctggtgttcgtggcctgcttcgagatcggccccggccccatcccctggttcatcgtggccgagctgttcagccagggccccagacccgccgccatggccgtggccggctgcagcaactggaccagcaacttcctggtgggcctgctgttccccagcgccgcctactacctgggcgcctacgtgttcatcatcttcaccggcttcctgatcaccttcctggccttcaccttcttcaaggtgcccgagaccagaggcagaaccttcgaggacatcaccagagccttcgagggccaggcccacggcgccgacagaagcggcaaggacggcgtgatgggcatgaacagcatcgagcccgccaaggagaccaccaccaacgtgtag

SEQ ID NO: 104470 - protein, 535 aa, Artificial Sequence
  derived and/or modified sequence
MQRLQLLRVEVLLGVKQGDEMRHFFFSSQTSTLEKSQNGGVGEEVTPALIFAITVATIGSFQFGYNTGVINAPETIIKEFINKTLTDKANAPPSEVLLTNLWSLSVAIFSVGGMIGSFSVGLFVNRFGRRNSMLIVNLLAATGGCLMGLCKIAESVEMLILGRLVIGLFCGLCTGFVPMYIGEISPTALRGAFGTLNQLGIVIGILVAQIFGLELILGSEELWPVLLGFTILPAILQSAALPCCPESPRFLLINRKKEENATRILQRLWGTQDVSQDIQEMKDESARMSQEKQVTVLELFRVSSYRQPIIISIVLQLSQQLSGINAVFYYSTGIFKDAGVQQPIYATISAGVVNTIFTLLSLFLVERAGRRTLHMIGLGGMAFCSTLMTVSLLLKNHYNGMSFVCIGAILVFVACFEIGPGPIPWFIVAELFSQGPRPAAMAVAGCSNWTSNFLVGLLFPSAAYYLGAYVFIIFTGFLITFLAFTFFKVPETRGRTFEDITRAFEGQAHGADRSGKDGVMGMNSIEPAKETTTNV

SEQ ID NO: 104471 - protein, 161 aa, Artificial Sequence
  derived and/or modified sequence
MIGLGGMAFCSTLMTVSLLLKNHYNGMSFVCIGAILVFVACFEIGPGPIPWFIVAELFSQGPRPAAMAVAGCSNWTSNFLVGLLFPSAAYYLGAYVFIIFTGFLITFLAFTFFKVPETRGRTFEDITRAFEGQAHGADRSGKDGVMGMNSIEPAKETTTNV

SEQ ID NO: 104472 - DNA, 1608 bp, Artificial Sequence
  derived and/or modified sequence
atgcagaggttgcagctattgagggtagaagtgctgctgggggtcaagcaaggcgatgaaatgcggcatttttttttttccagtcagacaagcaccctagagaagagccagaacggaggagtcggtgaagaggtcacccccgctctgatctttgctatcaccgtagctactattgggtcgttccaattcggctataacacgggagtgatcaacgcacccgagacaattattaaagagttcatcaacaaaacactcaccgataaggccaatgcgcctccctctgaggtgttgctgaccaacctgtggtctctcagcgtggccattttttctgtgggaggcatgataggatccttctccgtgggcctgtttgtgaatcggtttggacggcgtaacagtatgctcattgtcaacctgctggccgctactggaggctgcctgatgggactatgtaagattgccgaaagcgtggaaatgctgatactgggtcgtctggtgattggactcttctgtgggctttgcaccggctttgttccgatgtatataggagaaatttccccaaccgcactcagaggtgcatttgggaccctcaatcagctgggaattgtgattggaattttggtagcccaaatctttggtctggagttaatcctgggatcggaggagctatggcccgttctcctggggtttaccatcctacccgcaatcttgcagtccgcagctttgccttgttgtcccgagtctccgcgcttcctcctcatcaatagaaaaaaggaagagaatgcaactaggatcttacagaggctgtggggaacgcaagatgtcagtcaagatattcaagaaatgaaagacgaaagtgctcgcatgagtcaggaaaagcaggtaacggtgttagagctgtttagggtctcctcctatcggcagcctattattataagcatcgtcctgcagttatcacagcagctgagcggaatcaatgccgtattctattattccactggaattttcaaagatgctggggtccagcagcctatttatgctactatcagcgccggggtggtcaacacgatcttcactttgctgtccctcttcctggtcgagagggctggacgaaggacactgcacatgattggactgggaggaatggcattctgttcaactctgatgaccgtgtcgttgctcctcaaaaaccactataacggtatgagctttgtgtgcataggtgccattctggtgttcgtggcatgctttgagatcggcccaggacccatcccctggttcatcgtggccgaattgttttcccagggccccagaccagctgcgatggcagtagccgggtgtagtaactggacttccaactttctggttgggctcttgttcccgagtgccgcttactacttgggggcctatgtgttcataatcttcactgggttcctgatcacctttctggcttttacattttttaaggttcccgagacgcggggcagaaccttcgaagatattacgcgtgccttcgagggacaggcccacggcgccgataggtcggggaaagacggggtgatgggaatgaatagcatcgaacctgcgaaagagaccaccacaaatgtttag

SEQ ID NO: 104473 - DNA, 1608 bp, Artificial Sequence
  derived and/or modified sequence
atgcagaggctgcagctgctgcgggtggaggtgctgctgggcgtgaagcagggagatgagatgaggcacttcttcttcagcagccagaccagcaccctggagaagagccagaatggaggagtgggggaggaggtgaccccagccctgatctttgccatcaccgtggccaccatcggcagcttccagtttggctacaacacaggagtcatcaatgcccctgagaccatcatcaaggagttcatcaacaagaccctgacagacaaggccaatgccccacccagcgaggtgctgctgaccaacctgtggagcctgtctgtggccatcttctctgtgggcggcatgattggcagcttctctgtgggcctgtttgtgaacagatttggaagaagaaacagcatgctgattgtgaacctgctggccgccaccggcggctgcctgatgggcctgtgcaagattgctgagagcgtggagatgctgatcctgggccgcctggtgattggcctcttctgtggcctgtgcaccggctttgtgcccatgtacatcggggagatcagccccacagccctgcggggggccttcggcaccctgaaccagctgggcatcgtgattggcatcctggtggcccagatcttcggcctggagctgatcctgggcagcgaggagctgtggcctgtgctgctgggcttcaccatcctgcctgccatcctgcagagcgctgccctgccctgctgcccagagagcccccgcttcctgctgatcaacaggaagaaggaggagaatgccacccgcatcctgcagaggctgtggggcacccaggatgtgtcccaggacatccaggagatgaaggatgaaagtgccaggatgagccaggagaagcaggtgacagtgctggagctgttccgggtgagcagctaccggcagcccatcatcatcagcatcgtgctgcagctgagccagcagctgagcggcatcaatgctgtgttctactacagcacaggcatcttcaaggatgctggggtgcagcagcccatctatgccaccatctctgctggggtggtgaacaccatcttcaccctgctgagcctcttcctggtggagcgggccggccgccgcaccctgcacatgattggcctgggcggcatggccttctgcagcaccctgatgacagtgtccctgctgctgaagaaccactacaacggcatgagctttgtgtgcatcggggccatcctggtgtttgtggcctgctttgagatcggccctggccccatcccctggttcatcgtggccgagctgttcagccagggccccaggcctgctgccatggctgtggccggctgcagcaactggaccagcaacttcctggtgggcctgctcttccccagcgctgcctactacctgggcgcctacgtgttcatcatcttcaccggcttcctgatcaccttcctggccttcaccttcttcaaggtgcctgagacccggggccgcacctttgaggacatcacccgggcctttgagggccaggcccatggagctgacagaagtggcaaggatggagtgatgggcatgaacagcattgaaccagccaaggagaccaccaccaacgtgtag

SEQ ID NO: 104474 - DNA, 1608 bp, Artificial Sequence
  derived and/or modified sequence
atgcagcggctgcagctgctgcgggtggaggtgctgctgggcgtgaagcagggagacgagatgcgtcattttttcttcagctcacagaccagcaccctggagaaatcccagaacggcggagtgggcgaggaggtcacgccagctctcatatttgctataactgtcgcaaccataggctcctttcagtttggctacaataccggggtgatcaacgcccctgagacgattatcaaagaatttatcaacaagacattaacagacaaggctaatgcaccaccatcagaagtgctcctgaccaacctgtggtcactttccgtggcaatcttcagcgtgggcggaatgattggttcgtttagtgtagggctcttcgtgaatagattcggaagacggaattctatgcttattgtgaatctgctagccgctaccggaggatgcttaatgggactttgcaagatcgccgagagtgtggagatgctgattctgggtcgtctggtcatagggctgttctgcgggctatgcacgggtttcgtgccaatgtatataggcgagatctcccctacagccttacgcggagcattcgggaccctaaatcagctcggtattgttatcgggatcttagtggctcagattttcggtctcgaacttatcctgggttcagaagagctttggccggtattattgggattcacgatacttcccgccatcctgcagtccgccgccctcccgtgctgtcccgagtctccacggttcctccttattaataggaagaaagaagaaaacgccactagaatcctgcagcgactgtggggcacacaggatgtctctcaagacattcaggagatgaaggacgagagcgcccgtatgagtcaagaaaaacaagttaccgtgttggagctgtttagggtctcctcgtaccggcaacccataattatcagtatagtgcttcagttgtcccagcagttatcaggaattaacgcggttttctactattctaccggtatctttaaagatgctggcgtgcagcaacccatttacgcaacgatttctgcaggcgtggtgaacaccatctttacactgctgagtctgtttttggtggaaagggccggcaggaggaccctgcacatgataggactgggggggatggccttctgctccactcttatgacagtctcccttctgctcaagaaccactacaatggcatgtcatttgtatgcatcggcgcaatccttgtgtttgtggcttgtttcgagattggtccgggaccaatcccctggttcattgtggcggagctttttagtcaggggcctcgcccagcagccatggcagtggcgggctgcagtaactggacctccaacttcttagtcgggcttcttttcccctctgccgcatactacttgggggcatacgttttcatcatcttcacaggttttctcattacctttctggcttttacattctttaaggtgcctgaaacaagggggcgtacttttgaggatattacacgagcctttgagggacaggctcacggggcagaccgatcaggaaaagatggggtgatgggcatgaattcaatcgagcctgcaaaggagaccacaaccaatgtctag

SEQ ID NO: 104475 - DNA, 1608 bp, Artificial Sequence
  derived and/or modified sequence
atgcagcgtctgcaactgctgagggtggaagtgttactaggggtcaaacagggggacgagatgaggcactttttctttagctcccagaccagtaccctggaaaagagccagaacggcggagtgggcgaggaggtcaccccagccctcatctttgccattactgtggccacaattggctctttccagtttggttacaacacaggtgtcatcaacgctccagagaccatcattaaggagttcatcaacaagactctcactgataaagccaatgcaccacctagtgaggtgctgctcaccaacctgtggtctctttccgtcgcaatcttcagcgttggaggcatgattggttcattttccgtggggctctttgtaaaccgatttggacgaaggaattccatgctgatcgtgaatctgctcgccgcaaccggcggttgtctgatgggactctgcaagattgctgagagcgtggaaatgcttatcttaggcaggctggtaataggacttttttgcggcctgtgcaccggctttgtgccaatgtacatcggagagatctctcccaccgccttaagaggtgcctttgggactctgaatcagctcggcatagtcattggcatcctggttgcccaaattttcgggcttgaactcattttgggaagtgaggagctatggcccgtccttcttggtttcactattctgcccgctatcctgcaatcagctgccctgccctgttgccctgagagccctcgttttctattgatcaacagaaaaaaggaggagaatgcaacaagaatcttgcagcgtctctgggggacgcaggatgtgagtcaggatatacaggaaatgaaggacgagagtgccaggatgtcccaggagaagcaggttacggtgctggagctctttcgagtctcatcttacaggcaaccaatcatcatctcgatcgttctccagctgtcccaacagctgagtggcatcaatgctgttttttattactctacgggcatctttaaagacgcaggggtacagcaacccatttacgctacgatttccgcaggcgttgtgaatacaatcttcacccttctctccctgttcctggtagagagggccggtcgtcgaactctccacatgattggcctgggaggcatggctttttgcagcactctcatgactgtgtctcttctcctcaagaaccactacaacggcatgagctttgtgtgcattggggcaatcttggtgttcgttgcatgtttcgaaataggcccagggccaattccttggttcatcgtggccgagctcttcagtcaaggccctcgaccagccgctatggcagtcgcgggatgctcgaattggacgtccaatttcctggtggggttactttttccctcagctgcttactatctgggcgcatacgtgttcataatcttcaccggcttcctgatcacttttctcgccttcacctttttcaaggtgcctgaaactcggggtagaacctttgaggatatcacacgagcatttgagggtcaggcccacggagccgatcgctcgggcaaagacggcgtgatgggcatgaactctatagagcccgcaaaggagactaccacaaacgtttag

SEQ ID NO: 104476 - DNA, 1873 bp, Artificial Sequence
  derived and/or modified sequence
acaacctgacttttgttcacaatgcaaagactccaactgttgagagtagaagtactcctgggtgtgaaacaaggagatgaaatgcggcatttctttttttcttctcagacctccactctggagaagagtcagaatgggggcgtcggggaggaggtcaccccagctctgatctttgccatcacagttgctacaatcggctctttccagtttggctacaacactggggtcatcaatgctcctgagacgatcataaaggaatttatcaataaaactttgacggacaaggcaaatgcccctccctctgaggtgctgctcacgaatctctggtccttgtctgtggccatattttccgtcgggggtatgatcggctccttttccgtcggactctttgttaaccgctttggcaggcgcaattcaatgctgattgtcaacctgttggctgccactggtggctgccttatgggactgtgtaaaatagctgagtcagttgaaatgctgatcctgggccgcttggttattggcctcttctgcggactctgcacaggttttgtgcccatgtacattggagagatctcgcctactgccctgaggggtgcctttggcactctcaaccagctgggcatagttattggaattctggtggcccagatctttggtctggaactcatccttgggtctgaagagctatggccggtgctattaggctttaccatccttccagctatcctgcaaagtgcagcccttccatgttgccctgaaagtcccagatttttgctcattaacagaaaaaaagaggagaatgctacgcggatcctccagcggttgtggggcacccaggatgtatcccaagacatccaggagatgaaagatgagagtgcaaggatgtcacaagaaaagcaagtcaccgtgctggagctctttagagtgtccagctaccgacagcccatcatcatttccattgtgctccagctctctcagcagctctctgggatcaatgctgtgttctattactcaacaggaatcttcaaggatgcaggtgttcaacagcccatctatgccaccatcagcgcgggtgtggttaatactatcttcactttactttctctatttctggtggaaagggcaggaagaaggactctgcatatgataggccttggagggatggctttttgttccacgctcatgactgtttctttgttattaaagaatcactataatgggatgagctttgtctgtattggggctatcttggtctttgtggcctgttttgaaattggaccaggccccattccctggtttattgtggccgaactcttcagccagggcccccgcccagctgcgatggcagtggccggctgctccaactggacctccaacttcctagtcggattgctcttcccctctgctgcttactatttaggagcctacgtttttattatcttcaccggcttcctcattaccttcttggcctttaccttcttcaaagtccctgagacccgtggcaggacttttgaggatatcacacgggcctttgaagggcaggcacacggtgcagatagatctgggaaggacggcgtcatggggatgaacagcatcgagcctgctaaggagaccaccaccaatgtctaagtcatgcctccttccacctccctcccggcatgggaaagccacctctccctcaacaagggagagactttatcaggatgaacccaggactgcttctgaatgctgctacttgatttctttctcatcccacgcactccatgagcaccccaaggctgcagtttgttggatcttcaatggctttttaaattttatttcctggacatcctcttctgcttaggagagaccgagtgaacctaccttcatttca

SEQ ID NO: 104477 - DNA, 1608 bp, Artificial Sequence
  derived and/or modified sequence
atgcagagactgcagctgctgagagtggaggtgctgctgggcgtgaagcagggcgacgagatgagacacttcttcttcagcagccagaccagcaccctggagaagagccagaacggcggcgtgggcgaggaggtgacccccgccctgatcttcgccatcaccgtggccaccatcggcagcttccagttcggctacaacaccggcgtgatcaacgcccccgagaccatcatcaaggagttcatcaacaagaccctgaccgacaaggccaacgccccccccagcgaggtgctgctgaccaacctgtggagcctgagcgtggccatcttcagcgtgggcggcatgatcggcagcttcagcgtgggcctgttcgtgaacagattcggcagaagaaacagcatgctgatcgtgaacctgctggccgccaccggcggctgcctgatgggcctgtgcaagatcgccgagagcgtggagatgctgatcctgggcagactggtgatcggcctgttctgcggcctgtgcaccggcttcgtgcccatgtacatcggcgagatcagccccaccgccctgagaggcgccttcggcaccctgaaccagctgggcatcgtgatcggcatcctggtggcccagatcttcggcctggagctgatcctgggcagcgaggagctgtggcccgtgctgctgggcttcaccatcctgcccgccatcctgcagagcgccgccctgccctgctgccccgagagccccagattcctgctgatcaacagaaagaaggaggagaacgccaccagaatcctgcagagactgtggggcacccaggacgtgagccaggacatccaggagatgaaggacgagagcgccagaatgagccaggagaagcaggtgaccgtgctggagctgttcagagtgagcagctacagacagcccatcatcatcagcatcgtgctgcagctgagccagcagctgagcggcatcaacgccgtgttctactacagcaccggcatcttcaaggacgccggcgtgcagcagcccatctacgccaccatcagcgccggcgtggtgaacaccatcttcaccctgctgagcctgttcctggtggagagagccggcagaagaaccctgcacatgatcggcctgggcggcatggccttctgcagcaccctgatgaccgtgagcctgctgctgaagaaccactacaacggcatgagcttcgtgtgcatcggcgccatcctggtgttcgtggcctgcttcgagatcggccccggccccatcccctggttcatcgtggccgagctgttcagccagggccccagacccgccgccatggccgtggccggctgcagcaactggaccagcaacttcctggtgggcctgctgttccccagcgccgcctactacctgggcgcctacgtgttcatcatcttcaccggcttcctgatcaccttcctggccttcaccttcttcaaggtgcccgagaccagaggcagaaccttcgaggacatcaccagagccttcgagggccaggcccacggcgccgacagaagcggcaaggacggcgtgatgggcatgaacagcatcgagcccgccaaggagaccaccaccaacgtgtag

SEQ ID NO: 104478 - protein, 204 aa, Artificial Sequence
  derived and/or modified sequence
MPILSSSGSKMAACGGTCKNKVTVSKPVWDFLSKETPARLARLREEHRVSILIDGETSDIYVLQLSPQGPPPAPPNGLYLARKALKGLLKEAEKELKKAQRQGELMGCLALGGGGEHPEMHRAGPPPLRAAPLLPPGARGLPPPPPPLPPPLPPRLREEAEEQESTCPICLGEIQNAKTLEKCRHSFCEGCITRALQVKKACPM

SEQ ID NO: 104479 - protein, 350 aa, Artificial Sequence
  derived and/or modified sequence
MPILSSSGSKMAACGGTCKNKVTVSKPVWDFLSKETPARLARLREEHRVSILIDGETSDIYVLQLSPQGPPPAPPNGLYLARKALKGLLKEAEKELKKAQRQGELMGCLALGGGGEHPEMHRAGPPPLRAAPLLPPGARGLPPPPPPLPPPLPPRLREEAEEQESTCPICLGEIQNAKTLEKCRHSFCEGCITRALQVKKACPMCGRFYGQLVGNQPQNGRMLVSKDATLLLPSYEKYGTIVIQYVFPPGVQGAEHPNPGVRYPGTTRVAYLPDCPEGNKVLTLFRKAFDQRLTFTIGTSMTTGRPNVITWNDIHHKTSCTGGPQLFGYPDPTYLTRVQEELRAKGITDD

SEQ ID NO: 104480 - DNA, 615 bp, Artificial Sequence
  derived and/or modified sequence
atgcccatcctgagcagttccggctccaagatggccgcctgcggagggacctgcaaaaataaggtcacagtgagcaagcctgtatgggattttctgtccaaggaaacaccggcccgcctggcacggcttagggaggaacatagagtaagtatcctgatcgacggcgagaccagcgacatctacgtgctgcaactgagcccccaaggacccccacccgctccaccaaatggcttgtacttagcccgcaaggcactcaaaggacttctgaaggaggctgaaaaagaactaaagaaagcgcaacgccagggagagctcatgggatgtctggctctgggaggaggtggagaacaccctgagatgcatagagctgggccaccgcccctacgagcagccccactgttgccacccggggctcgtgggctccccccccccccccctccactgcctcctccactccccccccgccttcgcgaagaggccgaggaacaagagtcaacctgtcctatctgccttggagaaattcaaaacgcaaagaccttggaaaagtgccgccatagcttctgtgaagggtgtattacacgggccttgcaggtgaagaaggcatgtcccatgtag

SEQ ID NO: 104481 - DNA, 1053 bp, Artificial Sequence
  derived and/or modified sequence
atgcccatactctcctcgtcgggatctaaaatggctgcgtgcggcggcacctgtaagaataaggtgacagtctccaaaccagtttgggatttcctgagcaaggagacacctgctagactggctaggctgcgtgaggagcaccgcgtgtctattctcatcgatggcgaaaccagtgacatatacgtgctgcagctctcacctcaaggtccaccaccggcccctccaaacggcctgtacctcgccaggaaggcccttaagggcctgttaaaagaggccgaaaaagagttaaagaaggcgcagaggcagggagagttgatgggttgtctagcgctggggggtggcggggaacatcctgagatgcatcgtgcaggccccccacctctgcgggcagccccactgctgccccccggagcacggggtctgccccccccaccaccccctctccctcctcctctgcctcccagattacgagaagaggccgaagagcaggaaagtacttgccccatttgcctgggcgaaattcagaacgccaagactttagagaagtgccgccactcgttctgcgaggggtgcatcacgcgggctctgcaggtgaaaaaggcctgtccaatgtgtggaagattttacggccaactagttggtaaccaacctcaaaacgggcgtatgctggtctctaaggatgcaaccctgctacttccttcctatgagaagtatggcaccattgttatccagtacgtgtttccacctggggtgcaaggtgccgagcaccctaaccccggggtgcggtatccaggaaccacccgcgtggcttatctgcccgactgtcctgaggggaacaaggttctgacgttgttccggaaagcttttgatcagcgactgacctttacaatcggaacaagtatgactactggccggcccaacgtgataacatggaatgatatccatcacaagacatcctgtacaggcggaccccagcttttcgggtacccagacccaacctatctgacccgcgtgcaggaggagctaagggcaaaaggcatcaccgacgattag

SEQ ID NO: 104482 - DNA, 615 bp, Artificial Sequence
  derived and/or modified sequence
atgcccatcctgagcagcagcggcagcaagatggccgcctgtggcggcacctgcaagaacaaggtgacagtgtccaagcctgtgtgggacttcctgagcaaggagaccccagcccggctggcccggctgcgggaggagcaccgggtgtccatcctgattgatggagagaccagtgacatctacgtgctgcagctgagcccccagggccccccaccagccccacccaacggcctgtacctggccaggaaggccctgaagggcctgctgaaggaggccgagaaggagctgaagaaggcccagaggcagggcgagctgatgggctgcctggccctgggcggcggcggggagcaccctgagatgcacagagctggccccccacccctgcgggccgcccccctgctgcccccaggggcccggggcctgcccccacctcctccacccctgcccccacccctgcccccccggctgcgggaggaggccgaggagcaggagagcacctgccccatctgcctgggggagatccagaatgccaagaccctggagaagtgccgccacagcttctgtgagggctgcatcacccgggccctgcaggtgaagaaggcctgccccatgtag

SEQ ID NO: 104483 - DNA, 1053 bp, Artificial Sequence
  derived and/or modified sequence
atgcccatcctgagcagcagcggcagcaagatggccgcctgtggcggcacctgcaagaacaaggtgacagtgtccaagcctgtgtgggacttcctgagcaaggagaccccagcccggctggcccggctgcgggaggagcaccgggtgtccatcctgattgatggagagaccagtgacatctacgtgctgcagctgagcccccagggccccccaccagccccacccaacggcctgtacctggccaggaaggccctgaagggcctgctgaaggaggccgagaaggagctgaagaaggcccagaggcagggcgagctgatgggctgcctggccctgggcggcggcggggagcaccctgagatgcacagagctggccccccacccctgcgggccgcccccctgctgcccccaggggcccggggcctgcccccacctcctccacccctgcccccacccctgcccccccggctgcgggaggaggccgaggagcaggagagcacctgccccatctgcctgggggagatccagaatgccaagaccctggagaagtgccgccacagcttctgtgagggctgcatcacccgggccctgcaggtgaagaaggcctgccccatgtgtggccgcttctacggccagctggtgggcaaccagccccagaatggaaggatgctggtgtccaaggatgccaccctgctgctgcccagctatgagaagtatggcaccatcgtcatccagtatgtgttccccccaggagtgcagggcgctgagcaccccaaccctggggtgcgctacccaggcaccaccagggtggcctacctgcctgactgcccagagggcaacaaggtgctgaccctcttcaggaaggcctttgaccagaggctgaccttcaccatcggcacctccatgaccaccggccggcccaacgtcatcacctggaatgacatccaccacaagaccagctgcacaggaggcccccagctgtttggctacccagaccccacctacctgaccagggtgcaggaggagctgcgggccaagggcatcacagatgactag

SEQ ID NO: 104484 - DNA, 615 bp, Artificial Sequence
  derived and/or modified sequence
atgcccatcctgagcagcagcggcagcaagatggccgcctgcggcggcacctgtaaaaataaggtgactgtgtcaaagcccgtatgggattttttaagtaaggaaactcctgcccgtttggcacgattgcgggaggaacacagagtgagcatcctcatcgatggcgaaacttctgacatatacgtgttgcagcttagccctcaggggccgccgccagccccaccaaatgggttgtatttggccaggaaggcgttgaagggcctactaaaagaggccgagaaggagctgaagaaggcccaaaggcaaggagaactcatgggttgtctggcactgggtggggggggcgagcatccggagatgcaccgcgccggcccaccacctctcagagctgcaccactcttgccccctggagctcgcggccttcccccaccacccccaccgctccccccccctctgccccctaggctaagggaggaagcggaggaacaggaatcaacgtgtcccatctgtcttggggagattcaaaatgccaagacactggagaaatgccggcacagcttctgtgaaggctgcatcacccgcgcattgcaggtaaagaaggcgtgccccatgtag

SEQ ID NO: 104485 - DNA, 1053 bp, Artificial Sequence
  derived and/or modified sequence
atgcccatcctgagcagcagcggcagcaagatggccgcctgcggcggtacatgtaagaataaggtgactgtatcaaagccagtatgggatttcttgtctaaagagactcctgcccggctcgccaggcttagggaagagcatcgggtgtcgatccttatcgatggcgaaactagcgacatctacgttttgcagctttctcctcagggacctcctcctgcgccacccaatgggctgtatctcgcacgcaaagctctcaaaggactcctgaaggaggctgaaaaggagctgaagaaagcacaaagacagggcgaactgatgggatgtctggctctggggggcggcggggaacatccagagatgcaccgggccggtcctccccctttacgcgctgctcctctgttgccgccaggcgcgcgcgggctacctccaccccccccacccctgccacctcccctcccaccaaggttgcgagaggaagccgaggaacaagagagcacttgccctatctgcttgggagaaatccagaatgcgaagacactagagaaatgtcgccattctttctgtgagggatgtatcactcgtgctctgcaggtcaagaaagcctgtccaatgtgtggtcggttttacggtcaactcgtcggcaaccaaccccagaacggcaggatgcttgtgagcaaagacgcgactcttctcctgccttcttacgaaaagtacgggactatcgttattcagtatgtatttccacctggggtgcagggagccgaacatccaaacccaggtgtgcgatatcctggaacgacacgggtggcttatctgccagactgtcccgagggcaacaaggtgcttacgctgttcagaaaggcttttgatcagcggctaacttttactattggaaccagtatgactaccggtaggcccaatgtgataacatggaacgatatccaccataagacgtcttgcactggcggacctcagctgtttggataccccgaccctacttaccttacgagagtgcaagaggaactgcgggccaaggggatcaccgatgactag

SEQ ID NO: 104486 - DNA, 615 bp, Artificial Sequence
  derived and/or modified sequence
atgcctattttatcttcatccgggtccaagatggccgcatgcggaggcacgtgtaagaataaagtgactgtttccaagcccgtgtgggattttctaagcaaggaaacgccagccagacttgcaagactgcgcgaagagcacagagtgagcattctgattgacggcgagacgtctgatatttacgttctgcagctatctccgcagggccctccccctgcccctccaaatggtctgtatctggctcgcaaagccctgaaagggctgttgaaagaggcagagaaagagctgaagaaggcgcaacgacagggtgaacttatgggttgccttgccctgggcggagggggagagcatcccgagatgcaccgagcaggacccccacctctgagggcagcccctctgctgccaccaggggcacgcggtctgcctcccccaccacctcctctccccccacctttgcctcccagattgcgcgaggaagcagaagagcaggagtccacctgtcccatctgccttggcgaaatccagaacgcgaagaccttggaaaagtgccggcatagtttctgtgaagggtgcattactagggccctacaagtcaagaaagcctgccccatgtag

SEQ ID NO: 104487 - DNA, 1053 bp, Artificial Sequence
  derived and/or modified sequence
atgccgattctgtcttcatcgggttccaagatggccgcttgcgggggaacatgcaagaataaagttacagtgtcgaaacccgtgtgggactttctgtccaaagagacccccgctcggctggctcgcctgagggaggagcaccgcgtctcaatattaatagatggagagaccagcgatatctacgtgctgcagctgtccccccaggggccacctccagcacctccaaatggcctctacctcgcccgtaaggctctcaagggcttgttgaaggaagcagaaaaggagttgaaaaaagcacaacgacagggcgagctgatgggttgcctggctctgggcggaggtggcgagcacccagagatgcacagggccggtcctcccccactgcgagcggcacctctgctcccaccaggagccagaggattacctccgcctccccctcccttgcccccacccttacccccacgcctccgagaggaagccgaggaacaggagtcaacctgccccatctgtttaggcgagatccagaacgccaaaacactagaaaagtgcaggcactccttctgtgagggctgcattacccgcgcactccaggtgaaaaaggcctgccctatgtgtgggaggttctatgggcagctggtgggaaaccagcctcagaatggcagaatgctggtcagtaaggacgccactctgcttctgcctagttacgaaaaatatggcactatcgtgattcagtacgtattcccaccaggagtccaaggagcagaacatccgaatcctggcgtgcggtatccaggaaccacacgagtggcctatcttccagattgtcccgaggggaacaaagtgctcacattatttaggaaggccttcgaccagaggctgacgtttaccataggcaccagtatgaccactggtcggccaaacgtgattacctggaatgatatccaccacaaaacctcttgcacgggcggaccccagctgttcggttaccccgacccgacttatcttaccagggtgcaggaggaacttagagccaagggaattacggatgactag

SEQ ID NO: 104488 - DNA, 615 bp, Artificial Sequence
  derived and/or modified sequence
atgcccatcctgagcagcagcggcagcaagatggccgcctgcggcggcacctgcaagaacaaggtgaccgtgagcaagcccgtgtgggacttcctgagcaaggagacccccgccagactggccagactgagagaggagcacagagtgagcatcctgatcgacggcgagaccagcgacatctacgtgctgcagctgagcccccagggccccccccccgccccccccaacggcctgtacctggccagaaaggccctgaagggcctgctgaaggaggccgagaaggagctgaagaaggcccagagacagggcgagctgatgggctgcctggccctgggcggcggcggcgagcaccccgagatgcacagagccggccccccccccctgagagccgcccccctgctgccccccggcgccagaggcctgccccccccccccccccccctgcccccccccctgccccccagactgagagaggaggccgaggagcaggagagcacctgccccatctgcctgggcgagatccagaacgccaagaccctggagaagtgcagacacagcttctgcgagggctgcatcaccagagccctgcaggtgaagaaggcctgccccatgtag

SEQ ID NO: 104489 - DNA, 1053 bp, Artificial Sequence
  derived and/or modified sequence
atgcccatcctgagcagcagcggcagcaagatggccgcctgcggcggcacctgcaagaacaaggtgaccgtgagcaagcccgtgtgggacttcctgagcaaggagacccccgccagactggccagactgagagaggagcacagagtgagcatcctgatcgacggcgagaccagcgacatctacgtgctgcagctgagcccccagggccccccccccgccccccccaacggcctgtacctggccagaaaggccctgaagggcctgctgaaggaggccgagaaggagctgaagaaggcccagagacagggcgagctgatgggctgcctggccctgggcggcggcggcgagcaccccgagatgcacagagccggccccccccccctgagagccgcccccctgctgccccccggcgccagaggcctgccccccccccccccccccctgcccccccccctgccccccagactgagagaggaggccgaggagcaggagagcacctgccccatctgcctgggcgagatccagaacgccaagaccctggagaagtgcagacacagcttctgcgagggctgcatcaccagagccctgcaggtgaagaaggcctgccccatgtgcggcagattctacggccagctggtgggcaaccagccccagaacggcagaatgctggtgagcaaggacgccaccctgctgctgcccagctacgagaagtacggcaccatcgtgatccagtacgtgttcccccccggcgtgcagggcgccgagcaccccaaccccggcgtgagataccccggcaccaccagagtggcctacctgcccgactgccccgagggcaacaaggtgctgaccctgttcagaaaggccttcgaccagagactgaccttcaccatcggcaccagcatgaccaccggcagacccaacgtgatcacctggaacgacatccaccacaagaccagctgcaccggcggcccccagctgttcggctaccccgaccccacctacctgaccagagtgcaggaggagctgagagccaagggcatcaccgacgactag

SEQ ID NO: 104490 - DNA, 1331 bp, Artificial Sequence
  derived and/or modified sequence
ggaagggcaggggcttgcggatagaagggggtcaaaggaacggtgattatcacctgtgaggggaaagggggtgctgtcctccctccttcccttttcctcagcctgcaccccctgcaatcccccacctttcggggtctccccctccttgttgctaaggcccggaccgtcatcccagcaacagcctcagtcatgtgaccggcaatggcggcgctgacgagaggacttggacctaggacacctaggtcctgggtcccccgtgatggggagagaagtgttgcatcgcggatagactgtatgggctgagactctagggttccattttcacttatgaatctcgaggtgcatctggccttgggggacgatgatggaggcatgaagggacagctgctccttcttggatcagtcaataaatggaggtcacactaatggcccttctttctgtttgagctgcatttggaagtgttgtggagacagccccgtagcccaatgcgaccagactcagggaaaacatcaggcccctccagctgagcccttgtgtgagccccgcccctccctaaatgccagacttgggagctgacagacagcactgcctgtgctgggtttaaaagtcctggtcagctgagtggaaatagaaggatttctgctgccatcatcttccatgggctttccaggtcacacgacctacaagtagggagcagggaaagaagagtgagcctgcatgccaattctaagctcttcaggatcaaaaatggcagcctgtggaggcacctgcaagaacaaagtgactgtgtccaagcccgtgtgggacttcctgagcaaagagaccccagcccggctggcccggcttcgggaggagcaccgtgtgtccatcctcatagatggcgagacttctgacatctatgttctccagctttccccacagggtcctcccccggcccctccaaatgggctctacctagcccggaaggctctcaaggggctgctaaaagaggcagagaaagagctgaagaaagctcagaggcagggggagctgatgggctgcctggctctggggggtggaggggagcaccctgagatgcaccgcgcaggcccaccccctctccgagcagccccacttctgcccccaggagctcgggggctcccccctcctcctccccccctgcccccacctcttcctcctcgccttcgggaggaggcagaagagcaggagagcacctgccccatctgtctgggggagatccagaatgccaagacattggagaagtgccggcattcattctgcgagggctgcatcacccgggctctgcaggtgaaaaaggcctgccccatgt

SEQ ID NO: 104491 - DNA, 1840 bp, Artificial Sequence
  derived and/or modified sequence
ccggcaatggcggcgctgacgagagtcctggtcagctgagtggaaatagaaggatttctgctgccatcatcttccatgggctttccaggtcacacgacctacaagtagggagcagggaaagaagagtgagcctgcatgccaattctaagctcttcaggatcaaaaatggcagcctgtggaggcacctgcaagaacaaagtgactgtgtccaagcccgtgtgggacttcctgagcaaagagaccccagcccggctggcccggcttcgggaggagcaccgtgtgtccatcctcatagatggcgagacttctgacatctatgttctccagctttccccacagggtcctcccccggcccctccaaatgggctctacctagcccggaaggctctcaaggggctgctaaaagaggcagagaaagagctgaagaaagctcagaggcagggggagctgatgggctgcctggctctggggggtggaggggagcaccctgagatgcaccgcgcaggcccaccccctctccgagcagccccacttctgcccccaggagctcgggggctcccccctcctcctccccccctgcccccacctcttcctcctcgccttcgggaggaggcagaagagcaggagagcacctgccccatctgtctgggggagatccagaatgccaagacattggagaagtgccggcattcattctgcgagggctgcatcacccgggctctgcaggtgaaaaaggcctgccccatgtgcggccgcttctatgggcagctggtgggcaaccagccccagaatgggcggatgctggtctctaaggacgccaccctcctactgcccagctatgagaagtacggcaccattgtcatccagtacgtcttcccgcccggtgtccagggggctgaacacccaaacccaggagttcggtatcctggcaccacacgggtggcctacctcccggactgccctgagggcaacaaggtgctgaccctgttccgcaaggcgtttgaccagcgtctcaccttcactatcggcacgtccatgaccacagggagaccgaatgtcatcacctggaacgacatccaccacaagaccagctgcacagggggaccccagctgtttgggtacccagaccccacctacctgacccgggtgcaagaggagctgagagcgaagggtatcacagatgactgaaggacatcgcctttgccaaggcccctgctgtctgcctctactaggacccagcagaagcctctttctcctctctgccccctgccccccacaccacacctgtaggggacctgtctgactgggaagggagttccgagagggagggggcaatcccttcccccatcccccactggccaagtgtttcaatgcagtgtgagccactcccttctggcagaggccgacctccaaggctctgttctcccctccccgtgtacatatactcccggtttccctgcccctccattgcccttggctttttctggtatgtgctgtgctccacgaccaagccgagaaaggacctagggtggggaagggagggtctcttgattcctaaccgcccccacatactgctccaccgctgaacttcgggtgccggggaggagaaattgggctgatgtgagctccccgtcacccgccatggagccggctgtgtgtgttcatcagatacagttctcccttaaccttgtcctttctctcctgtgtctcagtctccgtcagtctgtctttctccgctcttctctgacccctgtgaggaacctccttaccctgttctggaatcgctgccagactgtagcttttaatttaataaaaataaagtaaaatatgcaactcttta

SEQ ID NO: 104492 - protein, 347 aa, Artificial Sequence
  derived and/or modified sequence
MSFVLSRMAACGGTCKNKVTVSKPVWDFLSKETPARLARLREEHRVSILIDGETSDIYVLQLSPQGPPPAPPNGLYLARKALKGLLKEAEKELKKAQRQGELMGCLALGGGGEHPEMHRAGPPPLRAAPLLPPGARGLPPPPPPLPPPLPPRLREEAEEQESTCPICLGEIQNAKTLEKCRHSFCEGCITRALQVKKACPMCGRFYGQLVGNQPQNGRMLVSKDATLLLPSYEKYGTIVIQYVFPPGVQGAEHPNPGVRYPGTTRVAYLPDCPEGNKVLTLFRKAFDQRLTFTIGTSMTTGRPNVITWNDIHHKTSCTGGPQLFGYPDPTYLTRVQEELRAKGITDD

SEQ ID NO: 104493 - protein, 49 aa, Artificial Sequence
  derived and/or modified sequence
MSFVLSRMAACGGTCKNKVTVSKPVWDFLSKETPARLARLREEHRVSIL

SEQ ID NO: 104494 - DNA, 1044 bp, Artificial Sequence
  derived and/or modified sequence
atgtccttcgtcctgtcaagaatggccgcctgtgggggcacatgtaagaataaagtaaccgtatccaagccagtgtgggacttcctttccaaagagacacccgcacgacttgctagactgagggaggaacaccgggtatcaattctgatcgacggcgaaacctctgacatttatgttctgcagttatccccccaggggccaccccccgcgcctccgaatggtctatacttggccagaaaagccctgaaagggctcctgaaagaggcagagaaggaactaaaaaaggctcagaggcagggcgagctcatgggctgtctggcactgggcggcggcggcgagcatccagagatgcatagggctggcccaccccccctcagggcagcccccttgcttccgcccggagccagaggactgcccccaccacctcctcctctcccaccccccctgcccccccgcctcagagaggaggctgaagagcaggaatccacatgtcctatctgcctcggagagatacaaaacgccaagaccctggagaaatgccggcatagcttttgcgaaggctgtattactcgggccctgcaagtaaagaaagcatgtccgatgtgcgggaggttctacggccagctggtcgggaatcagccacaaaatggacgtatgctcgtctccaaggatgccactctcctgcttccatcatacgagaagtatgggacaatcgtgattcaatatgtgttccctcccggggtgcaaggtgccgagcatccaaaccccggcgtgcgatatcctgggacaacaagagtcgcttacctccctgactgtcccgaaggtaataaagtactgaccctgttccgtaaagcttttgaccagcgactaacttttacgattggaacctcaatgaccaccggacggcctaacgttatcacctggaacgacatacaccataagacgagctgcactggcgggccccaattgtttggataccccgaccccacctatctgacacgggttcaagaggagttgcgagccaaaggcatcacagacgactag

SEQ ID NO: 104495 - DNA, 1044 bp, Artificial Sequence
  derived and/or modified sequence
atgtctttcgtattgagcagaatggctgcttgtggcggaacctgtaagaataaagttactgtgtcgaaacccgtgtgggactttctttccaaggagactcccgcacggttagcaaggctgcgcgaagagcaccgtgtgtcaattctgattgacggcgagactagtgatatatacgttctccagctctcaccccaaggacccccccccgctccccctaacggcttatacctcgcaagaaaggccttaaagggtctactgaaggaggctgagaaagaattgaaaaaggcgcagcggcagggagagctgatggggtgtctggccctaggaggcggcggtgagcatccagagatgcaccgcgccggtcccccaccgttaagagccgcaccattgcttccccccggagctagaggtttgcccccccccccacctcccctcccccctccactgccgccccggcttcgggaggaagcagaagaacaagaatccacgtgcccaatatgtttgggtgagattcaaaacgccaagacactcgaaaagtgtcgtcattcattctgtgagggctgtatcactcgggccctacaggtgaagaaggcctgtcccatgtgtggacgattttacggacagttggttggaaaccaaccacagaacggccggatgttggtgagcaaggatgccacgctgctactcccatcctacgaaaaatatggtacaattgtaatacagtacgtgtttcccccaggtgtgcagggtgcagagcaccccaacccgggagtgcgatacccgggaacaacacgcgtggcttacctgccagactgccccgagggaaacaaggtgctgacactgtttcggaaggccttcgatcagaggctaactttcaccattggcacgagcatgactactggacgaccaaatgtaataacctggaatgacattcaccataagaccagctgcacaggtggaccacaactgttcgggtacccagaccctacctatcttacgcgagtgcaagaggagctacgggccaagggtatcaccgatgattag

SEQ ID NO: 104496 - DNA, 1044 bp, Artificial Sequence
  derived and/or modified sequence
atgtcattcgttctcagtcgtatggcagcttgtggaggcacctgcaagaacaaggtgactgtatccaaaccagtatgggacttcctgagtaaggagactcctgcgcgcctggctcgattgcgtgaggagcatcgagtgtctatactcattgatggagagacctcagatatctacgtgctgcagttgagcccccaaggcccacctcctgcgcctcctaatggactatacctggccaggaaggctctgaaaggactgttaaaagaggctgagaaggagttgaagaaagcacagcgacagggtgagttaatggggtgtctggcgctaggaggcggaggagaacatcctgagatgcaccgagccggaccaccacccctgcgggccgccccactgcttccaccaggagcaaggggcttaccacctccacccccgccattaccgcccccacttcccccaaggctgcgggaagaggccgaagagcaggagagcacctgccccatctgcttaggcgagatccagaacgccaagacgctcgagaagtgtaggcattcgttttgcgagggttgcattacaagggccctccaagttaaaaaagcttgtccaatgtgtggacgcttctacggccagcttgtcggtaatcagccgcagaatggaaggatgctggtatctaaggacgccacactgcttcttccttcttacgagaagtatggcactattgtgatccagtacgtcttcccaccaggagtgcaaggggctgaacatcccaatccaggcgtgcggtatccaggtactacccgggttgcttatttacctgattgccccgagggcaacaaggtgcttaccctgtttagaaaggccttcgaccagcgactgacatttaccattgggacttccatgacgaccggccgacctaacgtcattacctggaacgacattcaccataaaaccagctgtactgggggtccacagctcttcggatacccagaccccacttacctcacgcgtgtccaggaagagctaagagctaaagggatcactgacgattag

SEQ ID NO: 104497 - DNA, 150 bp, Artificial Sequence
  derived and/or modified sequence
atgagcttcgtcctgagccggatggctgcctgcggcggaacgtgcaaaaacaaagtgaccgtctcaaaaccagtctgggacttcctcagcaaagagactccagcaaggcttgcaagactacgcgaagagcatagagtgtcaatcctgtag

SEQ ID NO: 104498 - DNA, 1044 bp, Artificial Sequence
  derived and/or modified sequence
atgagctttgtgctgagcaggatggccgcctgtggcggcacctgcaagaacaaggtgacagtgtccaagcctgtgtgggacttcctgagcaaggagaccccagcccggctggcccggctgcgggaggagcaccgggtgtccatcctgattgatggagagaccagtgacatctacgtgctgcagctgagcccccagggccccccaccagcccccccaaatggcctgtacctggccaggaaggccctgaagggcctgctgaaggaggccgagaaggagctgaagaaggcccagaggcagggcgagctgatgggctgcctggccctgggcggcggcggggagcaccctgagatgcaccgggccggccccccacccctgcgggccgcccccctgctgcccccaggggcccggggcctgcccccacctcctccacccctgcccccacccctgcccccccggctgcgggaggaggccgaggagcaggagagcacctgccccatctgcctgggggagatccagaatgccaagaccctggagaagtgccgccacagcttctgtgagggctgcatcacccgggccctgcaggtgaagaaggcctgccccatgtgtggccgcttctacggccagctggtgggcaaccagccccagaatggccgcatgctggtgtccaaggatgccaccctgctgctgcccagctatgagaagtatggcaccatcgtcatccagtatgtgtttcctcctggggtgcagggcgctgagcaccccaaccctggggtgcgctacccaggcaccaccagggtggcctacctgcctgactgcccagagggcaacaaggtgctgaccctcttcaggaaggcctttgaccagaggctgaccttcaccatcggcacctccatgaccaccggccggcccaacgtcatcacctggaatgacatccaccacaagaccagctgcaccggcggcccccagctgtttggctacccagaccccacctacctgaccagggtgcaggaggagctgcgggccaagggcatcacagatgactag

SEQ ID NO: 104499 - DNA, 150 bp, Artificial Sequence
  derived and/or modified sequence
atgagctttgtgctgagcaggatggccgcctgtggcggcacctgcaagaacaaggtgacagtgtccaagcctgtgtgggacttcctgagcaaggagaccccagcccggctggcccggctgcgggaggagcaccgggtgtccatcctgtag

SEQ ID NO: 104500 - DNA, 1044 bp, Artificial Sequence
  derived and/or modified sequence
atgagcttcgtgctgagccggatggccgcctgcggcggcacctgcaagaacaaagtgacagtgtccaaacccgtgtgggacttcctcagcaaggaaactcccgcccgcttggctaggctaagggaagagcatagggtgtccattctcattgatggcgaaacctcggatatctacgtgttacaactgagcccacagggcccgccccccgctcccccaaatggcctgtacctcgcgaggaaagccctgaagggtcttctcaaagaggcggaaaaggagctcaagaaggcccagcgtcagggagagttaatggggtgtctggcattagggggcggcggggaacatccggagatgcatcgggccggaccaccaccactaagagctgctccccttctcccacctggagcccgtggacttccccctccacccccaccccttcctcctcctctgccacctagactgagagaagaagctgaagaacaggagagtacttgtcccatttgcctgggagaaattcaaaatgcaaaaaccctcgagaaatgcagacactcattctgtgagggctgcatcacccgggctctccaagtcaagaaggcatgccctatgtgtggacggttctatggtcagctggtaggcaaccagcctcaaaacggacgaatgcttgtgtcaaaggacgctaccttgctgttgcccagctacgagaagtatggcacgattgttattcagtacgtattccctcccggggtgcagggtgctgagcacccaaatcctggagtgcgctatcctgggaccacacgggtggcatacttgccggactgccctgaaggaaataaggtactgacactctttcgcaaagcttttgaccaacgtttgaccttcacgattgggacatccatgaccaccggcaggccaaatgtgattacttggaacgacattcaccataagacttcttgtacaggaggcccccagctgttcggctatcctgaccccacatatcttacacgggtccaggaagaattgcgtgcaaaggggattaccgatgactag

SEQ ID NO: 104501 - DNA, 1044 bp, Artificial Sequence
  derived and/or modified sequence
atgagcttcgtgctgagccggatggccgcctgcggcggcacctgcaagaacaaggtgaccgtgtcaaaacccgtgtgggattttctttccaaagagacccctgcaaggttagctcggctgagagaggagcaccgcgtctccatactgatcgatggggagaccagtgatatctacgtcctgcagctcagtccacaaggtccgccacctgcaccccctaacgggctctaccttgcccgaaaggctctgaagggccttttgaaagaagctgaaaaggaattgaaaaaggctcagcgtcagggagaattgatggggtgccttgccctgggcggagggggtgagcaccccgagatgcaccgagccggcccacccccattgcgcgcagctcctcttctgccacctggcgctcggggcctgcctccacccccaccgcctctgccccctcccctgccaccgagactccgggaagaggccgaggagcaagaatctacatgtcccatctgtctcggtgagatccagaacgctaagaccttggaaaagtgccgccattcattctgtgagggatgcataacgcgcgcactgcaggttaaaaaagcatgtcctatgtgtggtaggttttacggacaacttgtgggaaaccaaccacagaacggtcggatgcttgtatctaaagatgccacactattactgccatcatatgagaaatatggtactattgttatccagtacgtatttcccccaggcgtgcaaggcgccgagcatcccaatccaggagtccgctatcccggaaccactagggtggcttacctgcccgactgtcctgaggggaacaaggttctgaccctttttagaaaagcgtttgaccaaaggctgacgttcaccataggaacatccatgaccacaggaaggcccaatgtcataacgtggaacgatatccaccataaaacatcatgcaccgggggaccgcagttattcggctatcccgaccctacataccttacaagggtgcaagaagagctgcgcgcgaaaggcatcacagatgactag

SEQ ID NO: 104502 - DNA, 1044 bp, Artificial Sequence
  derived and/or modified sequence
atgagcttcgtgctgagccggatggccgcctgcggcggcacctgcaagaacaaagtgactgtgagcaagcctgtgtgggacttcttatccaaggagacgcccgctcggctagcccgtctgcgggaggaacatcgggtcagtattctaatagatggagagactagtgacatatatgtattacagctctcacctcaggggcctccccctgctccgccaaatggcttgtatctggctcgtaaggccctgaagggactgctgaaggaggccgagaaagagctcaaaaaagcgcagagacagggagagctaatgggctgccttgctctgggaggagggggagaacaccccgagatgcatcgtgccggcccacccccacttcgggcagctcctttgttgccccctggcgcgaggggcctgcccccaccgccaccccctttaccacctcctctgcccccaagactccgggaggaggccgaggagcaggagtccacatgtcctatttgtttgggcgagatccaaaatgcaaaaactctcgaaaagtgccgccactcgttttgcgaaggatgcattactcgggccctgcaagtcaaaaaggcctgccctatgtgcggccgcttctatggccagctggtcgggaatcagccgcaaaacggacgcatgctggtgagcaaggatgcaactctcctcctgccatcctacgagaagtatgggacaatcgtcatccagtatgtgtttcctcccggtgtacagggcgcggaacatccaaatccgggggtcagataccccggcaccacccgagttgcttacctgcctgattgtcccgagggaaataaggtgttgacgctgttccgaaaggcgtttgaccagaggctcaccttcaccattgggaccagtatgaccaccggtagacccaacgtgatcacatggaacgacatacatcacaagacttcctgcactggaggcccgcagttgttcgggtacccagatcccacttacctcacccgcgtgcaggaggagctaagagccaaagggataacagacgattag

SEQ ID NO: 104503 - DNA, 150 bp, Artificial Sequence
  derived and/or modified sequence
atgagcttcgtgctgagccggatggccgcctgcggcggcacctgcaaaaacaaggttacagttagtaagccagtctgggatttcctctcaaaagagacacccgcaaggctggctcgactgcgtgaggagcatcgagtctccattctgtag

SEQ ID NO: 104504 - DNA, 1044 bp, Artificial Sequence
  derived and/or modified sequence
atgtccttcgttttgtctagaatggctgcttgcgggggaacctgcaaaaacaaagtgactgtgagcaaaccggtgtgggattttctatcaaaggaaacccccgcaagactggcaaggctgcgcgaagaacaccgggtgagtattctgatcgacggggaaacctctgacatctatgtcctgcagcttagtccacaagggccaccgcctgccccacccaatggactgtatctggccaggaaggctctgaagggcctgttaaaagaggcagaaaaggaactaaagaaagcccaaaggcagggagagcttatgggttgcctggctttgggtgggggaggcgagcaccccgaaatgcatagagcgggacctcctcccctgagggccgctccactgttacctcctggtgctcggggactgccccctccaccacctcccttgcctcctccattgcctccaagactgagagaggaggccgaggagcaggagtccacatgccccatatgtttaggtgaaattcagaatgcaaaaactctggaaaaatgcagacactccttttgcgaggggtgtattactcgggcactccaggtcaagaaggcttgtccaatgtgcggtcgcttctatggccagttggtcggaaaccaaccacagaacgggaggatgctcgtgagtaaggacgccactttgctgttgccctcgtatgaaaagtacggcactatcgtcatccaatacgtattcccacccggagtacaaggggctgagcatcccaatccaggggtccgctatcctggcaccacgcgcgtagcctacctccccgactgtcccgagggtaataaggtcctcacactgtttcgtaaagcctttgaccaaaggttgacattcactattggtacatctatgacaactggacggcctaacgtgatcacgtggaacgacatccaccacaagacatcatgcaccggaggcccacagctcttcggatatcccgatccgacctacctgaccagagtccaggaggagctgcgggcaaaagggattaccgatgattag

SEQ ID NO: 104505 - DNA, 1044 bp, Artificial Sequence
  derived and/or modified sequence
atgtcttttgttttgtcacggatggcagcctgtggaggtacatgcaaaaataaggtgactgtctctaagcccgtttgggacttcctgagcaaggagactcccgctagattggcaagattgagagaggagcaccgcgtaagcattttaattgacggcgaaacctccgacatctacgtcctccaactgtcccctcaaggcccaccgcctgcaccccctaatggtctgtacctagctaggaaggctcttaagggactcctaaaagaggcagagaaggagttgaaaaaggcccagcggcagggtgagctgatgggctgcttggctctgggaggcggtggcgaacatcctgagatgcaccgggcaggcccacccccactgcgagcagctcctctgctcccccctggagccagaggtctcccaccgcctccccctcctttgccgccacccctgccacctagactccgggaggaggcagaagagcaggagtcgacgtgccccatatgtctgggtgaaatacagaacgccaagacactggaaaagtgtcggcacagtttttgcgagggctgcattacacgcgctcttcaggtcaagaaggcatgccccatgtgtggacggttctatggccagctggtcggaaaccagccccagaacggcagaatgctggtgtccaaggacgccactctgttactcccttcttatgaaaagtatggaaccattgtgatccagtacgtatttcctccaggcgttcagggcgcagaacaccctaaccctggggtgcgctaccctggcacaacgcgcgtggcttacctgcccgattgcccggagggcaacaaagtgttaaccctgttccgcaaggccttcgaccagaggctgacctttacaatcgggacctcaatgacaaccggccgacctaacgtgatcacttggaatgatattcatcacaagactagctgtacagggggaccccaacttttcgggtatcctgaccccacgtatctgaccagagtccaggaagagttgcgagccaagggcataacggacgattag

SEQ ID NO: 104506 - DNA, 1044 bp, Artificial Sequence
  derived and/or modified sequence
atgtcattcgtgctctctaggatggcagcatgcggcggaacatgcaaaaataaggtaacagtgagtaagcctgtgtgggatttcctgagtaaagaaactcctgcccgtctggcgcgactccgggaagagcatcgtgtaagtatcctgatcgacggagaaaccagtgacatttatgtcttacagctcagcccccagggccctccaccggcaccgcctaatggcctctatctagcacgcaaggctcttaaaggccttctgaaagaggccgagaaagagttgaagaaggctcaaagacagggagaactcatgggttgcctggctcttgggggtggcggtgaacatcccgagatgcaccgggctgggcctccacctctaagggcagcgcctctgttaccccctggcgcaaggggccttccgccacccccaccaccgttgcccccacctcttcctccaaggcttcgcgaagaagcagaagagcaggaaagcacatgccctatctgcctgggagagatccagaatgctaagactcttgagaaatgtcgtcactctttctgcgaaggctgcatcacccgagcactccaggtgaaaaaagcatgccctatgtgtggcaggttctacgggcaactggtgggaaatcagccccaaaacggaagaatgctggtgagtaaagatgccaccttacttttgccatcgtatgagaagtatggcactatcgtaattcaatatgtatttcccccaggggttcagggagccgagcatcccaacccaggcgtgcggtaccctggaaccactcgcgtggcatacctcccagactgtccagagggtaacaaagttctcaccctgtttcggaaggcctttgatcagcgtttaaccttcacgatcggcaccagtatgaccaccggtcggcctaacgttattacatggaacgacatacatcataagacatcttgtaccggcggtccgcagctgttcggctacccagatccaacgtacctcaccagggtgcaggaggagctgcgcgctaaggggatcacggacgattag

SEQ ID NO: 104507 - DNA, 150 bp, Artificial Sequence
  derived and/or modified sequence
atgtcattcgtgctgtcccgtatggccgcatgcggtggaacttgcaagaacaaggtcactgtctcaaaacctgtatgggacttcttaagtaaggaaacccccgcaagattggcacgactgcgtgaagagcacagggtctctattctgtag

SEQ ID NO: 104508 - DNA, 1044 bp, Artificial Sequence
  derived and/or modified sequence
atgagcttcgtgctgagcagaatggccgcctgcggcggcacctgcaagaacaaggtgaccgtgagcaagcccgtgtgggacttcctgagcaaggagacccccgccagactggccagactgagagaggagcacagagtgagcatcctgatcgacggcgagaccagcgacatctacgtgctgcagctgagcccccagggccccccccccgccccccccaacggcctgtacctggccagaaaggccctgaagggcctgctgaaggaggccgagaaggagctgaagaaggcccagagacagggcgagctgatgggctgcctggccctgggcggcggcggcgagcaccccgagatgcacagagccggccccccccccctgagagccgcccccctgctgccccccggcgccagaggcctgccccccccccccccccccctgcccccccccctgccccccagactgagagaggaggccgaggagcaggagagcacctgccccatctgcctgggcgagatccagaacgccaagaccctggagaagtgcagacacagcttctgcgagggctgcatcaccagagccctgcaggtgaagaaggcctgccccatgtgcggcagattctacggccagctggtgggcaaccagccccagaacggcagaatgctggtgagcaaggacgccaccctgctgctgcccagctacgagaagtacggcaccatcgtgatccagtacgtgttcccccccggcgtgcagggcgccgagcaccccaaccccggcgtgagataccccggcaccaccagagtggcctacctgcccgactgccccgagggcaacaaggtgctgaccctgttcagaaaggccttcgaccagagactgaccttcaccatcggcaccagcatgaccaccggcagacccaacgtgatcacctggaacgacatccaccacaagaccagctgcaccggcggcccccagctgttcggctaccccgaccccacctacctgaccagagtgcaggaggagctgagagccaagggcatcaccgacgactag

SEQ ID NO: 104509 - DNA, 150 bp, Artificial Sequence
  derived and/or modified sequence
atgagcttcgtgctgagcagaatggccgcctgcggcggcacctgcaagaacaaggtgaccgtgagcaagcccgtgtgggacttcctgagcaaggagacccccgccagactggccagactgagagaggagcacagagtgagcatcctgtag

SEQ ID NO: 104510 - DNA, 2029 bp, Artificial Sequence
  derived and/or modified sequence
ctcagtcatgtgaccggcaatggcggcgctgacgagagctgcatttggaagtgttgtggagacagccccgtagcccaatgcgaccagactcagggaaaacatcaggcccctccagctgagcccttgtgtgagccccgcccctccctaaatgccagacttgggagctgacagacagcactgcctgtgctgggtttaaaagtcctggtcagctgagtggaaatagaaggatttctgctgccatcatcttccatgggctttccaggtcacacgacctacaagtagggagcagggaaagaagagtgagcctgcatgccaattctaagctcttcaggatcaaatgtcgttcgtcctgtccagaatggcagcctgtggaggcacctgcaagaacaaagtgactgtgtccaagcccgtgtgggacttcctgagcaaagagaccccagcccggctggcccggcttcgggaggagcaccgtgtgtccatcctcatagatggcgagacttctgacatctatgttctccagctttccccacagggtcctcccccggcccctccaaatgggctctacctagcccggaaggctctcaaggggctgctaaaagaggcagagaaagagctgaagaaagctcagaggcagggggagctgatgggctgcctggctctggggggtggaggggagcaccctgagatgcaccgcgcaggcccaccccctctccgagcagccccacttctgcccccaggagctcgggggctcccccctcctcctccccccctgcccccacctcttcctcctcgccttcgggaggaggcagaagagcaggagagcacctgccccatctgtctgggggagatccagaatgccaagacattggagaagtgccggcattcattctgcgagggctgcatcacccgggctctgcaggtgaaaaaggcctgccccatgtgcggccgcttctatgggcagctggtgggcaaccagccccagaatgggcggatgctggtctctaaggacgccaccctcctactgcccagctatgagaagtacggcaccattgtcatccagtacgtcttcccgcccggtgtccagggggctgaacacccaaacccaggagttcggtatcctggcaccacacgggtggcctacctcccggactgccctgagggcaacaaggtgctgaccctgttccgcaaggcgtttgaccagcgtctcaccttcactatcggcacgtccatgaccacagggagaccgaatgtcatcacctggaacgacatccaccacaagaccagctgcacagggggaccccagctgtttgggtacccagaccccacctacctgacccgggtgcaagaggagctgagagcgaagggtatcacagatgactgaaggacatcgcctttgccaaggcccctgctgtctgcctctactaggacccagcagaagcctctttctcctctctgccccctgccccccacaccacacctgtaggggacctgtctgactgggaagggagttccgagagggagggggcaatcccttcccccatcccccactggccaagtgtttcaatgcagtgtgagccactcccttctggcagaggccgacctccaaggctctgttctcccctccccgtgtacatatactcccggtttccctgcccctccattgcccttggctttttctggtatgtgctgtgctccacgaccaagccgagaaaggacctagggtggggaagggagggtctcttgattcctaaccgcccccacatactgctccaccgctgaacttcgggtgccggggaggagaaattgggctgatgtgagctccccgtcacccgccatggagccggctgtgtgtgttcatcagatacagttctcccttaaccttgtcctttctctcctgtgtctcagtctccgtcagtctgtctttctccgctcttctctgacccctgtgaggaacctccttaccctgttctggaatcgctgccagactgtagcttttaatttaataaaaataaagtaaaatatgcaactc

SEQ ID NO: 104511 - DNA, 3199 bp, Artificial Sequence
  derived and/or modified sequence
agtcatgtgaccggcaatggcggcgctgacgagaggtaggtgagcccggcgccccccacacccaccgcgcgccccccgggccccgctcgcacccctcacgcgccccccgctcccccggcgccccctcctccacctcccctccccgcgcgcggctccgggctccccgctccgtgcccggccgatcatctttctagcaccctccagccttggcctccattcgggggttctgagggctgcgatcgggccgacatgcacccccacccggcggtggggatccgggggctttggctactgagggatgtggggagttggttccgggtcgggtcttggaggaggccgtggggggagggcgggagctgcttcagtggatgcccccagggacccttgcccatccgggctgtgcctccctctggcctctgtctggagggagagactggttccttgtccggcctgggttgccacagaggaatcacagacccaccctaaactggggccccgcctcccttttctgtgccagcaggacttggacctaggacacctaggtcctgggtcccccgtgatggggagagaagtgttgcatcgcggatagactgtatgggctgagactctagggttccattttcacttatgaatctcgaggtgcatctggccttgggggacgatgatggaggcatgaagggacagctgctccttcttggatcagtcaataaatggaggtcacactaatggcccttctttctgtttgagctgcatttggaagtgttgtggagacagccccgtagcccaatgcgaccagactcagggaaaacatcaggcccctccagctgagcccttgtgtgagccccgcccctccctaaatgccagacttgggagctgacagacagcactgcctgtgctgggtttaaaaggtgacaatgagaactttgttattgcaggggctgctgccactttgttcacatccttaacagacttcagcagaagggactgagttagctctcaaggaaggctccctggcaataggggctgaattatttggcaatgtggagcaggcgaggagttggggagcataggaaatattccggtccatgtgatctgagggaggtggcaagaagacctccacctgtgtgggcgttttctttcctgacttctcttatgtgtgccctaggctttcttgggggcctcagagctggggaagaaaggaggaaggttagcatgttgaagttccttcttgagcaacttggggagaagctgataatggaattctgcagagaagagaggagatggaaggggagtttttatttctgggttggctgaggggaatggtaacatttgccatcataactttttacccttcccccactcccagtcctggtcagctgagtggaaatagaaggatttctgctgccatcatcttccatgggctttccaggtcacacgacctacaagtagggagcagggaaagaagagtgagcctgcatgccaattctaagctcttcaggatcaaatgtcgttcgtcctgtccagaatggcagcctgtggaggcacctgcaagaacaaagtgactgtgtccaagcccgtgtgggacttcctgagcaaagagaccccagcccggctggcccggcttcgggaggagcaccgtgtgtccatcctcatagatggcgagacttctgacatctatgttctccagctttccccacagggtcctcccccggcccctccaaatgggctctacctagcccggaaggctctcaaggggctgctaaaagaggcagagaaagagctgaagaaagctcagaggcagggggagctgatgggctgcctggctctggggggtggaggggagcaccctgagatgcaccgcgcaggcccaccccctctccgagcagccccacttctgcccccaggagctcgggggctcccccctcctcctccccccctgcccccacctcttcctcctcgccttcgggaggaggcagaagagcaggagagcacctgccccatctgtctgggggagatccagaatgccaagacattggagaagtgccggcattcattctgcgagggctgcatcacccgggctctgcaggtgaaaaaggcctgccccatgtgcggccgcttctatgggcagctggtgggcaaccagccccagaatgggcggatgctggtctctaaggacgccaccctcctactgcccagctatgagaagtacggcaccattgtcatccagtacgtcttcccgcccggtgtccagggggctgaacacccaaacccaggagttcggtatcctggcaccacacgggtggcctacctcccggactgccctgagggcaacaaggtgctgaccctgttccgcaaggcgtttgaccagcgtctcaccttcactatcggcacgtccatgaccacagggagaccgaatgtcatcacctggaacgacatccaccacaagaccagctgcacagggggaccccagctgtttgggtacccagaccccacctacctgacccgggtgcaagaggagctgagagcgaagggtatcacagatgactgaaggacatcgcctttgccaaggcccctgctgtctgcctctactaggacccagcagaagcctctttctcctctctgccccctgccccccacaccacacctgtaggggacctgtctgactgggaagggagttccgagagggagggggcaatcccttcccccatcccccactggccaagtgtttcaatgcagtgtgagccactcccttctggcagaggccgacctccaaggctctgttctcccctccccgtgtacatatactcccggtttccctgcccctccattgcccttggctttttctggtatgtgctgtgctccacgaccaagccgagaaaggacctagggtggggaagggagggtctcttgattcctaaccgcccccacatactgctccaccgctgaacttcgggtgccggggaggagaaattgggctgatgtgagctccccgtcacccgccatggagccggctgtgtgtgttcatcagatacagttctcccttaaccttgtcctttctctcctgtgtctcagtctccgtcagtctgtctttctccgctcttctctgacccctgtgaggaacctccttaccctgttctggaatcgctgccagactgtagcttttaatttaataaaaataaagtaaaatatgcaactcttt

SEQ ID NO: 104512 - DNA, 2067 bp, Artificial Sequence
  derived and/or modified sequence
catttttgttttggggaggaagggcaggggcttgcggatagaagggggtcaaaggaacggtgattatcacctgtgaggggaaagggggtgctgtcctccctccttcccttttcctcagcctgcaccccctgcaatcccccacctttcggggtctccccctccttgttgctaaggcccggaccgtcatcccagcaacagcctcagtcatgtgaccggcaatggcggcgctgacgagagtcctggtcagctgagtggaaatagaaggatttctgctgccatcatcttccatgggctttccaggtcacacgacctacaagtagggagcagggaaagaagagtgagcctgcatgccaattctaagctcttcaggatcaaatgtcgttcgtcctgtccagaatggcagcctgtggaggcacctgcaagaacaaagtgactgtgtccaagcccgtgtgggacttcctgagcaaagagaccccagcccggctggcccggcttcgggaggagcaccgtgtgtccatcctcatagatggcgagacttctgacatctatgttctccagctttccccacagggtcctcccccggcccctccaaatgggctctacctagcccggaaggctctcaaggggctgctaaaagaggcagagaaagagctgaagaaagctcagaggcagggggagctgatgggctgcctggctctggggggtggaggggagcaccctgagatgcaccgcgcaggcccaccccctctccgagcagccccacttctgcccccaggagctcgggggctcccccctcctcctccccccctgcccccacctcttcctcctcgccttcgggaggaggcagaagagcaggagagcacctgccccatctgtctgggggagatccagaatgccaagacattggagaagtgccggcattcattctgcgagggctgcatcacccgggctctgcaggtgaaaaaggcctgccccatgtgcggccgcttctatgggcagctggtgggcaaccagccccagaatgggcggatgctggtctctaaggacgccaccctcctactgcccagctatgagaagtacggcaccattgtcatccagtacgtcttcccgcccggtgtccagggggctgaacacccaaacccaggagttcggtatcctggcaccacacgggtggcctacctcccggactgccctgagggcaacaaggtgctgaccctgttccgcaaggcgtttgaccagcgtctcaccttcactatcggcacgtccatgaccacagggagaccgaatgtcatcacctggaacgacatccaccacaagaccagctgcacagggggaccccagctgtttgggtacccagaccccacctacctgacccgggtgcaagaggagctgagagcgaagggtatcacagatgactgaaggacatcgcctttgccaaggcccctgctgtctgcctctactaggacccagcagaagcctctttctcctctctgccccctgccccccacaccacacctgtaggggacctgtctgactgggaagggagttccgagagggagggggcaatcccttcccccatcccccactggccaagtgtttcaatgcagtgtgagccactcccttctggcagaggccgacctccaaggctctgttctcccctccccgtgtacatatactcccggtttccctgcccctccattgcccttggctttttctggtatgtgctgtgctccacgaccaagccgagaaaggacctagggtggggaagggagggtctcttgattcctaaccgcccccacatactgctccaccgctgaacttcgggtgccggggaggagaaattgggctgatgtgagctccccgtcacccgccatggagccggctgtgtgtgttcatcagatacagttctcccttaaccttgtcctttctctcctgtgtctcagtctccgtcagtctgtctttctccgctcttctctgacccctgtgaggaacctccttaccctgttctggaatcgctgccagactgtagcttttaatttaataaaaataaagtaaaatatgcaactc

SEQ ID NO: 104513 - DNA, 561 bp, Artificial Sequence
  derived and/or modified sequence
atttttgttttggggaggaagggcaggggcttgcggatagaagggggtcaaaggaacggtgattatcacctgtgaggggaaagggggtgctgtcctccctccttcccttttcctcagcctgcaccccctgcaatcccccacctttcggggtctccccctccttgttgctaaggcccggaccgtcatcccagcaacagcctcagtcatgtgaccggcaatggcggcgctgacgagaggctttcttgggggcctcagagctggggaagaaaggaggaagtcctggtcagctgagtggaaatagaaggatttctgctgccatcatcttccatgggctttccaggtcacacgacctacaagtagggagcagggaaagaagagtgagcctgcatgccaattctaagctcttcaggatcaaatgtcgttcgtcctgtccagaatggcagcctgtggaggcacctgcaagaacaaagtgactgtgtccaagcccgtgtgggacttcctgagcaaagagaccccagcccggctggcccggcttcgggaggagcaccgtgtgtccatcct

SEQ ID NO: 104514 - DNA, 978 bp, Artificial Sequence
  derived and/or modified sequence
atggagctgccccccgagccccaggccaacggcgaggccgtgggcgccggcggcggccccatctactacatctacgaggaggaggaggaggaggaggaggaggaggaggagcccccccccgagccccccaagctggtgaacgacaagccccacaagttcaaggaccacttcttcaagaagcccaagttctgcgacgtgtgcgccagaatgatcgtgctgaacaacaagttcggcctgagatgcaagaactgcaagaccaacatccacgagcactgccagagctacgtggagatgcagagatgcttcggcaagatcccccccggcttccacagagcctacagcagccccctgtacagcaaccagcagtacgcctgcgtgaaggacctgagcgccgccaacagaaacgaccccgtgttcgagaccctgagaaccggcgtgatcatggccaacaaggagagaaagaagggccaggccgacaagaagaaccccgtggccgccatgatggaggaggagcccgagagcgccagacccgaggagggcaagccccaggacggcaaccccgagggcgacaagaaggccgagaagaagacccccgacgacaagcacaagcagcccggcttccagcagagccactacttcgtggccctgtacagattcaaggccctggagaaggacgacctggacttcccccccggcgagaagatcaccgtgatcgacgacagcaacgaggagtggtggagaggcaagatcggcgagaaggtgggcttcttcccccccaacttcatcatcagagtgagagccggcgagagagtgcacagagtgaccagaagcttcgtgggcaacagagagatcggccagatcaccctgaagaaggaccagatcgtggtgcagaagggcgacgaggccggcggctacgtgaaggtgtacaccggcagaaaggtgggcctgttccccaccgacttcctggaggagatctag

SEQ ID NO: 104515 - DNA, 978 bp, Artificial Sequence
  derived and/or modified sequence
atggagctccctcctgagccacaggccaatggtgaggccgtgggggccggcggcggaccaatctattatatatacgaggaagaagaggaggaagaagaagaagaagaggaaccaccgcctgaaccacccaagctggtgaacgataagccgcataagtttaaagatcattttttcaaaaagcctaagttctgtgacgtttgtgccaggatgatcgttctgaataataaatttgggctaaggtgcaagaattgtaaaactaatatccacgaacactgccagagttacgtggaaatgcagcgctgcttcgggaaaattcctcctggtttccatcgagcctattcttccccgctgtatagcaaccagcaatacgcttgcgtgaaggacctgtctgcagcgaataggaatgatcccgtgttcgagaccctgcggaccggagtcatcatggctaacaaggagaggaaaaaaggtcaagctgataagaagaacccagtggcagccatgatggaagaggagcccgagtcagcgcgccccgaggagggcaagccacaggatggtaatcctgagggggacaagaaagcagagaagaagacgcccgatgataagcataaacagcccggattccaacagagccactacttcgtcgctttgtatcgatttaaagctctggagaaggatgatttggactttcctcctggtgagaagattaccgtcatcgatgatagcaacgaagaatggtggagaggcaaaatcggtgaaaaggtgggtttttttcctcccaattttatcatccgggtgagagcaggcgaacgggtccatcgcgtgacgcggtcttttgtcgggaacagggaaattggacagattaccttaaagaaggaccagatcgttgtgcagaagggggacgaagccgggggctacgtcaaggtgtacacagggaggaaggttggcctgttccctactgatttcctggaggagatatag

SEQ ID NO: 104516 - DNA, 978 bp, Artificial Sequence
  derived and/or modified sequence
atggagctgcccccagagccccaggccaacggggaggccgtgggcgctgggggcggccccatctactacatctatgaggaggaggaggaggaggaggaggaggaggaggagcccccacctgagccccccaagctggtgaatgacaagccccacaagttcaaggaccacttcttcaagaagcccaagttctgtgatgtgtgtgccaggatgattgtgctgaacaacaagtttggcctgcgctgcaagaactgcaagaccaacatccacgagcactgccagagctatgtggagatgcagcgctgcttcggcaagatccccccaggcttccaccgggcctacagcagccccctgtacagcaaccagcagtatgcctgtgtgaaggacctgtctgctgccaacagaaatgaccctgtgtttgagaccctgaggactggagtcatcatggccaacaaggagaggaagaagggccaggccgacaagaagaaccctgtggccgccatgatggaggaggagcctgagagcgcccggcctgaggagggcaagccccaggacggcaaccctgagggggacaagaaggccgagaagaagaccccagatgacaagcacaagcagcccggcttccagcagagccactactttgtggccctgtaccgcttcaaggccctggagaaggatgacctggacttccccccaggagagaagatcaccgtgattgatgacagcaatgaggagtggtggaggggcaagatcggggagaaggtgggcttcttcccccccaacttcatcatccgggtgcgggccggggagcgggtgcaccgggtgaccaggagctttgtgggcaaccgggagatcggccagatcaccctgaagaaggaccagatcgtggtgcagaagggagatgaggccggcggctacgtgaaggtgtacacaggcaggaaggtgggcctcttccccacagacttcctggaggagatctag

SEQ ID NO: 104517 - DNA, 978 bp, Artificial Sequence
  derived and/or modified sequence
atggagctgccccccgagccccaggccaacggcgaggccgtgggcgccgggggcggtccaatctactatatatacgaggaagaggaagaggaagaggaagaggaggaagaacccccccccgagccccctaagctggtcaacgataaaccgcacaaatttaaggatcatttcttcaaaaaacctaagttctgcgacgtttgtgcgcgcatgatcgttctcaacaataaatttggcctcaggtgtaagaattgcaaaactaatatccacgagcactgccagagctacgttgagatgcaacggtgctttggcaagatcccacctggatttcaccgcgcttactcaagtcccctgtactccaaccaacagtacgcctgcgtcaaggatctatctgcagcaaatcgtaatgacccagtgttcgagactcttagaaccggggtgattatggcgaacaaggaaagaaagaagggccaggcagataaaaagaatcccgtggccgctatgatggaggaggagcccgaatccgcaaggccggaggaggggaagccacaagatggtaatcccgaaggcgataagaaagcggagaaaaaaactcctgacgataagcataagcagccagggttccaacagtcccactatttcgtggctctatatagattcaaggccttagagaaggatgacttagactttcccccgggtgagaagatcacagtgatcgatgacagtaatgaggaatggtggcgaggcaagattggcgagaaagttggcttttttcctcccaattttatcattagggtacgggccggcgagagggtccacagggtgaccagatcctttgtcggaaacagggagatcggccaaattacccttaagaaggatcaaatcgtggtgcagaaaggcgatgaggccgggggatatgtgaaggtctataccggtcgtaaagtaggcctgtttcctaccgacttcctggaagagatttag

SEQ ID NO: 104518 - DNA, 978 bp, Artificial Sequence
  derived and/or modified sequence
atggagctgcctccagagccccaagccaacggtgaagccgtgggtgccggaggagggcctatatattacatctatgaggaggaggaggaagaggaggaggaggaggaagagccacctccagaacccccaaagctggtaaacgacaagcctcacaaattcaaggaccattttttcaaaaagcccaagttctgcgacgtctgcgccagaatgattgtgctgaacaacaaatttggattaaggtgtaagaactgcaaaacaaatatacacgagcattgtcagagctacgtcgaaatgcagagatgcttcgggaaaatccctcccggttttcaccgagcctattcatccccactttattcaaaccagcaatatgcatgcgttaaggatctgagcgcagctaataggaacgacccagtcttcgagacccttcggacgggtgtgatcatggctaacaaggagagaaagaaggggcaggctgataaaaagaatcccgttgccgcaatgatggaggaggagcccgaatccgcaagacccgaggagggtaaaccccaagacggtaacccggaaggcgacaaaaaggcagaaaaaaaaacacccgatgataagcacaagcaacccggatttcagcagtctcactactttgtggccctctaccggtttaaggctctcgaaaaggacgacttggactttccccctggagaaaagatcactgtgatcgatgattcaaacgaggaatggtggcgtgggaagattggggagaaggtgggcttttttcctcctaattttattatacgggtgagagccggagagagagtccaccgagttacccggtcattcgtgggtaatcgggagattggacaaattacgctgaagaaggatcagatcgtggtccagaagggagacgaggccggtggctatgtcaaagtgtacactgggagaaaagtggggctttttcccactgattttctggaggagatctag

SEQ ID NO: 104519 - protein, 319 aa, Artificial Sequence
  derived and/or modified sequence
MVKAIQVLRIHLLELEKVNELCKDFCSRYIACLKTKMNSETLLSGEPGSPYSPVQSQQIQSAITGTISPQGIVVPASALQQGNVAMATVAGGTVYQPVTVVTPQGQVVTQTLSPGTIRIQNSQLQLQLNQDLSILHQDDGSSKNKRGVLPKHATNVMRSWLFQHIGHPYPTEDEKKQIAAQTNLTLLQVNNWFINARRRILQPMLDSSCSETPKTKKKTAQNRPVQRFWPDSIASGVAQPPPSELTMSEGAVVTITTPVNMNVDSLQSLSSDGATLAVQQVMMAGQSEDESVDSTEEDAGALAPAHISGLVLENSDSLQ

SEQ ID NO: 104520 - DNA, 960 bp, Artificial Sequence
  derived and/or modified sequence
atggtcaaagccatacaggttcttcgtattcacttgcttgaactggaaaaagttaatgaactatgcaaggatttctgctctaggtatatcgcttgtttaaaaactaaaatgaactcagaaaccctgctgtccggagagccgggctccccttatagccccgtgcagtcccagcaaattcagtccgcgatcacaggtactatttcaccccaggggattgtggtgccagcaagtgccttgcagcagggtaacgtcgcaatggccaccgtcgccggcggcaccgtgtaccagccagtaactgttgtcactcctcagggccaggtggtaacccagactctctcgcccggcactatccgtatacagaacagtcagctacagctccagttgaatcaagacctgtctattctgcatcaggatgatggcagcagtaaaaacaagcgaggagttcttccaaagcatgctacgaacgtcatgcggagttggctgttccaacacattggacatccgtacccaactgaagatgagaagaaacagatcgcagcacaaacgaatctgacactgctccaggttaacaactggtttattaacgccaggagacgaatccttcagcccatgctcgacagcagttgcagcgagacgcctaaaacaaaaaaaaaaacagcacagaataggcccgtgcaaaggttctggcctgactccatcgcttctggagtggcacagccacctccgtctgagctgaccatgtcagaaggggccgtggtgaccattactactcccgtgaatatgaacgtcgatagtctgcagtccctgagttcggacggtgctaccctggcggtgcagcaggtgatgatggccggtcagtctgaggatgaatcggttgacagtacagaagaagacgccggagcgcttgctcccgctcacatttccggtctcgtgctcgagaattccgactcactgcagtag

SEQ ID NO: 104521 - DNA, 960 bp, Artificial Sequence
  derived and/or modified sequence
atggtgaaggccatccaggtgctgcgcatccacctgctggagctggagaaggtgaatgagctgtgcaaggacttctgcagccgctacatcgcctgcctgaagaccaagatgaacagcgagaccctgctgagcggggagcccggcagcccctacagccctgtgcagagccagcagatccagagcgccatcaccggcaccatcagcccccagggcatcgtggtgcctgccagcgccctgcagcagggcaatgtggccatggccaccgtggccggcggcaccgtgtaccagcctgtgacagtggtgaccccccagggccaggtggtgacccagaccctgagccctggcaccatccgcatccagaacagccagctgcagctgcagctgaaccaggacctgagcatcctgcaccaggatgatggcagcagcaagaacaagaggggcgtgctgcccaagcacgccaccaacgtgatgaggtcctggctgttccagcacatcggccacccctaccccacagaagatgagaagaagcagattgctgcccagaccaacctgaccctgctgcaggtgaacaactggttcatcaatgcccggcggcgcatcctgcagcccatgctggacagcagctgcagcgagacccccaagaccaagaagaagacagcccagaacagacctgtgcagcgcttctggccagacagcatcgccagcggcgtggcccagcccccaccttctgagctgaccatgtctgagggcgctgtggtgaccatcaccacccctgtgaacatgaatgtggacagcctgcagagcctgagcagtgatggagccaccctggccgtgcagcaggtgatgatggccggccagagtgaagatgaatctgtggacagcacagaagaagatgctggggccctggccccagcccacatcagcggcctggtgctggagaacagcgacagcctgcagtag

SEQ ID NO: 104522 - DNA, 960 bp, Artificial Sequence
  derived and/or modified sequence
atggtgaaggccatccaggtgctgcggatccacctgctggagctggaaaaggtgaatgaactctgcaaagatttttgtagcagatatatcgcttgcctcaaaactaagatgaattctgaaaccctgctctcaggggagccaggcagcccctactcgccagtccagagccagcagatacagagcgcaatcacggggacaatttctccccagggcatcgtggtcccagctagcgcactgcagcagggaaatgtagcaatggctactgtggcaggggggacagtgtaccagcctgtaactgtagtcactccgcaggggcaggtggtgacgcagaccttgtcccctgggactattagaatacagaatagtcaacttcagctacagttgaaccaggacctgtcaatcctgcaccaagatgacggctcttcaaaaaacaagcgaggcgttcttccaaaacacgccaccaacgtgatgagatcatggctgtttcaacatatcggacacccctatccaacggaagacgagaagaaacagatagcagcccagacgaaccttacactgctccaagtgaacaattggtttataaacgcccgacgacgcattctccagcctatgcttgacagcagctgctcagaaacacctaagaccaaaaaaaaaacagctcagaatagacccgttcagcgattctggccagacagtatcgcctcaggggttgcacagcctccaccttccgagcttacgatgtccgagggtgccgtggtcaccattacaacaccggtgaacatgaatgtggattctctgcaaagcctcagctcggacggagccaccctggcggttcagcaggtgatgatggccggacagtctgaggacgagtccgtggactctaccgaagaggacgccggcgcacttgctcccgcccatatctctggcttggtgctcgagaacagtgattcccttcagtag

SEQ ID NO: 104523 - DNA, 1449 bp, Artificial Sequence
  derived and/or modified sequence
agtgtgatgaagattggcacccagacaccattcgcttttcacccaagatgatttgatgtcttataaaactctgatgaaccatgatggctacacagacattaagtatagacagctatcaagatgggcaacagatgcaagtagtaacagagttaaagacagaacaagatccaaactgctctgaacccgatgcagaaggagtgagccctccccctgtggagtctcagaccccgatggatgtggacaagcaggccatttatagatggtaaaagcaatccaggttttgcgcattcatcttcttgagctggaaaaggttaacgaactctgcaaagatttctgcagtcgatacattgcttgtctgaaaacaaaaatgaacagtgaaactctgttgagtggagagcctggaagcccgtactcaccagtgcagtcccagcagattcaaagtgccatcacaggcaccatcagccctcagggaattgtggtgccggcgtccgcgctgcagcagggaaacgtagccatggcgacggtggcaggtggcacagtgtatcagcctgtcacggtcgtcactccccaaggccaagtggtcacacagacattgtcgcctgggacaattaggatccagaactcccagcttcagttacagttaaaccaagatctcagcatcttgcatcaagatgatggttcatctaagaacaagaggggcgtcctgccaaagcatgccacgaacgtgatgcggtcctggctcttccagcacatcgggcatccctacccaacagaggatgagaaaaaacagattgctgctcagacaaatttgacactactccaagtcaacaactggttcatcaatgccagaagacgaattcttcagccaatgttggattcaagttgttcagagacccccaaaacaaagaaaaaaactgctcagaaccggccagttcagaggttttggcctgattctattgcatcaggagtcgcacagccaccgccgagcgagctcaccatgtcggaaggagctgttgtcaccatcaccacgcccgtgaacatgaacgtggacagccttcagtctctgtcctcggacggggccaccctggcggtgcagcaggtcatgatggcagggcagagcgaggacgagtctgtggacagcacagaggaggatgcgggtgccctggcccctgcccacatcagcgggctggtcttggagaacagtgactccctgcagtaggggcaggagcagacgcacctgactttttggagtttgcacagcaaacattttacacagttttatttctaatatgttttatatgtagatatagaagagtgcacttttgtatttcatagtaagcttaaagcgcgtctttgccggtgcagcgacttctttcaagtgtgtgtgtgtgtgtgtgtgtgtgtgtgtgtgcgtgtgtgcgtgtgtgtggatttttaaagaaattcttt

SEQ ID NO: 104524 - DNA, 960 bp, Artificial Sequence
  derived and/or modified sequence
atggtgaaagcgattcaggtgctacgcatccaccttttagagttggagaaggtaaatgagctgtgcaaagatttctgctctcggtatatagcttgtttgaagaccaagatgaattctgagaccctgttgtcaggcgaacctgggtcaccttattctccagtccagtctcagcagatccaatccgcaatcaccggcacaatatctccccaggggatcgtcgtgcctgccagtgccctgcagcagggtaacgtggccatggctaccgttgccggtggtacagtctaccaacccgtcacagtggtgacgccccaaggccaagttgtaacacaaaccctttctccgggaacaataaggatccagaacagccagctccagctacagctgaatcaggatctttccatcctccaccaggatgacggcagctctaaaaataaaaggggcgtgctcccaaagcacgcaaccaacgtgatgagaagctggctctttcagcatattggccacccttaccccaccgaggacgagaagaagcagattgccgcacagaccaatctgacactccttcaggttaacaactggtttatcaacgccaggcggaggatcctgcagcctatgctggattcctcttgctccgaaacgcccaagactaaaaagaaaaccgcacaaaatcgacctgtacaaaggttttggccggactctatagccagcggtgtcgcccagccccctccttctgagctgactatgagcgaaggggcagtggtcaccatcactaccccggtcaacatgaacgttgattccctgcaaagtctgagtagcgatggtgctaccctcgctgttcagcaagttatgatggcaggacagagcgaagatgagagcgtagattctacagaagaagatgccggtgctctagctccagctcacatttctggccttgtcctggagaacagtgactccctacaatag

SEQ ID NO: 104525 - DNA, 960 bp, Artificial Sequence
  derived and/or modified sequence
atggtgaaggccatccaggtgctgagaatccacctgctggagctggagaaggtgaacgagctgtgcaaggacttctgcagcagatacatcgcctgcctgaagaccaagatgaacagcgagaccctgctgagcggcgagcccggcagcccctacagccccgtgcagagccagcagatccagagcgccatcaccggcaccatcagcccccagggcatcgtggtgcccgccagcgccctgcagcagggcaacgtggccatggccaccgtggccggcggcaccgtgtaccagcccgtgaccgtggtgaccccccagggccaggtggtgacccagaccctgagccccggcaccatcagaatccagaacagccagctgcagctgcagctgaaccaggacctgagcatcctgcaccaggacgacggcagcagcaagaacaagagaggcgtgctgcccaagcacgccaccaacgtgatgagaagctggctgttccagcacatcggccacccctaccccaccgaggacgagaagaagcagatcgccgcccagaccaacctgaccctgctgcaggtgaacaactggttcatcaacgccagaagaagaatcctgcagcccatgctggacagcagctgcagcgagacccccaagaccaagaagaagaccgcccagaacagacccgtgcagagattctggcccgacagcatcgccagcggcgtggcccagcccccccccagcgagctgaccatgagcgagggcgccgtggtgaccatcaccacccccgtgaacatgaacgtggacagcctgcagagcctgagcagcgacggcgccaccctggccgtgcagcaggtgatgatggccggccagagcgaggacgagagcgtggacagcaccgaggaggacgccggcgccctggcccccgcccacatcagcggcctggtgctggagaacagcgacagcctgcagtag

SEQ ID NO: 104526 - DNA, 435 bp, Artificial Sequence
  derived and/or modified sequence
atggtgtacaacaacgaggtggtgggcaagggcagaaacgaggtgaaccagaccaagaacgccaccagacacgccgagatggtggccatcgaccaggtgctggactggtgcagacagagcggcaagagccccagcgaggtgttcgagcacaccgtgctgtacgtgaccgtggagccctgcatcatgtgcgccgccgccctgagactgatgaagatccccctggtggtgtacggctgccagaacgagagattcggcggctgcggcagcgtgctgaacatcgccagcgccgacctgcccaacaccggcagacccttccagtgcatccccggctacagagccgaggaggccgtggagatgctgaagaccttctacaagcaggagaaccccaacgcccccaagagcaaggtgagaaagaaggagtgccagaagagctag

SEQ ID NO: 104527 - DNA, 435 bp, Artificial Sequence
  derived and/or modified sequence
atggtatataacaatgaagtcgttgggaaaggaaggaacgaagttaatcagacaaagaacgcaacaagacatgcggagatggtggcaattgaccaagtcctggattggtgcagacaaagtggaaagtctccttccgaagtctttgagcatactgtcctgtatgtgacggtcgagccctgcattatgtgtgccgcagctctgagattgatgaagatccccctggtcgtgtacggctgccaaaatgagaggttcgggggatgcgggagcgttctcaatattgcctccgccgatctcccaaacactggacgcccctttcaatgcatacccggttatagagccgaggaagcggtggaaatgctgaaaacattttataaacaagaaaatcccaacgcacctaaatctaaggtccgtaaaaaggagtgtcagaagagttag

SEQ ID NO: 104528 - DNA, 435 bp, Artificial Sequence
  derived and/or modified sequence
atggtgtacaacaatgaggtggtgggcaagggcagaaatgaggtgaaccagaccaagaatgccaccaggcatgctgagatggtggccatcgaccaggtgctggactggtgccggcagagcggcaagagccccagcgaggtgtttgagcacacagtgctgtatgtgacagtggagccctgcatcatgtgtgccgccgccctgcggctgatgaagatccccctggtggtgtatggctgccagaatgaaagatttggaggctgcggctctgtgctgaacatcgccagcgctgacctgcccaacacaggccggcccttccagtgcatccctggctacagagctgaggaggccgtggagatgctgaagaccttctacaagcaggagaaccccaatgcccccaagagcaaggtgaggaagaaggagtgccagaagagctag

SEQ ID NO: 104529 - DNA, 435 bp, Artificial Sequence
  derived and/or modified sequence
atggtgtacaacaacgaggtggtgggcaagggccggaacgaggtgaaccagaccaagaacgccaccaggcatgctgaaatggtcgcaattgatcaagtgctggactggtgccgacaatccggcaagtccccttcagaggtgtttgagcataccgtactctatgtgaccgttgagccctgcataatgtgcgccgcagccctgaggctcatgaaaatccccctcgtggtctacggatgccagaatgagaggttcggggggtgtggttctgtactaaacatcgcctcagctgatctgcccaataccggacgtccatttcagtgtatacctggctatcgcgctgaggaagcagttgagatgctgaagaccttctacaagcaagagaacccaaacgcccccaaatctaaggtgagaaagaaagagtgccagaaatcttag

SEQ ID NO: 104530 - DNA, 435 bp, Artificial Sequence
  derived and/or modified sequence
atggtgtataacaatgaagtcgtgggaaagggcagaaatgaggtcaatcagactaagaacgcaactcgccatgccgagatggtcgccattgaccaggtactggattggtgcagacagtccggcaaaagcccttcagaggtttttgagcatacagtgttatatgtaactgtcgaaccatgtatcatgtgcgctgccgctctgcgcctgatgaagattccgctggtcgtgtacggctgccaaaacgagcgctttgggggttgtgggtctgtactgaatatcgcttcagcagatctcccgaacactggcagaccgtttcagtgtattcctgggtaccgcgctgaggaagctgtcgaaatgcttaagacattttacaagcaggagaacccaaacgctccgaaatctaaagtccggaagaaagagtgccagaaatcatag

SEQ ID NO: 104531 - protein, 117 aa, Artificial Sequence
  derived and/or modified sequence
MECLRSLPCLLPRAMRLPRRTLCALALDVTSVGPPVAACGRRANLIGRSRAAQLCGPDRLRVAGEVHRFRTSDVSQATLASVAPVFTVTKFDKQGNVTSFVFESCDNSRVSSDIRLS

SEQ ID NO: 104532 - protein, 446 aa, Artificial Sequence
  derived and/or modified sequence
MECLRSLPCLLPRAMRLPRRTLCALALDVTSVGPPVAACGRRANLIGRSRAAQLCGPDRLRVAGEVHRFRTSDVSQATLASVAPVFTVTKFDKQGNVTSFERKKTELYQELGLQARDLRFQHVMSITVRNNRIIMRMEKYSLLLESVASILQNSVSFMERQTEQWLFRELPSQLSGEGQLVTYPLPFEFRAIEALLQYWINTLQGKLSILQPLILETLDALVDPKHSSVDRSKLHILLQNGKSLSELETDIKIFKESILEILDEEELLEELCVSKWSDPQVFEKSSAGIDHAEEMELLLENYYRLADDLSNAARELRVLIDDSQSIIFINLDSHRNVMMRLNLQLTMGTFSLSLFGLMGVAFGMNLESSLEEDHRIFWLITGIMFMGSGLIWRRLLSFLGRQLEAPLPPMMASLPKKTLLADRSMELKNSLRLDGLGSGRSILTNR

SEQ ID NO: 104533 - protein, 182 aa, Artificial Sequence
  derived and/or modified sequence
  misc_feature (1)..(1): Xaa can be any naturally occurring amino acid
XRAAQLCGPDRLRVAGEVHRFRTSDVSQATLASVAPVFTVTKFDKQGNVTSFERKKTELYQELETDIKIFKESILEILDEEELLEELCVSKWSDPQVFEKSSAGIDHAEEMELLLENYYRLADDLSNAARELRVLIDDSQSIIFINLDSHRNVMMRLNLQLTMGTFSLSLFGLMGVAFGMNL

SEQ ID NO: 104534 - protein, 152 aa, Artificial Sequence
  derived and/or modified sequence
MELLLENYYRLADDLSNAARELRVLIDDSQSIIFINLDSHRNVMMRLNLQLTMGTFSLSLFGLMGVAFGMNLESSLEEDHRIFWLITGIMFMGSGLIWRRLLSFLGRQLEAPLPPMMASLPKKTLLADRSMELKNSLRLDGLGSGRSILTNR

SEQ ID NO: 104535 - DNA, 1341 bp, Artificial Sequence
  derived and/or modified sequence
atggagtgcctgagaagcctgccctgcctgctgcccagagccatgagactgcccagaagaaccctgtgcgccctggccctggacgtgaccagcgtgggcccccccgtggccgcctgcggcagaagagccaacctgatcggcagaagcagagccgcccagctgtgcggccccgacagactgagagtggccggcgaggtgcacagattcagaaccagcgacgtgagccaggccaccctggccagcgtggcccccgtgttcaccgtgaccaagttcgacaagcagggcaacgtgaccagcttcgagagaaagaagaccgagctgtaccaggagctgggcctgcaggccagagacctgagattccagcacgtgatgagcatcaccgtgagaaacaacagaatcatcatgagaatggagaagtacagcctgctgctggagagcgtggccagcatcctgcagaacagcgtgagcttcatggagagacagaccgagcagtggctgttcagagagctgcccagccagctgagcggcgagggccagctggtgacctaccccctgcccttcgagttcagagccatcgaggccctgctgcagtactggatcaacaccctgcagggcaagctgagcatcctgcagcccctgatcctggagaccctggacgccctggtggaccccaagcacagcagcgtggacagaagcaagctgcacatcctgctgcagaacggcaagagcctgagcgagctggagaccgacatcaagatcttcaaggagagcatcctggagatcctggacgaggaggagctgctggaggagctgtgcgtgagcaagtggagcgacccccaggtgttcgagaagagcagcgccggcatcgaccacgccgaggagatggagctgctgctggagaactactacagactggccgacgacctgagcaacgccgccagagagctgagagtgctgatcgacgacagccagagcatcatcttcatcaacctggacagccacagaaacgtgatgatgagactgaacctgcagctgaccatgggcaccttcagcctgagcctgttcggcctgatgggcgtggccttcggcatgaacctggagagcagcctggaggaggaccacagaatcttctggctgatcaccggcatcatgttcatgggcagcggcctgatctggagaagactgctgagcttcctgggcagacagctggaggcccccctgccccccatgatggccagcctgcccaagaagaccctgctggccgacagaagcatggagctgaagaacagcctgagactggacggcctgggcagcggcagaagcatcctgaccaacagatag

SEQ ID NO: 104536 - DNA, 1341 bp, Artificial Sequence
  derived and/or modified sequence
atggagtgtctgagaagcttgccgtgcctcctaccacgggctatgaggctgcctcgcagaacactttgtgcccttgcactcgacgtgaccagcgtcggaccccctgtcgccgcctgtggacggcgcgccaatctgattggtaggtctcgcgcagcacagctgtgcggacctgaccgcttacgcgtggcaggcgaagttcatcggtttcggaccagcgatgtctcacaagcgaccctagctagcgtggcaccagtgttcacagtgacaaaattcgataaacaggggaacgtcaccagctttgaaagaaagaagactgagttgtaccaggaattgggactgcaagcacgtgatctgaggttccaacacgttatgagcattactgtaaggaataacagaatcattatgcgcatggaaaaatactccctcttgttggagagcgttgctagcatccttcagaactctgtttccttcatggagcggcagacggagcagtggctgtttagggagctaccaagccaattgtctggagagggccagctcgtcacttaccccctgcctttcgaatttagggctatcgaggccctgcttcaatactggataaacaccctgcagggcaaactcagcatcctgcagcctctgatcctggagaccctggatgccctcgtggaccctaaacacagttcagtggatcggtctaaactgcacatacttcttcagaatggcaagagtctgtctgagttagaaacagacatcaagatattcaaggagtcaatccttgaaatcctggatgaagaagagctgttggaagagctctgcgtgagtaaatggagcgatccccaggtgtttgagaagagctctgctggcatcgaccacgcagaggagatggagctcctcctggaaaattactataggctcgcggatgacctgagcaatgccgcacgcgaattgagagttctgattgacgatagccagtctatcatcttcataaacctggattcccacaggaacgttatgatgcgcctcaacctgcaactgacaatgggcaccttttccctctctctatttggcctaatgggcgtggcattcgggatgaacctcgaaagctcactggaggaggaccatcggatcttctggctgattactggtatcatgttcatgggctcaggattgatctggaggagactgctcagttttttgggcaggcagctcgaagctcctctcccccccatgatggcttctctacctaaaaaaaccctgttagccgacaggtctatggagttaaaaaacagcctgagactggatggcctcggaagtggacggagcatcttaacaaaccggtag

SEQ ID NO: 104537 - DNA, 1341 bp, Artificial Sequence
  derived and/or modified sequence
atggagtgcctgcggagcctgccctgcctgctgccccgggccatgaggctgcccaggaggaccctgtgtgccctggccctggatgtgacctctgtgggcccccctgtggccgcctgtggcagaagagccaacctgattggccgcagcagagctgcccagctgtgtggccctgaccggctgcgggtggccggggaggtgcaccgcttccgcaccagtgatgtgtcccaggccaccctggcctctgtggcccctgtgttcaccgtgaccaagtttgacaagcagggcaatgtgaccagctttgagaggaagaagacagagctgtaccaggagctgggcctgcaggcccgggacctgcgcttccagcacgtgatgagcatcaccgtgaggaacaaccgcatcatcatgaggatggagaagtacagcctgctgctggagagcgtggccagcatcctgcagaacagcgtgtccttcatggagcggcagacagagcagtggctgttccgggagctgcccagccagctgtctggagagggccagctggtgacctaccccctgccctttgagttccgggccatcgaggccctgctgcagtactggatcaacaccctgcagggcaagctgagcatcctgcagcccctcatcctggagaccctggatgccctggtggaccccaagcacagctctgtggacaggagcaagctgcacatcctgctgcagaatggcaagagcctgtctgagctggagacagacatcaagatcttcaaggagagcatcctggagatcctggatgaggaggagctgctggaggagctgtgtgtgtccaagtggagcgacccccaggtgtttgagaagagcagcgctggcatcgaccacgccgaggagatggagctgctgctggagaactactaccgcctggctgatgacctgagcaatgctgcccgggagctgcgggtgctgattgatgacagccagagcatcatcttcatcaacctggacagccacagaaatgtgatgatgaggctgaacctgcagctgaccatgggcaccttcagcctgagcctgtttggcctgatgggcgtggccttcggcatgaacctggagagcagcctggaggaggaccaccgcatcttctggctgatcaccggcatcatgttcatgggcagcggcctcatctggaggcggctgctgtccttcctgggccggcagctggaggcccccctgccccccatgatggccagcctgcccaagaagaccctgctggccgaccgctccatggagctgaagaacagcctgcggctggatggcctgggcagcggccgcagcatcctgaccaacagatag

SEQ ID NO: 104538 - DNA, 1574 bp, Artificial Sequence
  derived and/or modified sequence
agcgacaggtcagagctgcggcctgagcagccagcgtccggcatgaaggtctggggtctggctgctgcctgcttcttgctccagcaccatggaatgcctgcgcagtttaccctgcctcctgccccgcgcgatgagacttccccggcggacgctgtgtgccctggccttggacgtgacctctgtgggtcctcccgttgctgcctgcggccgccgagccaacctgattggaaggagccgagcggcgcagctttgcgggcccgaccggctccgcgtggcaggtgaagtgcaccggtttagaacctctgacgtctctcaagccactttagccagtgtagccccagtatttactgtgacaaaatttgacaaacagggaaacgttacttcttttgaaaggaagaaaactgaattataccaagagttaggtcttcaagccagagatttgagatttcagcatgtaatgagtatcacagtcagaaacaataggattatcatgagaatggagaaatattctctactcttggaatcagtagctagcattcttcaaaacagtgtctctttcatggagagacagacagagcaatggctgttccgggaactcccttcacagttgtctggagagggtcaactcgttacataccctttaccttttgagtttagagctatagaagcactcctgcaatattggatcaacacccttcaggggaaacttagcattttgcagccactgatccttgagaccttggatgctttggtggaccccaaacattcttctgtagacagaagcaaactgcacattttactacagaatggcaaaagtctatcagagttagaaacagatattaaaattttcaaagagtcaattttggagatcttggatgaggaagagttgctagaagagctctgtgtatcaaaatggagtgacccacaagtctttgaaaagagcagtgctgggattgaccatgcagaagagatggagttgctgttggaaaactactaccgattggctgacgatctctccaatgcagctcgtgagcttagggtgctgattgatgattcacaaagtattattttcattaatctggacagccaccgaaacgtgatgatgaggttgaatctacagctgaccatgggaaccttctctctttcgctctttggactaatgggagttgcttttggaatgaatttggaatcttcccttgaagaggaccatagaattttttggctgattacaggaattatgttcatgggaagtggcctcatctggaggcgcctgctttcattccttggacgacagctagaagctccattgcctcctatgatggcttctttacctaaaaagactcttctggcagatagaagcatggaattgaaaaatagcctcagactggatggacttggatcaggaaggagcatcctaacaaaccgttaggaacagccccgtggatactgaagttttttttatggtagttacaggaaacttctgatactctttttattattttcttgtatagagtcagacacttgaaaaaaactaatgtttgaagacaaaaatattttggcagtcacaataccag

SEQ ID NO: 104539 - DNA, 1341 bp, Artificial Sequence
  derived and/or modified sequence
atggagtgcctgcggagcctgccctgcctgctgccccgggccatgcgcctgccacgcagaaccctgtgcgcactggctttggatgtgacttctgtgggtcctcccgtcgcagcctgtggccgtagagccaatctgatcggtcggagccgggccgcccagctgtgtggccctgatcgccttcgagtagcgggtgaggttcacaggttccgcacgtccgacgtaagccaagccaccttggccagcgtggctccagtcttcaccgtcaccaagttcgacaagcagggaaatgtcacatcttttgagcgtaaaaaaacggagctctaccaggaattgggtctgcaagctagagacttacgtttccagcacgtcatgtctattacggtgcgcaataataggatcatcatgcggatggaaaagtactcacttctgttagagtccgtggccagtattttgcagaatagtgttagcttcatggagcggcagaccgaacagtggttattccgggagttgccaagccagctttctggagaaggccagctcgtcacatatcctctgccatttgagtttagagctatcgaagcactactacagtactggatcaacacgctgcaaggaaagcttagcattcttcagccactgattctggagacacttgacgccctcgtggatcccaagcacagcagcgtagacagaagtaaactccacattctccttcagaatggaaagtcactgtctgaattagagactgacattaagatattcaaggaatccatcctggagattctggatgaagaagaactgctggaggagctgtgcgtgagcaaatggtcagatcctcaggtattcgagaaatcatcggctgggattgatcatgctgaggaaatggagctgttgctggaaaactactataggctggccgacgatctctctaacgcagctcgggaactgcgggtcctgatcgatgattcgcagagtattatattcattaatctcgactctcatcggaacgtgatgatgcgccttaatctccagctgaccatgggaacctttagcctatccttgttcggacttatgggagtcgccttcggcatgaacttagagagctctttggaggaggaccaccggattttttggctgatcacaggcataatgtttatggggagcggcttgatctggaggcgccttttatccttcctcggccgccagctagaagcgccattaccgcccatgatggcatccctgccaaaaaagacgctgctggctgacaggtcaatggagctgaaaaattccctgcggcttgatggcctggggagcggcaggtcaatcttaacaaataggtag

SEQ ID NO: 104540 - DNA, 1341 bp, Artificial Sequence
  derived and/or modified sequence
atggagtgtttaaggtctctgccttgtctgcttcccagagccatgcggctccccaggcgcacgctctgcgcccttgctctggacgtcacctctgtcggaccaccggtggccgcttgcgggagacgggctaatctaatcggtaggagccgagccgctcagctctgtggacctgataggctgagggtcgccggagaagtgcatcgttttcgcacatccgatgtttcacaagccaccctggcatctgtggcccctgtgtttacagtgacaaagtttgacaaacagggtaacgtaacctcgtttgagcgcaagaaaaccgagttataccaagaattagggttacaggccagagacctgcggttccagcatgtgatgtctataacggtacgtaacaatcgtattattatgcggatggaaaaatactctttactcctggagtcagtcgctagcattctccagaacagcgtgtctttcatggagagacagacagagcagtggctgttccgcgaacttcctagtcaactctctggagaaggccagttagtcacctatcctcttcctttcgagttccgggcaattgaggcgctgctgcagtattggatcaacacattacagggaaaattaagtatcttacagcccctgattttggaaactctcgacgctctggtcgatcccaagcactctagcgtcgatcggagtaagctgcatattctgctgcagaacggcaagtccttgtctgagcttgaaaccgacattaagattttcaaggagtccatcctggaaatattggacgaggaggaactgctcgaggagttgtgcgtttctaagtggagtgatcctcaggtcttcgagaaatcaagcgccggaattgaccacgccgaagagatggagctgctgctcgagaactattatagattggctgacgatctgtccaacgctgcccgagaactgagagttctcatcgatgacagccagtccattatcttcattaacttggatagccacagaaacgtcatgatgagactgaatcttcagctgaccatgggtacattctcactcagtctatttggactgatgggcgtcgcctttggaatgaatctggagagctcactggaggaagaccaccggattttttggttgatcacgggcattatgtttatgggatcagggttgatttggaggcgtttactcagtttccttggtcggcagctggaggcgcctcttccgcctatgatggcttcactccccaagaaaacccttctcgcagaccgcagtatggaattaaagaacagccttcggctggacgggctgggatctgggagatcaattcttacaaatcgctag

SEQ ID NO: 104541 - protein, 408 aa, Artificial Sequence
  derived and/or modified sequence
MECLRSLPCLLPRAMRLPRRTLCALALDVTSVGPPVAACGRRANLIGRSRAAQLCGPDRLRVAGEVHRFRTSDVSQATLASVAPVFTVTKFDKQGNVTSFERKKTELYQELGLQARDLRFQHVMSITVRNNRIIMRMEYLKAVITPECLLILDYRNLNLEQWLFRELPSQLSGEGQLVTYPLPFEFRAIEALLQYWINTLQGKLSILQPLILETLDALVDPKHSSVDRSKLHILLQNGKSLSELETDIKIFKESILEILDEEELLEELCVSKWSDPQVFEKSSAGIDHAEEMELLLENYYRLADDLSNAARELRVLIDDSQSIIFINLDSHRNVMMRLNLQLTMGTFSLSLFGLMGVAFGMNLESSLEEDHRIFWLITGIMFMGSGLIWRRLLSFLGRQLEAPLPPMV

SEQ ID NO: 104542 - DNA, 1227 bp, Artificial Sequence
  derived and/or modified sequence
atggagtgcctgagaagcctgccctgcctgctgcccagagccatgagactgcccagaagaaccctgtgcgccctggccctggacgtgaccagcgtgggcccccccgtggccgcctgcggcagaagagccaacctgatcggcagaagcagagccgcccagctgtgcggccccgacagactgagagtggccggcgaggtgcacagattcagaaccagcgacgtgagccaggccaccctggccagcgtggcccccgtgttcaccgtgaccaagttcgacaagcagggcaacgtgaccagcttcgagagaaagaagaccgagctgtaccaggagctgggcctgcaggccagagacctgagattccagcacgtgatgagcatcaccgtgagaaacaacagaatcatcatgagaatggagtacctgaaggccgtgatcacccccgagtgcctgctgatcctggactacagaaacctgaacctggagcagtggctgttcagagagctgcccagccagctgagcggcgagggccagctggtgacctaccccctgcccttcgagttcagagccatcgaggccctgctgcagtactggatcaacaccctgcagggcaagctgagcatcctgcagcccctgatcctggagaccctggacgccctggtggaccccaagcacagcagcgtggacagaagcaagctgcacatcctgctgcagaacggcaagagcctgagcgagctggagaccgacatcaagatcttcaaggagagcatcctggagatcctggacgaggaggagctgctggaggagctgtgcgtgagcaagtggagcgacccccaggtgttcgagaagagcagcgccggcatcgaccacgccgaggagatggagctgctgctggagaactactacagactggccgacgacctgagcaacgccgccagagagctgagagtgctgatcgacgacagccagagcatcatcttcatcaacctggacagccacagaaacgtgatgatgagactgaacctgcagctgaccatgggcaccttcagcctgagcctgttcggcctgatgggcgtggccttcggcatgaacctggagagcagcctggaggaggaccacagaatcttctggctgatcaccggcatcatgttcatgggcagcggcctgatctggagaagactgctgagcttcctgggcagacagctggaggcccccctgccccccatggtgtag

SEQ ID NO: 104543 - DNA, 1227 bp, Artificial Sequence
  derived and/or modified sequence
atggagtgtttgagatcccttccctgtctgctgccacgtgcaatgagactaccacgccgaaccttgtgcgccttggcgctggacgttacctccgtggggccacctgtagccgcctgcggacggagggccaatcttattggaaggtctagagcagcccagttgtgtggacctgatcgcctcagggtcgctggcgaagtgcaccgcttccgtacctccgacgtgtcccaagctactctggcctctgtagcacccgtattcacagtgactaaattcgataaacaaggcaatgtcacaagctttgaacgcaaaaagactgagctgtaccaggagctgggattgcaggctagggacctgcggtttcagcatgtcatgtccataactgtccgcaataatcgaatcataatgaggatggagtaccttaaggctgtgatcactcctgaatgcctccttattctggactacagaaaccttaaccttgagcagtggctgttccgagaactgccttcccaactgtcaggagagggccagctagtgacctacccgttgccttttgaattcagagccattgaagctttactgcagtattggattaatactctccagggcaagctgtccattctgcagcccctgatactcgaaaccctggacgctctggtcgacccgaaacactcgagcgtggaccgaagtaaactccacatcttgctgcagaacggaaagtctctctcagaactggaaaccgacattaaaatctttaaggaaagcatcttggaaatcctggacgaggaggagcttctggaagaactatgcgtatcaaaatggtctgaccctcaggtctttgaaaaaagttccgctgggattgaccacgcggaagaaatggagttacttttagaaaattactatagactcgcggacgatctctctaacgccgccagagaactcagagtcctgatcgacgacagccagagcatcattttcataaacttagactcgcaccggaatgtgatgatgcgtctgaacttgcagctcactatggggactttctcattatccctatttggtttgatgggggtggcttttggcatgaacctggaatcaagtctggaagaggaccataggattttttggttgattaccggaataatgtttatgggaagtgggttaatctggagaagactgctgagtttcttgggcagacagctggaggctcctttgccccccatggtctag

SEQ ID NO: 104544 - DNA, 1227 bp, Artificial Sequence
  derived and/or modified sequence
atggagtgcctgcggagcctgccctgcctgctgccccgggccatgaggctgcccaggaggaccctgtgtgccctggccctggatgtgacctctgtgggcccccctgtggccgcctgtggcagaagagccaacctgattggccgcagcagagctgcccagctgtgtggccctgaccggctgcgggtggccggggaggtgcaccgcttccgcaccagtgatgtgtcccaggccaccctggcctctgtggcccctgtgttcaccgtgaccaagtttgacaagcagggcaatgtgaccagctttgagaggaagaagacagagctgtaccaggagctgggcctgcaggcccgggacctgcgcttccagcacgtgatgagcatcaccgtgaggaacaaccgcatcatcatgaggatggagtacctgaaggccgtcatcaccccagaatgtctgctgatcctggactacagaaacctgaacctggagcagtggctgttccgggagctgcccagccagctgagcggggagggccagctggtgacctaccccctgccctttgagttccgggccatcgaggccctgctgcagtactggatcaacaccctgcagggcaagctgagcatcctgcagcccctcatcctggagaccctggatgccctggtggaccccaagcacagctctgtggacaggagcaagctgcacatcctgctgcagaatggcaagagcctgtctgagctggagacagacatcaagatcttcaaggagagcatcctggagatcctggatgaggaggagctgctggaggagctgtgtgtgtccaagtggagcgacccccaggtgtttgagaagagcagcgctggcatcgaccatgctgaggagatggagctgctgctggagaactactaccgcctggctgatgacctgagcaatgctgcccgggagctgcgggtgctgattgatgacagccagagcatcatcttcatcaacctggacagccacagaaatgtgatgatgaggctgaacctgcagctgaccatgggcaccttcagcctgagcctgtttggcctgatgggcgtggccttcggcatgaacctggagagcagcctggaggaggaccaccgcatcttctggctgatcaccggcatcatgttcatgggcagcggcctcatctggaggcggctgctgtccttcctgggccggcagctggaggcccccctgccccccatggtgtag

SEQ ID NO: 104545 - DNA, 1740 bp, Artificial Sequence
  derived and/or modified sequence
gcggtagcgacaggtcagagctgcggcctgagcagccagcgtccggcatgaaggtctggggtctggctgctgcctgcttcttgctccagcaccatggaatgcctgcgcagtttaccctgcctcctgccccgcgcgatgagacttccccggcggacgctgtgtgccctggccttggacgtgacctctgtgggtcctcccgttgctgcctgcggccgccgagccaacctgattggaaggagccgagcggcgcagctttgcgggcccgaccggctccgcgtggcaggtgaagtgcaccggtttagaacctctgacgtctctcaagccactttagccagtgtagccccagtatttactgtgacaaaatttgacaaacagggaaacgttacttcttttgaaaggaagaaaactgaattataccaagagttaggtcttcaagccagagatttgagatttcagcatgtaatgagtatcacagtcagaaacaataggattatcatgagaatggagtatttgaaagctgtgataactccagagtgtcttctgatattagattatcgtaatttaaacttagagcaatggctgttccgggaactcccttcacagttgtctggagagggtcaactcgttacataccctttaccttttgagtttagagctatagaagcactcctgcaatattggatcaacacccttcaggggaaacttagcattttgcagccactgatccttgagaccttggatgctttggtggaccccaaacattcttctgtagacagaagcaaactgcacattttactacagaatggcaaaagtctatcagagttagaaacagatattaaaattttcaaagagtcaattttggagatcttggatgaggaagagttgctagaagagctctgtgtatcaaaatggagtgacccacaagtctttgaaaagagcagtgctgggattgaccatgcagaagagatggagttgctgttggaaaactactaccgattggctgacgatctctccaatgcagctcgtgagcttagggtgctgattgatgattcacaaagtattattttcattaatctggacagccaccgaaacgtgatgatgaggttgaatctacagctgaccatgggaaccttctctctttcgctctttggactaatgggagttgcttttggaatgaatttggaatcttcccttgaagaggaccatagaattttttggctgattacaggaattatgttcatgggaagtggcctcatctggaggcgcctgctttcattccttggacgacagctagaagctccattgcctcctatggtatgaaggatatggttcacggcggtattgtggaagggttatgatcatgggccctaaagtcagagcgcctgggattaagttgtcacaggcactatggcccttgcgagttgctttctcaaacttccttcagtttccctatctgtcagttaagtcggtattacctgcttcatagggttatgggaagaattaaacaatatgtgtaaagcacttactagcacactgcctaacacaataagttagaaatataatttgtgtagaactctgacaacatacatttaaacagatgttagtaattctggtataaggtttgtcataaccaaatggaaatgtaggaaacatttataacgttcttaaaagatagaaaattcacctccattttctttgtacttgaagatggcaccactggaataaatacttaagacactg

SEQ ID NO: 104546 - DNA, 1227 bp, Artificial Sequence
  derived and/or modified sequence
atggagtgcctgcggagcctgccctgcctgctgccccgggccatgcggcttcccaggcgcactctctgcgcattggccctcgacgtcacgagcgtcggcccaccagtggccgcatgtggccggcgggccaacctgatcggacggtcacgggcagcccagctctgcgggccagacagactccgagtggccggcgaggtgcacagatttcgcacctcggacgtctctcaggctacactggcctccgtagccccagtgtttacggtaactaagttcgataagcagggcaatgtgacaagttttgagaggaaaaagactgagctgtatcaagagttgggactgcaggccagggaccttagattccagcatgtgatgagcattaccgttcgcaacaatcgtattattatgcgaatggagtacctgaaagcagtgatcacccctgagtgtctgcttatactggattatcgcaatctaaacctggagcagtggctgttccgcgagctgcctagtcaattatccggtgaggggcagttagtcacttaccctctgcccttcgagttcagggcaatcgaggcccttctacagtactggattaacaccctacagggaaaattgtcgatcttgcagcccctgatcctggagacattggatgctctggttgaccctaaacactcatctgtggatcggagtaagctccatatcctacttcaaaacggcaaaagtctgtctgaactggagaccgacatcaaaatctttaaagagagtattctcgaaatcctcgatgaggaagagctgttagaggagttatgtgtgagtaaatggtctgacccccaggtcttcgagaaaagcagtgcaggaattgaccacgccgaggaaatggagttgctgttagagaactactacaggttggcggacgatctgagcaacgcagcccgcgaactgcgcgtcctcatcgacgacagtcagtctatcatattcattaaccttgatagtcatagaaacgtgatgatgcggctcaatttacagcttactatggggacttttagtcttagcctgttcgggctgatgggggtagcctttggaatgaacttggagagttccctggaagaggaccacaggattttctggctgataaccgggatcatgttcatgggttccgggctgatttggagaagactgctctcatttttgggtcgacagctcgaagcccccctgcctcctatggtatag

SEQ ID NO: 104547 - DNA, 1227 bp, Artificial Sequence
  derived and/or modified sequence
atggaatgcctgaggtcacttccttgtcttctgccgcgtgccatgaggctcccacggagaacactgtgcgctctcgctctggatgtgacctccgtgggccctcccgtggccgcatgcgggagacgggcaaacttgatcggcagaagtcgcgctgcacaactgtgcgggcctgaccgattacgagtggcaggtgaggtccatagatttcgcacctctgatgttagccaggcaactctagcctcagtggctcctgtgtttacggtcactaaatttgataaacaagggaacgtaacctcatttgagagaaagaagactgaactgtaccaagagctcggcctgcaagccagagacctacgctttcaacacgtgatgagtattaccgtccgcaataatagaattatcatgcgcatggaatatctcaaagctgtcattaccccagagtgcctgctgatcctcgactatcggaatctgaatctggaacaatggctctttcgagaactaccatctcagctgtccggggaagggcagctagtcacctaccccttaccattcgagttccgcgcaatcgaggctctgttacagtactggatcaacactctgcagggcaaattgtctattttgcagccgctaattcttgagaccctcgacgccttggtggaccccaaacattcgtctgtggacagatccaagctgcacatcctgctccagaacggcaagtcactgagcgaactcgaaactgacatcaagatctttaaagaaagcatcttagagatactggatgaagaggagcttctcgaggagctgtgtgtttccaagtggtccgatccccaggtctttgagaagagcagcgcaggcatcgatcacgccgaagagatggaacttctgcttgaaaactactatagactcgctgacgatctgagtaacgccgctagagaacttagggtgctcatagacgacagtcagtccattattttcattaatctagacagccaccgcaacgtgatgatgaggctcaacctccagctcaccatgggtacattttctttaagcctcttcggactaatgggcgtggcttttggaatgaacctggagagctccttggaagaggatcatcggatattctggctgatcaccggtatcatgttcatgggaagcggtttgatatggaggcggctgctcagtttcctgggacgccaattggaggcccctctgcccccaatggtgtag

SEQ ID NO: 104548 - protein, 393 aa, Artificial Sequence
  derived and/or modified sequence
MECLRSLPCLLPRAMRLPRRTLCALALDVTSVGPPVAACGRRANLIGRSRAAQLCGPDRLRVAGEVHRFRTSDVSQATLASVAPVFTVYLKAVITPECLLILDYRNLNLEQWLFRELPSQLSGEGQLVTYPLPFEFRAIEALLQYWINTLQGKLSILQPLILETLDALVDPKHSSVDRSKLHILLQNGKSLSELETDIKIFKESILEILDEEELLEELCVSKWSDPQVFEKSSAGIDHAEEMELLLENYYRLADDLSNAARELRVLIDDSQSIIFINLDSHRNVMMRLNLQLTMGTFSLSLFGLMGVAFGMNLESSLEEDHRIFWLITGIMFMGSGLIWRRLLSFLGRQLEAPLPPMMASLPKKTLLADRSMELKNSLRLDGLGSGRSILTNR

SEQ ID NO: 104549 - DNA, 549 bp, Artificial Sequence
  derived and/or modified sequence
tgaagagccgcccagctgtgcggccccgacagactgagagtggccggcgaggtgcacagattcagaaccagcgacgtgagccaggccaccctggccagcgtggcccccgtgttcaccgtgaccaagttcgacaagcagggcaacgtgaccagcttcgagagaaagaagaccgagctgtaccaggagctggagaccgacatcaagatcttcaaggagagcatcctggagatcctggacgaggaggagctgctggaggagctgtgcgtgagcaagtggagcgacccccaggtgttcgagaagagcagcgccggcatcgaccacgccgaggagatggagctgctgctggagaactactacagactggccgacgacctgagcaacgccgccagagagctgagagtgctgatcgacgacagccagagcatcatcttcatcaacctggacagccacagaaacgtgatgatgagactgaacctgcagctgaccatgggcaccttcagcctgagcctgttcggcctgatgggcgtggccttcggcatgaacctgtag

SEQ ID NO: 104550 - DNA, 1182 bp, Artificial Sequence
  derived and/or modified sequence
atggagtgcctgagaagcctgccctgcctgctgcccagagccatgagactgcccagaagaaccctgtgcgccctggccctggacgtgaccagcgtgggcccccccgtggccgcctgcggcagaagagccaacctgatcggcagaagcagagccgcccagctgtgcggccccgacagactgagagtggccggcgaggtgcacagattcagaaccagcgacgtgagccaggccaccctggccagcgtggcccccgtgttcaccgtgtacctgaaggccgtgatcacccccgagtgcctgctgatcctggactacagaaacctgaacctggagcagtggctgttcagagagctgcccagccagctgagcggcgagggccagctggtgacctaccccctgcccttcgagttcagagccatcgaggccctgctgcagtactggatcaacaccctgcagggcaagctgagcatcctgcagcccctgatcctggagaccctggacgccctggtggaccccaagcacagcagcgtggacagaagcaagctgcacatcctgctgcagaacggcaagagcctgagcgagctggagaccgacatcaagatcttcaaggagagcatcctggagatcctggacgaggaggagctgctggaggagctgtgcgtgagcaagtggagcgacccccaggtgttcgagaagagcagcgccggcatcgaccacgccgaggagatggagctgctgctggagaactactacagactggccgacgacctgagcaacgccgccagagagctgagagtgctgatcgacgacagccagagcatcatcttcatcaacctggacagccacagaaacgtgatgatgagactgaacctgcagctgaccatgggcaccttcagcctgagcctgttcggcctgatgggcgtggccttcggcatgaacctggagagcagcctggaggaggaccacagaatcttctggctgatcaccggcatcatgttcatgggcagcggcctgatctggagaagactgctgagcttcctgggcagacagctggaggcccccctgccccccatgatggccagcctgcccaagaagaccctgctggccgacagaagcatggagctgaagaacagcctgagactggacggcctgggcagcggcagaagcatcctgaccaacagatag

SEQ ID NO: 104551 - DNA, 459 bp, Artificial Sequence
  derived and/or modified sequence
atggagctgctgctggagaactactacagactggccgacgacctgagcaacgccgccagagagctgagagtgctgatcgacgacagccagagcatcatcttcatcaacctggacagccacagaaacgtgatgatgagactgaacctgcagctgaccatgggcaccttcagcctgagcctgttcggcctgatgggcgtggccttcggcatgaacctggagagcagcctggaggaggaccacagaatcttctggctgatcaccggcatcatgttcatgggcagcggcctgatctggagaagactgctgagcttcctgggcagacagctggaggcccccctgccccccatgatggccagcctgcccaagaagaccctgctggccgacagaagcatggagctgaagaacagcctgagactggacggcctgggcagcggcagaagcatcctgaccaacagatag

SEQ ID NO: 104552 - DNA, 549 bp, Artificial Sequence
  derived and/or modified sequence
taacgggcagcccaactgtgcgggcccgacagactacgtgtggccggcgaagtacacaggtttcggacatctgacgtgtctcaggccacactggctagtgtggcccccgttttcaccgtgaccaaatttgataagcagggtaacgttaccagtttcgagaggaagaagaccgaactgtaccaggagctggagacagatattaaaatcttcaaggagagcatccttgagattctcgatgaagaggagctcctggaagaattatgcgttagtaaatggagcgacccccaagttttcgaaaagagttccgcaggtatcgatcatgctgaagagatggagcttctcctggagaactattaccggctcgcagatgacctctccaatgcggctagagaattgcgtgttttaattgacgattcacaaagcatcatcttcatcaatctggactcccatcgcaacgtcatgatgcgtctgaacctgcaactaacgatggggaccttctcactaagcctctttggcctcatgggcgtcgcatttgggatgaacctgtag

SEQ ID NO: 104553 - DNA, 1182 bp, Artificial Sequence
  derived and/or modified sequence
atggagtgcctgcgatcccttccatgcctgcttcctcgtgcaatgagactgccaagacgcacactctgcgcattggcacttgatgtgacctccgtcgggcctcctgtggccgcatgcgggcggagggccaatctcattggcagatctcgtgccgcccagctgtgcggccccgaccggttgagggtggctggcgaggtgcatcgcttccgcacatcagatgtctctcaggccactctcgcgtctgtggccccagtttttaccgtctacttaaaagccgtgataactcccgagtgcctactaattctagactacaggaacctaaatttagaacagtggctctttagggaactgccaagtcagctgtctggggaagggcaattggtgacataccctctgcccttcgaatttagggctattgaagccctgctccagtattggataaacaccttgcagggtaaattgtccatcctgcagccattgattctcgagacacttgatgctctggtggacccaaaacactcatccgtagataggtcaaagctgcacatcctgttgcagaatggcaagagcctgtctgaactcgaaaccgatattaaaatttttaaagagagcatcctggagattctagatgaagaagaactgctcgaggagctctgtgtgtcaaagtggagtgacccacaggtcttcgagaagtccagcgccggcatagatcatgcggaagaaatggagttattgctggaaaattattatcgccttgccgacgacctctctaatgccgcccgcgagctgcgcgtgctgatcgacgactcccagtcaatcatattcatcaatctggatagccacaggaatgtcatgatgagactcaacctccagctgacaatggggacatttagcctttctctctttggtctgatgggggtagccttcgggatgaacttggagagctctctagaggaggaccatcgaattttctggctcatcactggaatcatgttcatggggtcaggccttatttggcgcagactcctgtcatttttgggaaggcagctagaggcacctctcccccccatgatggccagcctgcccaaaaaaacactgctagctgatagatccatggagttaaagaacagccttagattggatggactgggctctggccgtagtatcttgaccaaccggtag

SEQ ID NO: 104554 - DNA, 459 bp, Artificial Sequence
  derived and/or modified sequence
atggagttgctgttggaaaactactaccgactggccgacgacctctccaacgccgcacgcgagttgagggtgctaattgacgattcccagtctataatatttatcaatctggactcacatcgcaacgtgatgatgcgcctgaacctgcaattaacaatggggacctttagcctctctctgttcggtctgatgggagtggcttttggcatgaatttagagtctagtttagaggaggaccacagaatcttctggcttattacaggcattatgttcatggggagtggcctgatctggaggagactactatcattcctcggacggcagttggaggcaccgttaccaccaatgatggcatcactgcccaaaaaaacattgctggccgatagatccatggagcttaaaaactcacttcgcctcgacgggctagggagtggtaggtctatacttaccaatcgatag

SEQ ID NO: 104555 - DNA, 549 bp, Artificial Sequence
  derived and/or modified sequence
tgaagagctgcccagctgtgtggccctgaccggctgcgggtggccggggaggtgcaccgcttccgcaccagtgatgtgtcccaggccaccctggcctctgtggcccctgtgttcaccgtgaccaagtttgacaagcagggcaatgtgaccagctttgagaggaagaagacagagctgtaccaggagctggagacagacatcaagatcttcaaggagagcatcctggagatcctggatgaggaggagctgctggaggagctgtgtgtgtccaagtggagcgacccccaggtgtttgagaagagcagcgctggcatcgaccacgccgaggagatggagctgctgctggagaactactaccgcctggctgatgacctgagcaatgctgcccgggagctgcgggtgctgattgatgacagccagagcatcatcttcatcaacctggacagccacagaaatgtgatgatgaggctgaacctgcagctgaccatgggcaccttcagcctgagcctgtttggcctgatgggcgtggccttcggcatgaacctgtag

SEQ ID NO: 104556 - DNA, 1182 bp, Artificial Sequence
  derived and/or modified sequence
atggagtgcctgcggagcctgccctgcctgctgccccgggccatgaggctgcccaggaggaccctgtgtgccctggccctggatgtgacctctgtgggcccccctgtggccgcctgtggcagaagagccaacctgattggccgcagcagagctgcccagctgtgtggccctgaccggctgcgggtggccggggaggtgcaccgcttccgcaccagtgatgtgtcccaggccaccctggcctctgtggcccctgtgttcaccgtgtacctgaaggccgtcatcaccccagaatgtctgctgatcctggactacagaaacctgaacctggagcagtggctgttccgggagctgcccagccagctgagcggggagggccagctggtgacctaccccctgccctttgagttccgggccatcgaggccctgctgcagtactggatcaacaccctgcagggcaagctgagcatcctgcagcccctcatcctggagaccctggatgccctggtggaccccaagcacagctctgtggacaggagcaagctgcacatcctgctgcagaatggcaagagcctgtctgagctggagacagacatcaagatcttcaaggagagcatcctggagatcctggatgaggaggagctgctggaggagctgtgtgtgtccaagtggagcgacccccaggtgtttgagaagagcagcgctggcatcgaccatgctgaggagatggagctgctgctggagaactactaccgcctggctgatgacctgagcaatgctgcccgggagctgcgggtgctgattgatgacagccagagcatcatcttcatcaacctggacagccacagaaatgtgatgatgaggctgaacctgcagctgaccatgggcaccttcagcctgagcctgtttggcctgatgggcgtggccttcggcatgaacctggagagcagcctggaggaggaccaccgcatcttctggctgatcaccggcatcatgttcatgggcagcggcctcatctggaggcggctgctgtccttcctgggccggcagctggaggcccccctgccccccatgatggccagcctgcccaagaagaccctgctggccgaccgctccatggagctgaagaacagcctgcggctggatggcctgggcagcggccgcagcatcctgaccaacagatag

SEQ ID NO: 104557 - DNA, 459 bp, Artificial Sequence
  derived and/or modified sequence
atggagctgctgctggagaactactaccgcctggctgatgacctgagcaatgctgcccgggagctgcgggtgctgattgatgacagccagagcatcatcttcatcaacctggacagccacagaaatgtgatgatgaggctgaacctgcagctgaccatgggcaccttcagcctgagcctgtttggcctgatgggcgtggccttcggcatgaacctggagagcagcctggaggaggaccaccgcatcttctggctgatcaccggcatcatgttcatgggcagcggcctcatctggaggcggctgctgtccttcctgggccggcagctggaggcccccctgccccccatgatggccagcctgcccaagaagaccctgctggccgaccgctccatggagctgaagaacagcctgcggctggatggcctgggcagcggccgcagcatcctgaccaacagatag

SEQ ID NO: 104558 - DNA, 546 bp, Artificial Sequence
  derived and/or modified sequence
gccgagcggcgcagctttgcgggcccgaccggctccgcgtggcaggtgaagtgcaccggtttagaacctctgacgtctctcaagccactttagccagtgtagccccagtatttactgtgacaaaatttgacaaacagggaaacgttacttcttttgaaaggaagaaaactgaattataccaagagttagaaacagatattaaaattttcaaagagtcaattttggagatcttggatgaggaagagttgctagaagagctctgtgtatcaaaatggagtgacccacaagtctttgaaaagagcagtgctgggattgaccatgcagaagagatggagttgctgttggaaaactactaccgattggctgacgatctctccaatgcagctcgtgagcttagggtgctgattgatgattcacaaagtattattttcattaatctggacagccaccgaaacgtgatgatgaggttgaatctacagctgaccatgggaaccttctctctttcgctctttggactaatgggagttgcttttggaatgaatttgg

SEQ ID NO: 104559 - DNA, 1622 bp, Artificial Sequence
  derived and/or modified sequence
acagagtctgcaggtcgggcggtagcgacaggtcagagctgcggcctgagcagccagcgtccggcatgaaggtctggggtctggctgctgcctgcttcttgctccagcaccatggaatgcctgcgcagtttaccctgcctcctgccccgcgcgatgagacttccccggcggacgctgtgtgccctggccttggacgtgacctctgtgggtcctcccgttgctgcctgcggccgccgagccaacctgattggaaggagccgagcggcgcagctttgcgggcccgaccggctccgcgtggcaggtgaagtgcaccggtttagaacctctgacgtctctcaagccactttagccagtgtagccccagtatttactgtgtatttgaaagctgtgataactccagagtgtcttctgatattagattatcgtaatttaaacttagagcaatggctgttccgggaactcccttcacagttgtctggagagggtcaactcgttacataccctttaccttttgagtttagagctatagaagcactcctgcaatattggatcaacacccttcaggggaaacttagcattttgcagccactgatccttgagaccttggatgctttggtggaccccaaacattcttctgtagacagaagcaaactgcacattttactacagaatggcaaaagtctatcagagttagaaacagatattaaaattttcaaagagtcaattttggagatcttggatgaggaagagttgctagaagagctctgtgtatcaaaatggagtgacccacaagtctttgaaaagagcagtgctgggattgaccatgcagaagagatggagttgctgttggaaaactactaccgattggctgacgatctctccaatgcagctcgtgagcttagggtgctgattgatgattcacaaagtattattttcattaatctggacagccaccgaaacgtgatgatgaggttgaatctacagctgaccatgggaaccttctctctttcgctctttggactaatgggagttgcttttggaatgaatttggaatcttcccttgaagaggaccatagaattttttggctgattacaggaattatgttcatgggaagtggcctcatctggaggcgcctgctttcattccttggacgacagctagaagctccattgcctcctatgatggcttctttacctaaaaagactcttctggcagatagaagcatggaattgaaaaatagcctcagactggatggacttggatcaggaaggagcatcctaacaaaccgttaggaacagccccgtggatactgaagttttttttatggtagttacaggaaacttctgatactctttttattattttcttgtatagagtcagacacttgaaaaaaactaatgtttgaagacaaaaatattttggcagtcacaataccagaactggattgcatttccagaattctgagttaaagaaacaaagtatttgctttgtaaaaggccaaaattctatttcctacaaactttaaatgctgtttttatagatgtgatatgaggcaacacaagcacagacagttgcatagattttaatttatacatatcaagaaaagtgcaatttcatgctg

SEQ ID NO: 104560 - DNA, 1591 bp, Artificial Sequence
  derived and/or modified sequence
ggtgcacagagtctgcaggtcgggcggtagcgacaggtcagagctgcggcctgagcagccagcgtccggcatgaaggtctggggtctggctgctgcctgcttcttgctccagcaccatggaatgcctgcgcagtttaccctgcctcctgccccgcgcgatgagacttccccggcggacgctgtgtgccctggccttggacgtgacctctgtgggtcctcccgttgctgcctgcggccgccgagccaacctgattggaaggagccgagcggcgcagctttgcgggcccgaccggctccgcgtggcagacaaaatttgacaaacagggaaacgttacttcttttgaaaggaagaaaactgaattataccaagagttaggtcttcaagccagagatttgagatttcagcatgtaatgagtatcacagtcagaaacaataggattatcatgagaatggagtatttgaaagctgtgataactccagagtgtcttctgatattagattatcgtaatttaaacttagagcaatggctgttccgggaactcccttcacagttgtctggagagggtcaactcgttacataccctttaccttttgagtttagagctatagaagcactcctgcaatattgggtcatgttgttatctagatcaacacccttcaggggaaacttagcattttgcagccactgatccttgagaccttggatgctttggtggaccccaaacattcttctgtagacagaagcaaactgcacattttactacagaatggcaaaagtctatcagagttagaaacagatattaaaattttcaaagagtcaattttggagatcttggatgaggaagagttgctagaagagctctgtgtatcaaaatggagtgacccacaagtctttgaaaagagcagtgctgggattgaccatgcagaagagatggagttgctgttggaaaactactaccgattggctgacgatctctccaatgcagctcgtgagcttagggtgctgattgatgattcacaaagtattattttcattaatctggacagccaccgaaacgtgatgatgaggttgaatctacagctgaccatgggaaccttctctctttcgctctttggactaatgggagttgcttttggaatgaatttggaatcttcccttgaagaggaccatagaattttttggctgattacaggaattatgttcatgggaagtggcctcatctggaggcgcctgctttcattccttggacgacagctagaagctccattgcctcctatgatggcttctttacctaaaaagactcttctggcagatagaagcatggaattgaaaaatagcctcagactggatggacttggatcaggaaggagcatcctaacaaaccgttaggaacagccccgtggatactgaagttttttttatggtagttacaggaaacttctgatactctttttattattttcttgtatagagtcagacacttgaaaaaaactaatgtttgaagacaaaaatattttggcagtcacaataccagaactggattgcatttccagaattctgagttaaagaaacaaagtatttgctttgta

SEQ ID NO: 104561 - DNA, 549 bp, Artificial Sequence
  derived and/or modified sequence
tgacgggccgcccagctgtgcggccccgaccggctgcgggtggccggcgaggtccaccggttcaggactagcgacgtgtctcaggcaacccttgccagcgtggctccagtgttcacggttaccaagtttgataagcagggcaacgtgacatcttttgagagaaaaaaaacagagctgtatcaggaactggaaacagacattaaaatttttaaagaatccatcttagagatcctggacgaagaggaacttctagaggagttatgtgttagtaaatggagcgatccccaggtttttgagaaaagcagcgcaggaatcgaccacgccgaggaaatggagctgctattagagaactactatcgcctcgctgatgacctgtctaatgcagcccgtgagctgagagttcttattgatgattcacagagcatcatctttatcaaccttgacagtcatagaaatgtcatgatgcgcctcaaccttcaactcacaatgggcactttttcattgtcccttttcggcctgatgggcgttgcgtttggcatgaatttatag

SEQ ID NO: 104562 - DNA, 1182 bp, Artificial Sequence
  derived and/or modified sequence
atggagtgcctgcggagcctgccctgcctgctgccccgggccatgaggctgccgagaaggactctgtgcgccctggccctggacgttacgtcagtgggtccccccgtggcagcctgcggccgacgcgcgaatctaatcggccggtcaagggctgcgcaattgtgtggccccgacaggctaagagttgccggagaggtccatcggttccggacctcagacgtcagccaggccactttggcaagcgtagcgccggtattcacagtctaccttaaagccgttattactcccgagtgtctactgattttagactacaggaacctgaatctcgagcaatggctcttcagagagctgccttcacagctcagtggcgagggccagctggttacctatcctcttccctttgaattcagagctatcgaagcactccttcagtattggatcaatacattgcagggcaaactctcaatactgcaacctctgatcctggaaaccctggacgcgcttgtggaccctaagcattcctctgttgaccgcagcaaactgcacattcttttgcagaacggcaaaagtctgagcgaactggagactgatatcaaaatcttcaaagaatccatcttggaaattctggatgaagaggaactgttggaagagctatgcgtgtccaagtggtccgatccccaagtgtttgagaaatcctctgcgggcatcgatcacgccgaggagatggaattactactggaaaattattaccgcctggctgacgacctctccaatgccgcaagggagcttcgcgttcttattgacgactcccagtccattatctttatcaacctggactcacaccgcaacgtgatgatgagactgaacctgcagctgactatgggaacatttagcctgtctctcttcgggcttatgggtgttgctttcggcatgaatttggaatctagcctggaggaggaccaccgaatattctggcttattactggcatcatgttcatgggcagcgggctcatatggcgacggctgctctccttcctgggacggcagctggaggctccccttcccccaatgatggcctccctgcccaaaaagacgcttctcgccgatcgtagtatggaacttaagaattctcttagattggacggccttgggagtggacgctccattttaacgaatcgctag

SEQ ID NO: 104563 - DNA, 459 bp, Artificial Sequence
  derived and/or modified sequence
atggagctgctgctggagaactactaccggctggccgacgacctgtcaaatgcagcacgcgagctgcgcgtgttaatcgacgattcacagagtatcatcttcattaatctggattcccatcgcaatgtgatgatgagacttaacctgcaattgacaatgggtaccttctccttgagcctgtttggactcatgggggtggcatttggaatgaatctggagtcatcgctcgaggaagatcaccgcatattctggctcattactgggattatgttcatgggttcaggattgatatggcgcaggctgcttagcttcctgggtcggcagctggaggcccccctgccacctatgatggcatccttacccaaaaaaactctgctcgcggaccgcagcatggagctgaaaaacagcttgcgcctagatggcctgggatctggaaggtcaattctgacgaataggtag

SEQ ID NO: 104564 - DNA, 549 bp, Artificial Sequence
  derived and/or modified sequence
tgaagggccgcacagctgtgtggcccagatcgacttagggtcgcaggcgaggttcatcggtttcgtacgagcgacgtttcccaggccacattggcttccgtggccccagtgtttaccgttaccaagtttgataaacaaggcaatgttactagctttgagaggaagaaaactgagctgtatcaagaactggaaaccgacattaagatctttaaggaaagcatcctcgaaatcctggacgaagaggaactactggaagagctttgcgtctccaaatggtcagatccgcaagtgtttgaaaaatcatccgctggcatagaccatgccgaagagatggagctgcttctggagaactactaccgcctggccgatgacctgtctaatgcagccagggaactccgggtgctgatcgacgactctcaaagcatcatcttcatcaatctcgattctcacaggaatgtaatgatgagattgaatctccagctgaccatggggaccttcagtctgtccctttttggcctgatgggggtggcatttggcatgaatctttag

SEQ ID NO: 104565 - DNA, 1182 bp, Artificial Sequence
  derived and/or modified sequence
atggaatgcctccgctcgttaccttgcctgctgcccagagccatgcgtctgccaaggagaacactgtgtgccctcgcccttgatgtgaccagcgtcggcccaccagtggccgcatgcgggaggcgggctaatttgattggacggtctcgagctgcacagttatgcggccctgatagactgcgggttgctggcgaagtgcatcgtttccggacctccgacgtgagtcaggctactctcgccagcgtagcgcctgtcttcaccgtctatttgaaggcggtaattactcccgagtgcctcctgatcttggattaccgtaatctgaatctggagcaatggttgtttcgcgaactcccctctcagctaagtggcgagggccaactcgtgacttaccctctacctttcgaattccgggctattgaagccctgctgcagtattggattaacaccctgcagggcaagttatccattttgcagcccttaatcctggagacattagatgctctcgtggaccctaagcacagctccgttgacaggagtaagttgcacatcttgctgcaaaatggaaagtcattaagcgaacttgagactgatatcaagatcttcaaggagagcatcctggagattctcgatgaagaggaactgcttgaagagctctgcgtgtcaaaatggagcgacccccaggtatttgagaaaagttctgcgggaatcgaccacgccgaggagatggaactccttctggagaactactatcgcctagcagatgatctgtctaacgcagccagggagctgcgggtgctgatcgacgactctcagtcaatcatctttattaacctagatagtcaccgaaatgtgatgatgcgtctgaatctgcagttgaccatggggacttttagcctgagcctctttggtctgatgggcgtggcttttggcatgaatcttgagtcgagcctggaagaagatcatcgcattttttggttaatcaccgggattatgtttatgggatctggcttgatctggcgcaggctcctgtccttcctcggtagacagttagaggccccactgccaccaatgatggccagcttgccaaagaaaacccttctggccgataggtccatggaacttaaaaactcattgcgattggacgggctgggctccggtcgcagcatcctgacaaacaggtag

SEQ ID NO: 104566 - DNA, 459 bp, Artificial Sequence
  derived and/or modified sequence
atggaacttctcctggagaattattaccgactggctgacgatctctccaacgccgctagggagctgcgcgtgctgatcgatgactcgcagtctataatattcattaatctggacagtcacaggaacgtgatgatgcggctgaacctacagctcactatggggactttctccttgtctcttttcggtctgatgggggttgcttttggaatgaatcttgagagtagcctggaggaggaccataggatcttttggctgattactgggatcatgttcatgggaagtggcctgatctggcgcagactcctaagcttcctgggtcgacagttagaagctccgctgccacctatgatggcctcacttcccaagaaaacattgcttgccgaccgatccatggagcttaagaatagcctgcggctcgatggtctgggctctggtcggtccatcctaacgaaccgctag

SEQ ID NO: 104567 - DNA, 417 bp, Artificial Sequence
  derived and/or modified sequence
atggtgagcagaaccgagggcaacatcgacgacagcctgatcggcggcaacgccagcgccgagggccccgagggcgagggcaccgagagcaccgtgatcaccggcgtggacatcgtgatgaaccaccacctgcaggagaccagcttcaccaaggaggcctacaagaagtacatcaaggactacatgaagagcatcaagggcaagctggaggagcagagacccgagagagtgaagcccttcatgaccggcgccgccgagcagatcaagcacatcctggccaacttcaagaactaccagttcttcatcggcgagaacatgaaccccgacggcatggtggccctgctggactacagagaggacggcgtgaccccctacatgatcttcttcaaggacggcctggagatggagaagtgctag

SEQ ID NO: 104568 - DNA, 417 bp, Artificial Sequence
  derived and/or modified sequence
atggtttctagaacagagggcaatatcgatgattctctgatcgggggaaacgcatcagctgaaggaccagaaggcgagggtaccgagagcacagtaatcaccggagtggatatagtgatgaatcaccacctgcaggagacttcattcaccaaggaagcatataagaaatatattaaggattacatgaagtccataaaaggaaagctggaggagcagagacctgagcgggtcaagccgttcatgacaggcgctgcagagcagatcaaacacatcctggctaactttaagaactatcagttcttcattggggagaatatgaatcccgatggcatggtcgcccttctggactaccgggaagatggcgtcaccccctatatgatctttttcaaggacggtttagaaatggagaaatgttag

SEQ ID NO: 104569 - DNA, 417 bp, Artificial Sequence
  derived and/or modified sequence
atggtgtccagaacagaaggcaatatcgacgacagtttgattggcggcaacgctagcgccgaaggccccgagggagagggtaccgaatccaccgtgatcactggcgttgacatcgtgatgaaccaccatctccaagagactagttttacgaaggaggcctacaaaaagtacattaaagattacatgaagtctattaaggggaaactggaagaacagcggcccgagcgagtcaagccgttcatgacaggtgccgccgaacagatcaagcatatcctggctaacttcaaaaattatcagttcttcatcggcgaaaacatgaacccggacggcatggttgcattgctcgactatcgcgaggacggagtgaccccgtacatgatctttttcaaggatggactcgaaatggagaaatgttag

SEQ ID NO: 104570 - DNA, 417 bp, Artificial Sequence
  derived and/or modified sequence
atggtgtccaggacagagggcaacattgatgacagcctcatcggcggcaatgccagcgctgagggccctgagggggagggcacagagagcaccgtcatcaccggggtggacatcgtgatgaaccaccacctgcaggagaccagcttcaccaaggaggcctacaagaagtacatcaaggactacatgaagagcatcaagggcaagctggaggagcagaggcctgagcgggtgaagcccttcatgaccggggctgctgagcagatcaagcacatcctggccaacttcaagaactaccagttcttcatcggggagaacatgaacccagatggcatggtggccctgctggactacagagaagatggagtgaccccctacatgatcttcttcaaggatggcctggagatggagaagtgctag

SEQ ID NO: 104571 - DNA, 417 bp, Artificial Sequence
  derived and/or modified sequence
atggtgagccggaccgagggcaacatcgacgacagcctgatcggcggaaatgcgtccgcagaaggccctgagggtgaaggaacggagagcacagtcatcacaggggtggatatcgtcatgaatcatcacctacaggaaacaagctttacaaaggaggcctacaaaaagtacatcaaggattacatgaaatcgatcaaaggcaagcttgaagagcaaagacccgaaagggtgaagccatttatgacaggagcagctgaacaaatcaagcatatcttagccaatttcaagaactaccagttctttatcggtgaaaacatgaatcccgatggaatggttgcccttttggactatcgggaagatggagtaaccccatatatgattttcttcaaagacggtcttgaaatggagaaatgttag

SEQ ID NO: 104572 - DNA, 417 bp, Artificial Sequence
  derived and/or modified sequence
atggtgagccggaccgagggcaacatcgacgacagcctgatcggcggcaatgccagcgccgaaggacctgagggagagggcaccgagagcaccgtgatcacaggtgttgacatcgtcatgaatcatcacctccaggagacctcatttaccaaggaggcatacaagaagtatattaaggattacatgaagagcattaagggcaagctggaggagcagcgcccggagagggtcaaacccttcatgaccggagcggctgagcagatcaaacatatcctcgcgaacttcaaaaactaccagttcttcatcggcgagaatatgaatccggatggcatggtggcactgttggactatcgcgaagatggtgtgactccctatatgatcttcttcaaggatggcctggaaatggagaagtgctag

SEQ ID NO: 104573 - DNA, 417 bp, Artificial Sequence
  derived and/or modified sequence
atggtgtcaagaacagaaggaaatatagacgactcgctaatcggaggcaatgcctctgccgagggccctgaaggcgaagggaccgaaagcaccgtgatcactggagttgatatcgtgatgaatcatcatctgcaggaaacctctttcacaaaagaagcgtacaaaaagtatatcaaggactacatgaagtccatcaagggtaaacttgaagagcagaggcccgagagagtcaaaccttttatgaccggagcagctgaacaaatcaagcacatcctggccaatttcaagaactaccagtttttcattggagaaaacatgaaccctgacggcatggttgccctgttggactatcgagaagacggggtgaccccatatatgatcttttttaaggacgggctcgaaatggagaagtgttag

SEQ ID NO: 104574 - DNA, 417 bp, Artificial Sequence
  derived and/or modified sequence
atggtttcgagaaccgaagggaacatcgatgactccctcattggcggaaacgcctctgctgagggacctgaaggcgagggtaccgaaagcacagtgatcaccggagtggacatcgtgatgaaccaccacctgcaggagacatcatttacaaaggaagcctacaaaaaatacataaaggactacatgaagagcattaaagggaagctggaagagcagaggcccgagagagtgaagccctttatgacaggagccgcagaacaaattaagcatatcctggctaacttcaagaactatcagttttttatcggagaaaatatgaaccctgatggtatggtggcgctgctggactatagagaagacggcgtaacgccatacatgattttcttcaaagacgggttggaaatggagaaatgttag

SEQ ID NO: 104575 - DNA, 417 bp, Artificial Sequence
  derived and/or modified sequence
atggtgtctaggactgaaggaaacatagatgatagcctcataggggggaatgcatctgctgagggtcccgaaggtgagggcaccgagagcacagtgattacgggtgtagatatcgtgatgaatcaccaccttcaggagacctcgttcaccaaagaggcatataaaaaatacatcaaggactacatgaaatctattaaaggcaaactggaggagcaaagaccagaaagagtcaagccgtttatgacaggtgcagccgaacagatcaaacacatacttgccaatttcaagaattaccaattttttataggtgagaacatgaatccagatggaatggtagcgttgctagactacagggaagatggggtgactccgtacatgatttttttcaaagatggcctcgagatggaaaagtgctag

SEQ ID NO: 104576 - DNA, 417 bp, Artificial Sequence
  derived and/or modified sequence
atggtgtcacggactgagggaaacatcgacgacagtttaattgggggtaacgcaagcgcggaggggccagaaggcgaaggaacagagtccactgtcattactggtgtggatatcgtgatgaatcaccacctacaggagacatcatttacaaaggaagcctataaaaaatatatcaaagattacatgaagtctattaagggaaagcttgaggagcagcgccctgagcgagtgaagccatttatgacaggtgccgccgaacaaattaagcatatcctagcaaatttcaaaaattatcagttttttattggagaaaacatgaatccagacggcatggtcgccctgctggactaccgggaagatggggtcacaccttatatgatctttttcaaggacggtctcgaaatggaaaaatgttag

SEQ ID NO: 104577 - DNA, 417 bp, Artificial Sequence
  derived and/or modified sequence
atggtcagcaggactgaaggcaacattgacgattcattaatcggaggaaatgcaagtgcagaaggtccagagggggaggggacagaatcgaccgttattactggggtcgacattgtgatgaaccaccatctgcaggagactagtttcaccaaagaggcctacaagaagtatataaaggactacatgaagtcgattaaagggaagcttgaggagcaaagacctgaacgagttaaacccttcatgacaggagctgctgagcaaataaaacacatacttgcaaattttaagaattaccagttctttattggcgagaatatgaatcctgatggaatggtggcattactcgactacagagaagacggagttactccttatatgatttttttcaaggatgggctagaaatggaaaagtgttag

SEQ ID NO: 104578 - DNA, 417 bp, Artificial Sequence
  derived and/or modified sequence
atggtgtctcggaccgaaggcaatattgatgacagccttatcggtgggaatgcaagcgcagaaggacccgagggggaaggtacagaatctacagttataactggagtcgacatcgtgatgaaccatcatctgcaggagacctcatttaccaaggaagcttacaaaaagtacattaaagattacatgaaaagcattaagggaaaactggaggaacagcgacctgaacgtgttaaaccttttatgaccggcgccgctgagcagatcaaacatattctggctaactttaagaattaccagttttttatcggcgaaaacatgaaccccgacggcatggtagcactccttgactatagagaagacggcgtcactccatatatgatattcttcaaggatggcttggaaatggaaaagtgttag

SEQ ID NO: 104579 - DNA, 1101 bp, Artificial Sequence
  derived and/or modified sequence
atatgaggttggggagcggctgagtcggccttttccgcccgctcccccctccccccgagcgccgctccggctgcaccgcgctcgctccgagtttcaggctcgtgctaagctagcgccgtcgtcgtctcccttcagtcgccatcatgattatctaccgggacctcatcagccatggtcagtaggacagaaggtaacattgatgactcgctcattggtggaaatgcctccgctgaaggccccgagggcgaaggtaccgaaagcacagtaatcactggtgtcgatattgtcatgaaccatcacctgcaggaaacaagtttcacaaaagaagcctacaagaagtacatcaaagattacatgaaatcaatcaaagggaaacttgaagaacagagaccagaaagagtaaaaccttttatgacaggggctgcagaacaaatcaagcacatccttgctaatttcaaaaactaccagttctttattggtgaaaacatgaatccagatggcatggttgctctattggactaccgtgaggatggtgtgaccccatatatgattttctttaaggatggtttagaaatggaaaaatgttaacaaatgtggcaattattttggatctatcacctgtcatcataactggcttctgcttgtcatccacacaacaccaggacttaagacaaatgggactgatgtcatcttgagctcttcatttattttgactgtgatttatttggagtggaggcattgtttttaagaaaaacatgtcatgtaggttgtctaaaaataaaatgcatttaaactcatttgagagaatgccttttagtttaatgcatatttaaactaaattgatcctgtagtgttcctggagaagctagagcctgattgtaggctactactcatcaattaacttctacagtggagactacttctgggactggaatataaaaaagaatcaaaggttctgattttgagttgcaataaagggaaagaccatgctcatagcagtgccaacatctgaagtgtggagccttacccatttcatcacctacaacggaagtagttaactggaagagattaccaagagaataaaaagagactcattcagtg

SEQ ID NO: 104580 - protein, 654 aa, Artificial Sequence
  derived and/or modified sequence
MLSLLVWILTLSDTFSQGTQTRFSQEPADQTVVAGQRAVLPCVLLNYSGIVQWTKDGLALGMGQGLKAWPRYRVVGSADAGQYNLEITDAELSDDASYECQATEAALRSRRAKLTVLNPPTVTLSIEPQTVQEGERVVFTCQATANPEILGYRWAKGGFLIEDAHESRYETNVDYSFFTEPVSCEVHNKVGSTNVSTLVNVHFAPRIVVDPKPTTTDIGSDVTLTCVWVGNPPLTLTWTKKDSNMVLSNSNQLLLKSVTQADAGTYTCRAIVPRIGVAEREVPLYVNGPPIISSEAVQYAVRGDGGKVECFIGSTPPPDRIAWAWKENFLEVGTLERYTVERTNSGSGVLSTLTINNVMEADFQTHYNCTAWNSFGPGTAIIQLEEREVLPVGIIAGATIGASILLIFFFIALVFFLYRRRKGSRKDVTLRKLDIKVETVNREPLTMHSDREDDTASVSTATRVMKAIYSSFKDDVDLKQDLRCDTIDTREEYEMKDPTNGYYNVRAHEDRPSSRAVLYADYRAPGPARFDGRPSSRLSHSSGYAQLNTYSRGPASDYGPEPTPPGPAAPAGTDTTSQLSYENYEKFNSHPFPGAAGYPTYRLGYPQAPPSGLERTPYEAYDPIGKYATATRFSYTSQHSDYGQRFQQRMQTHV

SEQ ID NO: 104581 - protein, 657 aa, Artificial Sequence
  derived and/or modified sequence
MLSLLVWILTLSDTFSQVPPEDTRIDGGPVILLQAGTPHNLTCRAFNAKPAATIIWFRDGTQQEGAVASTELLKDGKRETTVSQLLINPTDLDIGRVFTCRSMNEAIPSGKETSIELDVHHPPTVTLSIEPQTVQEGERVVFTCQATANPEILGYRWAKGGFLIEDAHESRYETNVDYSFFTEPVSCEVHNKVGSTNVSTLVNVHFAPRIVVDPKPTTTDIGSDVTLTCVWVGNPPLTLTWTKKDSNMVLSNSNQLLLKSVTQADAGTYTCRAIVPRIGVAEREVPLYVNGPPIISSEAVQYAVRGDGGKVECFIGSTPPPDRIAWAWKENFLEVGTLERYTVERTNSGSGVLSTLTINNVMEADFQTHYNCTAWNSFGPGTAIIQLEEREVLPVGIIAGATIGASILLIFFFIALVFFLYRRRKGSRKDVTLRKLDIKVETVNREPLTMHSDREDDTASVSTATRVMKAIYSSFKDDVDLKQDLRCDTIDTREEYEMKDPTNGYYNVRAHEDRPSSRAVLYADYRAPGPARFDGRPSSRLSHSSGYAQLNTYSRGPASDYGPEPTPPGPAAPAGTDTTSQLSYENYEKFNSHPFPGAAGYPTYRLGYPQAPPSGLERTPYEAYDPIGKYATATRFSYTSQHSDYGQRFQQRMQTHV

SEQ ID NO: 104582 - DNA, 1782 bp, Artificial Sequence
  derived and/or modified sequence
atgggccagggcctgaaggcctggcccagatacagagtggtgggcagcgccgacgccggccagtacaacctggagatcaccgacgccgagctgagcgacgacgccagctacgagtgccaggccaccgaggccgccctgagaagcagaagagccaagctgaccgtgctgaacccccccaccgtgaccctgagcatcgagccccagaccgtgcaggagggcgagagagtggtgttcacctgccaggccaccgccaaccccgagatcctgggctacagatgggccaagggcggcttcctgatcgaggacgcccacgagagcagatacgagaccaacgtggactacagcttcttcaccgagcccgtgagctgcgaggtgcacaacaaggtgggcagcaccaacgtgagcaccctggtgaacgtgcacttcgcccccagaatcgtggtggaccccaagcccaccaccaccgacatcggcagcgacgtgaccctgacctgcgtgtgggtgggcaacccccccctgaccctgacctggaccaagaaggacagcaacatggtgctgagcaacagcaaccagctgctgctgaagagcgtgacccaggccgacgccggcacctacacctgcagagccatcgtgcccagaatcggcgtggccgagagagaggtgcccctgtacgtgaacggcccccccatcatcagcagcgaggccgtgcagtacgccgtgagaggcgacggcggcaaggtggagtgcttcatcggcagcacccccccccccgacagaatcgcctgggcctggaaggagaacttcctggaggtgggcaccctggagagatacaccgtggagagaaccaacagcggcagcggcgtgctgagcaccctgaccatcaacaacgtgatggaggccgacttccagacccactacaactgcaccgcctggaacagcttcggccccggcaccgccatcatccagctggaggagagagaggtgctgcccgtgggcatcatcgccggcgccaccatcggcgccagcatcctgctgatcttcttcttcatcgccctggtgttcttcctgtacagaagaagaaagggcagcagaaaggacgtgaccctgagaaagctggacatcaaggtggagaccgtgaacagagagcccctgaccatgcacagcgacagagaggacgacaccgccagcgtgagcaccgccaccagagtgatgaaggccatctacagcagcttcaaggacgacgtggacctgaagcaggacctgagatgcgacaccatcgacaccagagaggagtacgagatgaaggaccccaccaacggctactacaacgtgagagcccacgaggacagacccagcagcagagccgtgctgtacgccgactacagagcccccggccccgccagattcgacggcagacccagcagcagactgagccacagcagcggctacgcccagctgaacacctacagcagaggccccgccagcgactacggccccgagcccaccccccccggccccgccgcccccgccggcaccgacaccaccagccagctgagctacgagaactacgagaagttcaacagccaccccttccccggcgccgccggctaccccacctacagactgggctacccccaggccccccccagcggcctggagagaaccccctacgaggcctacgaccccatcggcaagtacgccaccgccaccagattcagctacaccagccagcacagcgactacggccagagattccagcagagaatgcagacccacgtgtag

SEQ ID NO: 104583 - DNA, 1965 bp, Artificial Sequence
  derived and/or modified sequence
atgctgagcctgctggtgtggatcctgaccctgagcgacaccttcagccagggcacccagaccagattcagccaggagcccgccgaccagaccgtggtggccggccagagagccgtgctgccctgcgtgctgctgaactacagcggcatcgtgcagtggaccaaggacggcctggccctgggcatgggccagggcctgaaggcctggcccagatacagagtggtgggcagcgccgacgccggccagtacaacctggagatcaccgacgccgagctgagcgacgacgccagctacgagtgccaggccaccgaggccgccctgagaagcagaagagccaagctgaccgtgctgaacccccccaccgtgaccctgagcatcgagccccagaccgtgcaggagggcgagagagtggtgttcacctgccaggccaccgccaaccccgagatcctgggctacagatgggccaagggcggcttcctgatcgaggacgcccacgagagcagatacgagaccaacgtggactacagcttcttcaccgagcccgtgagctgcgaggtgcacaacaaggtgggcagcaccaacgtgagcaccctggtgaacgtgcacttcgcccccagaatcgtggtggaccccaagcccaccaccaccgacatcggcagcgacgtgaccctgacctgcgtgtgggtgggcaacccccccctgaccctgacctggaccaagaaggacagcaacatggtgctgagcaacagcaaccagctgctgctgaagagcgtgacccaggccgacgccggcacctacacctgcagagccatcgtgcccagaatcggcgtggccgagagagaggtgcccctgtacgtgaacggcccccccatcatcagcagcgaggccgtgcagtacgccgtgagaggcgacggcggcaaggtggagtgcttcatcggcagcacccccccccccgacagaatcgcctgggcctggaaggagaacttcctggaggtgggcaccctggagagatacaccgtggagagaaccaacagcggcagcggcgtgctgagcaccctgaccatcaacaacgtgatggaggccgacttccagacccactacaactgcaccgcctggaacagcttcggccccggcaccgccatcatccagctggaggagagagaggtgctgcccgtgggcatcatcgccggcgccaccatcggcgccagcatcctgctgatcttcttcttcatcgccctggtgttcttcctgtacagaagaagaaagggcagcagaaaggacgtgaccctgagaaagctggacatcaaggtggagaccgtgaacagagagcccctgaccatgcacagcgacagagaggacgacaccgccagcgtgagcaccgccaccagagtgatgaaggccatctacagcagcttcaaggacgacgtggacctgaagcaggacctgagatgcgacaccatcgacaccagagaggagtacgagatgaaggaccccaccaacggctactacaacgtgagagcccacgaggacagacccagcagcagagccgtgctgtacgccgactacagagcccccggccccgccagattcgacggcagacccagcagcagactgagccacagcagcggctacgcccagctgaacacctacagcagaggccccgccagcgactacggccccgagcccaccccccccggccccgccgcccccgccggcaccgacaccaccagccagctgagctacgagaactacgagaagttcaacagccaccccttccccggcgccgccggctaccccacctacagactgggctacccccaggccccccccagcggcctggagagaaccccctacgaggcctacgaccccatcggcaagtacgccaccgccaccagattcagctacaccagccagcacagcgactacggccagagattccagcagagaatgcagacccacgtgtag

SEQ ID NO: 104584 - DNA, 1974 bp, Artificial Sequence
  derived and/or modified sequence
atgctgagcctgctggtgtggatcctgaccctgagcgacaccttcagccaggtgccccccgaggacaccagaatcgacggcggccccgtgatcctgctgcaggccggcaccccccacaacctgacctgcagagccttcaacgccaagcccgccgccaccatcatctggttcagagacggcacccagcaggagggcgccgtggccagcaccgagctgctgaaggacggcaagagagagaccaccgtgagccagctgctgatcaaccccaccgacctggacatcggcagagtgttcacctgcagaagcatgaacgaggccatccccagcggcaaggagaccagcatcgagctggacgtgcaccacccccccaccgtgaccctgagcatcgagccccagaccgtgcaggagggcgagagagtggtgttcacctgccaggccaccgccaaccccgagatcctgggctacagatgggccaagggcggcttcctgatcgaggacgcccacgagagcagatacgagaccaacgtggactacagcttcttcaccgagcccgtgagctgcgaggtgcacaacaaggtgggcagcaccaacgtgagcaccctggtgaacgtgcacttcgcccccagaatcgtggtggaccccaagcccaccaccaccgacatcggcagcgacgtgaccctgacctgcgtgtgggtgggcaacccccccctgaccctgacctggaccaagaaggacagcaacatggtgctgagcaacagcaaccagctgctgctgaagagcgtgacccaggccgacgccggcacctacacctgcagagccatcgtgcccagaatcggcgtggccgagagagaggtgcccctgtacgtgaacggcccccccatcatcagcagcgaggccgtgcagtacgccgtgagaggcgacggcggcaaggtggagtgcttcatcggcagcacccccccccccgacagaatcgcctgggcctggaaggagaacttcctggaggtgggcaccctggagagatacaccgtggagagaaccaacagcggcagcggcgtgctgagcaccctgaccatcaacaacgtgatggaggccgacttccagacccactacaactgcaccgcctggaacagcttcggccccggcaccgccatcatccagctggaggagagagaggtgctgcccgtgggcatcatcgccggcgccaccatcggcgccagcatcctgctgatcttcttcttcatcgccctggtgttcttcctgtacagaagaagaaagggcagcagaaaggacgtgaccctgagaaagctggacatcaaggtggagaccgtgaacagagagcccctgaccatgcacagcgacagagaggacgacaccgccagcgtgagcaccgccaccagagtgatgaaggccatctacagcagcttcaaggacgacgtggacctgaagcaggacctgagatgcgacaccatcgacaccagagaggagtacgagatgaaggaccccaccaacggctactacaacgtgagagcccacgaggacagacccagcagcagagccgtgctgtacgccgactacagagcccccggccccgccagattcgacggcagacccagcagcagactgagccacagcagcggctacgcccagctgaacacctacagcagaggccccgccagcgactacggccccgagcccaccccccccggccccgccgcccccgccggcaccgacaccaccagccagctgagctacgagaactacgagaagttcaacagccaccccttccccggcgccgccggctaccccacctacagactgggctacccccaggccccccccagcggcctggagagaaccccctacgaggcctacgaccccatcggcaagtacgccaccgccaccagattcagctacaccagccagcacagcgactacggccagagattccagcagagaatgcagacccacgtgtag

SEQ ID NO: 104585 - DNA, 1782 bp, Artificial Sequence
  derived and/or modified sequence
atggggcagggcctgaaggcctggcctaggtatcgagtggtagggtcagcagacgccggccaatacaatctggagattaccgacgccgaactgagtgacgacgcttcttacgaatgtcaggcaaccgaagcggccctccgcagtcgacgtgcaaaactgacggtactcaacccaccaaccgtgaccttatcaatcgaaccacagaccgtgcaggagggggagcgcgtggttttcacgtgtcaggctacagctaatcccgaaattctgggctaccgttgggcgaaaggggggtttttaattgaagacgctcacgagtcgcggtacgagacgaatgtggactactccttcttcactgagcccgtgtcttgcgaggtgcacaacaaagtcgggtccactaacgttagcacccttgtaaatgtgcatttcgctcccaggatcgtggtggatcccaagccaacaacaaccgatatagggtcagatgtaacactcacatgcgtctgggtcgggaacccgcccctcactctcacctggaccaaaaaagactccaacatggttctttcaaacagcaatcagctcctgcttaagtccgttacgcaggctgacgctggaacttacacctgccgggccattgttccacgcattggcgtcgcggaaagggaggttccgttgtacgtgaatggcccacctatcatctcctccgaggcagtacagtatgccgttaggggggacgggggtaaagtggagtgttttatcggctccactcctcctcccgaccggatagcctgggcatggaaggagaactttcttgaagtgggtactcttgagcgttataccgtcgagcgaacaaacagtggctcgggcgtgctgtccaccctgaccataaataacgtcatggaagccgactttcagactcactataactgtaccgcgtggaactcctttggacccggcaccgcgatcatccaactagaggagcgggaagtgttacccgttggcattattgctggggcaacgattggagcctccatcttgctcatattttttttcatagccttagtattctttctgtatcgacgcaggaaagggtcccggaaggatgtgacgctgcgtaaactagacataaaagtggaaacagtcaacagagagccattgacaatgcactccgatcgcgaagatgataccgccagcgtgtctacagcaaccagggtgatgaaagcaatctacagctcattcaaggacgacgtcgatctgaagcaggatctgcgatgtgatacgatcgacactagagaggaatacgagatgaaagatcccacaaatggttactacaacgtaagggctcatgaggacagacctagttcgagggccgtcctctacgctgattatcgcgcacctgggccggcaaggtttgacgggaggccttctagtcgcctgtcacacagttccggctacgctcaactgaatacttacagtaggggtccggcctccgactacggccccgagcccacaccaccaggtcccgcagcacccgccggcactgatacaaccagccagctcagctacgaaaactacgaaaagttcaactcccatcccttccccggagccgccggataccctacgtacagattgggctacccgcaagctcctccaagcggtcttgagagaaccccatatgaagcatatgaccccatcggaaagtacgctaccgctacaaggttttcttatacctctcagcatagcgactacggccagcggtttcagcagcggatgcaaacacacgtctag

SEQ ID NO: 104586 - DNA, 1965 bp, Artificial Sequence
  derived and/or modified sequence
atgctgtccttactagtctggatcctgactctgtcagacaccttctcccagggaacacagactagatttagccaagaacctgccgatcagactgtggtagcggggcagagggctgtgttgccttgtgtgctgctgaactactccggtattgtacagtggactaaggacgggttagcacttggcatgggccagggtctgaaggcatggccacggtatcgtgtggtgggctccgctgacgccggccagtataatctcgagatcactgatgccgagttatctgatgacgcaagctatgaatgccaggccaccgaggccgcactgcgatcccggagagccaaactgacagtcctgaatcctccaacggtgactctaagcattgagccccagacagtgcaagaaggtgagcgcgtagtgttcacttgccaagcgacagctaatccagagattctgggctatcgctgggcaaagggaggcttcctgattgaagatgctcacgagtcccggtacgaaacgaatgttgattattcgttttttaccgaaccggtgtcatgcgaagtgcataataaggtcgggtccaccaatgtatctactctagtcaatgtgcattttgctcctcgcatcgtagtcgaccctaagcccacaactactgatatcgggtctgatgtgaccttgacttgtgtctgggttggtaatccacctcttactcttacctggactaaaaaggatagcaacatggtgttgagcaactctaaccagttactgctcaaatctgtgacccaggccgatgctggtacatatacttgtcgagccatagttccaagaatcggtgtggcggagagggaggtacccctgtacgtaaatggcccaccaatcattagtagcgaggctgtgcaatatgctgtacgcggagatgggggcaaagtggaatgctttattggtagcactcctccccccgaccggatcgcctgggcttggaaggaaaatttccttgaggtgggaactctggagcgctacacagtcgaacgtacaaattccgggtctggagttctcagcacacttaccattaacaatgtcatggaagcagacttccagactcactataattgcacggcttggaattctttcggcccaggcaccgccatcattcagttggaagagcgggaagtgctgcccgtggggatcatcgctggggcaaccatcggggcctccattctcctgatattttttttcatagcccttgtcttcttcctctaccggcgaagaaagggatctcgtaaagacgtcacgttgcgtaaattggacattaaggtcgaaactgtgaatcgcgagcctctaactatgcactcggacagggaagatgatacagctagtgtctccacagccacacgcgtgatgaaagctatctattcctcatttaaggacgatgtcgacctcaagcaggacttgcggtgtgatacaatcgatacacgagaggagtacgagatgaaagaccctaccaacggatattataacgtgcgcgcgcacgaggacaggccgtcttcccgagcagtgctctacgcggattaccgagccccaggtcccgccaggttcgatggcaggcccagttctagactttcccatagcagcggttacgctcaactgaacacgtacagcagagggccagcttccgactacgggcctgagcccacaccaccgggcccagcagcccctgcaggaacggacaccacaagccagctctcttatgagaattacgaaaagttcaatagccaccctttcccgggtgcagcaggttacccaacttatcggctgggctatcctcaggcacctccatccggtctggaacgtaccccatacgaggcctacgaccctatcggcaagtacgccaccgcgactcggttctcctataccagccagcacagcgactacggacagagattccagcagagaatgcagactcatgtctag

SEQ ID NO: 104587 - DNA, 1974 bp, Artificial Sequence
  derived and/or modified sequence
atgctttctttgctggtgtggattctgacactgagcgacaccttttcacaagtacccccagaggacacccggatcgacggcgggcccgtgatcctgctgcaagctggaaccccacataaccttacgtgccgggcattcaacgcaaaacctgctgctactatcatttggtttcgcgatggaacacaacaagaaggcgctgttgcgtctacagagcttttgaaggacggtaagcgcgaaaccacggttagccagctgctgattaatcctacagacttggacatcggcagggtttttacatgccgcagtatgaacgaggccattccatccggcaaagagacctctattgagctcgatgttcatcacccaccaactgtaacccttagcatcgagcctcaaaccgtgcaggagggcgaaagagtggtctttacatgtcaggctactgccaatcctgaaatccttggatacaggtgggcgaaggggggctttttgatcgaagatgctcacgagagcagatacgagactaatgtggactattccttctttacagaacctgtatcttgcgaagttcataataaagttggctccacaaacgtgagcaccctggtgaacgtgcattttgctccacgtatcgtggtcgatcccaagccaaccactacagacatcggaagcgacgttactttgacctgcgtttgggtcggcaatcctcccttgacactgacttggacaaaaaaggactcaaatatggtcctgtctaattctaaccagctcctgctcaagtctgtcactcaagctgacgctggcacctacacttgccgagctatcgttccgcggataggggttgccgaacgggaagtgccgctgtatgtgaacgggccgccaatcatcagctctgaggccgtgcagtatgccgtgcgcggcgatggtggaaaggtggagtgttttataggatccacaccacctcccgaccgcattgcctgggcctggaaggaaaatttcctcgaggtcggaaccctcgagcggtataccgtggaacggaccaattcagggagcggagttctatcaaccttgaccattaataacgtcatggaggcggattttcagacccattacaactgtactgcatggaacagcttcggcccaggcactgccatcatacagctggaggaacgggaagttttacccgtcgggataattgccggagccacgatcggagctagcatcttgctcatctttttctttattgctctagtgttcttcctgtaccggagacgcaagggctctcgaaaagatgtaaccctcaggaagcttgatattaaagtggagacagtgaacagggaacccctcaccatgcacagcgatagggaggacgacaccgcttccgtttcaactgcaacaagagtgatgaaggcaatctattcaagcttcaaagatgatgtagacctaaaacaagacctaagatgcgatactattgacacaagagaggagtatgagatgaaagaccctaccaatggatattataacgtcagagcacacgaggaccgcccgtctagtagagccgttctgtacgctgattatcgcgcccctgggcccgcgagatttgatgggcgcccttcatctcgcttgtcacacagcagtggctatgcccaattaaacacatattctcgggggccggcaagcgattacggacccgaaccaacgccaccaggcccggctgcccctgcggggactgacacgacctctcagctctcttacgagaattacgaaaagtttaattcacacccattccccggagctgctgggtaccctacttaccgcctcggttatcctcaggccccaccatcaggactggaacggaccccttacgaggcatacgatcctatcggaaagtacgccacagctacgagattcagctacactagccaacactctgactacggccagcggttccagcagcgaatgcagactcacgtatag

SEQ ID NO: 104588 - DNA, 3304 bp, Artificial Sequence
  derived and/or modified sequence
ggcgccgtcggagggagagtagacgtcaggcggagggagggaggcaggcaggcagggaggcagggagggagagagggaaggaagagaaggggagagaaagggggagcaaagaccgaaagagacccagagagatacagcttgagaggagaaataattaaagggggagggcgaccaggaggagaaaaaggtctgggaggaaagagagataaagagaatcggagggcagggaaatgagtttgtgcgcgtgagtgtgcgcgcgcgcgtgtgtgtgtgcaggggcgggcgcgggcgggcggggggcgggctcccgggctcccgggctcccctcctccccagcccgctcctctggctcgctcgccaactccgggccccagccgcgggcgggcgcacggcgggcggacagcatgctgagcctcctcgtctggatcctcactctctccgatactttctcccaaggtaaggacccagacccgcttcagccaggagccagctgaccagacggtggtggctggacagcgggccgtgctcccctgtgtgctgctcaactactctggaattgtgcaatggaccaaggacgggctggccctgggcatgggccagggcctcaaagcctggccacggtaccgggttgtgggctccgcagacgctgggcagtacaacctggagatcacagatgctgagctctctgacgacgcctcttacgagtgccaggccacggaggccgccctgcgctctcggcgggccaaactcaccgtgctcaaccctcctacagtgaccctgtccattgagccacagacggtgcaggagggtgagcgtgttgtctttacctgccaggccacagccaaccccgagatcttgggctacaggtgggccaaagggggtttcttgattgaagacgcccacgagagtcgctatgagacaaatgtggattattcctttttcacggagcctgtgtcttgtgaggttcacaacaaagtgggaagcaccaatgtcagcactttagtaaatgtccactttgctccccggattgtagttgaccccaaacccacaaccacagacattggctctgatgtgacccttacctgtgtctgggttgggaatccccccctcactctcacctggaccaaaaaggactcaaatatggtcctgagtaacagcaaccagctgctgctgaagtcggtgactcaggcagacgctggcacctacacctgccgggccatcgtgcctcgaatcggagtggctgagcgggaggtgccgctctatgtgaacgggccccccatcatctccagtgaggcagtgcagtatgctgtgaggggtgacggtggcaaggtggagtgtttcattgggagcacaccacccccagaccgcatagcatgggcctggaaggagaacttcttggaggtggggaccctggaacgctatacagtggagaggaccaactcaggcagtggggtgctatccacgctcaccatcaacaatgtcatggaggccgactttcagactcactacaactgcaccgcctggaacagcttcgggccaggcacagccatcatccagctggaagagcgagaggtgttacctgtgggcatcatagctggggccaccatcggcgcgagcatcctgctcatcttcttcttcatcgccttggtattcttcctctaccggcgccgcaaaggcagtcgcaaagacgtgaccctgaggaagctggatatcaaggtggagacagtgaaccgagagccacttacgatgcattctgaccgggaggatgacaccgccagcgtctccacagcaacccgggtcatgaaggccatctactcgtcgtttaaggatgatgtggatctgaagcaggacctgcgctgcgacaccatcgacacccgggaggagtatgagatgaaggaccccaccaatggctactacaacgtgcgtgcccatgaagaccgcccgtcttccagggcagtgctctatgctgactaccgtgcccctggccctgcccgcttcgacggccgcccctcatcccgtctctcccactccagcggctatgcccagctcaacacctatagccggggccctgcctctgactatggccctgagcccacaccccctggccctgctgccccagctggcactgacacaaccagccagctgtcctacgagaactatgagaagttcaactcccatcccttccctggggcagctgggtaccccacctaccgactgggctacccccaggccccaccctctggcctggagcggaccccatatgaggcgtatgaccccattggcaagtacgccacagccactcgattctcctacacctcccagcactcggactacggccagcgattccagcagcgcatgcagactcacgtgtaggggccagagcctggctggggcatctctgcggggcagaggagaaggctttcacagctgttccctgatattcaggggcattgctcattgctcccttctcggaccagccttcttcctcccaccatggcaggtggggagcaggtctcccagaaacaccccgtcccgaggatggtgctctgtgcatgccccagcctcctgggcctgcccttccctcttcttcgggaggatgtgtctcttctgacctgcactcttgcctgaccctagaatggggacagggaaagtgaaggttagggaaagcagaggggggcactttttagcattccctttctatcccacccctctgatctcccataagtggaaatgggggtacccagggatgggcaggctttggcctagggacatgaagtatgggagtgggtggctgtggcacagacaggtggaaaacgggatagcctggccagtccctctgttgtctgcattcgtgccctgggtgcctctctccttcctcagggtactgcagaagggagcgaacagggtactgttcgctcttgtctacagaacagccctggcactgcattcaaatccagtcttcattcagctgggatcaaaatgccagtcaccttggctacccactgtggacagctgtctgtcagcatgcagagggatccaggaatccccccggcagcacggcccgctttccttctcctccatgctgggccagccagataagtcagggtcctggtggagaaagaaaggctaggaccatgtcctcattgacccagatactgctgtgtgctgcacagcagtgaaccaacactagagggagccacacaagcctcctctccccagtctgccccacttcctggctttaactcttgagctggtttggggagtggtgaggtaggggtgggggtgctgtaggctctttttcaaa

SEQ ID NO: 104589 - DNA, 3297 bp, Artificial Sequence
  derived and/or modified sequence
ggcgccgtcggagggagagtagacgtcaggcggagggagggaggcaggcaggcagggaggcagggagggagagagggaaggaagagaaggggagagaaagggggagcaaagaccgaaagagacccagagagatacagcttgagaggagaaataattaaagggggagggcgaccaggaggagaaaaaggtctgggaggaaagagagataaagagaatcggagggcagggaaatgagtttgtgcgcgtgagtgtgcgcgcgcgcgtgtgtgtgtgcaggggcgggcgcgggcgggcggggggcgggctcccgggctcccgggctcccctcctccccagcccgctcctctggctcgctcgccaactccgggccccagccgcgggcgggcgcacggcgggcggacagcatgctgagcctcctcgtctggatcctcactctctccgatactttctcccaagggacccagacccgcttcagccaggagccagctgaccagacggtggtggctggacagcgggccgtgctcccctgtgtgctgctcaactactctggaattgtgcaatggaccaaggacgggctggccctgggcatgggccagggcctcaaagcctggccacggtaccgggttgtgggctccgcagacgctgggcagtacaacctggagatcacagatgctgagctctctgacgacgcctcttacgagtgccaggccacggaggccgccctgcgctctcggcgggccaaactcaccgtgctcaaccctcctacagtgaccctgtccattgagccacagacggtgcaggagggtgagcgtgttgtctttacctgccaggccacagccaaccccgagatcttgggctacaggtgggccaaagggggtttcttgattgaagacgcccacgagagtcgctatgagacaaatgtggattattcctttttcacggagcctgtgtcttgtgaggttcacaacaaagtgggaagcaccaatgtcagcactttagtaaatgtccactttgctccccggattgtagttgaccccaaacccacaaccacagacattggctctgatgtgacccttacctgtgtctgggttgggaatccccccctcactctcacctggaccaaaaaggactcaaatatggtcctgagtaacagcaaccagctgctgctgaagtcggtgactcaggcagacgctggcacctacacctgccgggccatcgtgcctcgaatcggagtggctgagcgggaggtgccgctctatgtgaacgggccccccatcatctccagtgaggcagtgcagtatgctgtgaggggtgacggtggcaaggtggagtgtttcattgggagcacaccacccccagaccgcatagcatgggcctggaaggagaacttcttggaggtggggaccctggaacgctatacagtggagaggaccaactcaggcagtggggtgctatccacgctcaccatcaacaatgtcatggaggccgactttcagactcactacaactgcaccgcctggaacagcttcgggccaggcacagccatcatccagctggaagagcgagaggtgttacctgtgggcatcatagctggggccaccatcggcgcgagcatcctgctcatcttcttcttcatcgccttggtattcttcctctaccggcgccgcaaaggcagtcgcaaagacgtgaccctgaggaagctggatatcaaggtggagacagtgaaccgagagccacttacgatgcattctgaccgggaggatgacaccgccagcgtctccacagcaacccgggtcatgaaggccatctactcgtcgtttaaggatgatgtggatctgaagcaggacctgcgctgcgacaccatcgacacccgggaggagtatgagatgaaggaccccaccaatggctactacaacgtgcgtgcccatgaagaccgcccgtcttccagggcagtgctctatgctgactaccgtgcccctggccctgcccgcttcgacggccgcccctcatcccgtctctcccactccagcggctatgcccagctcaacacctatagccggggccctgcctctgactatggccctgagcccacaccccctggccctgctgccccagctggcactgacacaaccagccagctgtcctacgagaactatgagaagttcaactcccatcccttccctggggcagctgggtaccccacctaccgactgggctacccccaggccccaccctctggcctggagcggaccccatatgaggcgtatgaccccattggcaagtacgccacagccactcgattctcctacacctcccagcactcggactacggccagcgattccagcagcgcatgcagactcacgtgtaggggccagagcctggctggggcatctctgcggggcagaggagaaggctttcacagctgttccctgatattcaggggcattgctcattgctcccttctcggaccagccttcttcctcccaccatggcaggtggggagcaggtctcccagaaacaccccgtcccgaggatggtgctctgtgcatgccccagcctcctgggcctgcccttccctcttcttcgggaggatgtgtctcttctgacctgcactcttgcctgaccctagaatggggacagggaaagtgaaggttagggaaagcagaggggggcactttttagcattccctttctatcccacccctctgatctcccataagtggaaatgggggtacccagggatgggcaggctttggcctagggacatgaagtatgggagtgggtggctgtggcacagacaggtggaaaacgggatagcctggccagtccctctgttgtctgcattcgtgccctgggtgcctctctccttcctcagggtactgcagaagggagcgaacagggtactgttcgctcttgtctacagaacagccctggcactgcattcaaatccagtcttcattcagctgggatcaaaatgccagtcaccttggctacccactgtggacagctgtctgtcagcatgcagagggatccaggaatccccccggcagcacggcccgctttccttctcctccatgctgggccagccagataagtcagggtcctggtggagaaagaaaggctaggaccatgtcctcattgacccagatactgctgtgtgctgcacagcagtgaaccaacactagagggagccacacaagcctcctctccccagtctgccccacttcctggctttaactcttgagctggtttggggagtggtgaggtaggggtgggggtgctgtaggctctttttc

SEQ ID NO: 104590 - DNA, 2106 bp, Artificial Sequence
  derived and/or modified sequence
agccgcgggcgggcgcacggcgggcggacagcatgctgagcctcctcgtctggatcctcactctctccgatactttctcccaagtccccccagaggacaccaggattgacggaggccctgtgattctactgcaggcaggcaccccccacaacctcacatgccgggccttcaatgcgaagcctgctgccaccatcatctggttccgggacgggacgcagcaggagggcgctgtggccagcacggaattgctgaaggatgggaagagggagaccaccgtgagccaactgcttattaaccccacggacctggacatagggcgtgtcttcacttgccgaagcatgaacgaagccatccctagtggcaaggagacttccatcgagctggatgtgcaccaccctcctacagtgaccctgtccattgagccacagacggtgcaggagggtgagcgtgttgtctttacctgccaggccacagccaaccccgagatcttgggctacaggtgggccaaagggggtttcttgattgaagacgcccacgagagtcgctatgagacaaatgtggattattcctttttcacggagcctgtgtcttgtgaggttcacaacaaagtgggaagcaccaatgtcagcactttagtaaatgtccactttgctccccggattgtagttgaccccaaacccacaaccacagacattggctctgatgtgacccttacctgtgtctgggttgggaatccccccctcactctcacctggaccaaaaaggactcaaatatggtcctgagtaacagcaaccagctgctgctgaagtcggtgactcaggcagacgctggcacctacacctgccgggccatcgtgcctcgaatcggagtggctgagcgggaggtgccgctctatgtgaacgggccccccatcatctccagtgaggcagtgcagtatgctgtgaggggtgacggtggcaaggtggagtgtttcattgggagcacaccacccccagaccgcatagcatgggcctggaaggagaacttcttggaggtggggaccctggaacgctatacagtggagaggaccaactcaggcagtggggtgctatccacgctcaccatcaacaatgtcatggaggccgactttcagactcactacaactgcaccgcctggaacagcttcgggccaggcacagccatcatccagctggaagagcgagaggtgttacctgtgggcatcatagctggggccaccatcggcgcgagcatcctgctcatcttcttcttcatcgccttggtattcttcctctaccggcgccgcaaaggcagtcgcaaagacgtgaccctgaggaagctggatatcaaggtggagacagtgaaccgagagccacttacgatgcattctgaccgggaggatgacaccgccagcgtctccacagcaacccgggtcatgaaggccatctactcgtcgtttaaggatgatgtggatctgaagcaggacctgcgctgcgacaccatcgacacccgggaggagtatgagatgaaggaccccaccaatggctactacaacgtgcgtgcccatgaagaccgcccgtcttccagggcagtgctctatgctgactaccgtgcccctggccctgcccgcttcgacggccgcccctcatcccgtctctcccactccagcggctatgcccagctcaacacctatagccggggccctgcctctgactatggccctgagcccacaccccctggccctgctgccccagctggcactgacacaaccagccagctgtcctacgagaactatgagaagttcaactcccatcccttccctggggcagctgggtaccccacctaccgactgggctacccccaggccccaccctctggcctggagcggaccccatatgaggcgtatgaccccattggcaagtacgccacagccactcgattctcctacacctcccagcactcggactacggccagcgattccagcagcgcatgcagactcacgtgtaggggccagagcctggctggggcatctctgcggggcagaggagaaggctttcacagctgttccctgatattcaggggcattgctcattgctcccttctcgga

SEQ ID NO: 104591 - DNA, 1782 bp, Artificial Sequence
  derived and/or modified sequence
atgggccagggcctgaaggcctggccccgctacagagtggtgggcagcgcagatgctggccagtacaacctggagatcacagatgctgagctgagtgatgatgccagctatgagtgccaggccacagaggccgccctgcggagcagaagagccaagctgactgtgctgaacccccccaccgtgaccctgagcattgagccccagacagtgcaggagggggagcgggtggtgttcacctgccaggccacagccaaccctgagatcctgggctaccgctgggccaagggcggcttcctgattgaagatgcccacgagagccgctatgagaccaacgtggactacagcttcttcacagagcctgtgtcctgtgaggtgcacaacaaggtgggcagcaccaacgtgtccaccctggtgaatgtgcactttgccccccgcatcgtggtggaccccaagcccaccaccacagacattggaagtgatgtgaccctgacctgtgtgtgggtgggcaacccccccctgaccctgacctggaccaagaaggacagcaacatggtgctgagcaacagcaaccagctgctgctgaagtctgtgacccaggctgatgctggcacctacacctgccgggccatcgtgccccgcatcggcgtggccgagcgggaggtgcccctgtatgtgaatggcccccccatcatcagcagcgaggccgtgcagtatgctgtgagaggagatggcggcaaggtggagtgcttcatcggcagcaccccacctccagaccgcatcgcctgggcctggaaggagaacttcctggaggtgggcaccctggagcgctacacagtggagaggaccaacagcggcagcggcgtgctgagcaccctgaccatcaacaacgtgatggaggccgacttccagacccactacaactgcacagcctggaacagctttggacctggaacagccatcatccagctggaggagcgggaggtgctgcctgtgggcatcatcgccggggccaccatcggggccagcatcctgctgatcttcttcttcatcgccctggtgttcttcctgtacagaagaaggaagggcagcaggaaggatgtgaccctgaggaagctggacatcaaggtggagaccgtgaaccgggagcccctgaccatgcacagcgacagagaagatgacacagcctctgtgtccacagccaccagggtgatgaaggccatctacagcagcttcaaggatgatgtggacctgaagcaggacctgcgctgtgacaccatcgacacccgggaggagtatgagatgaaggaccccaccaacggctactacaacgtgcgggcccacgaggaccggcccagcagcagagctgtgctgtatgctgactaccgggcccctggccctgccaggtttgatggccggcccagcagccggctgagccacagcagcggctacgcccagctgaacacctacagccggggccctgccagtgactatggccctgagcccaccccacctggccctgctgccccagctggaacagacaccaccagccagctgtcctatgaaaattatgagaagttcaacagccaccccttccctggagctgctggctaccccacctaccgcctgggctacccccaggccccacccagcggcctggagaggaccccctatgaggcctatgaccccatcggcaagtatgccacagccacccgcttctcctacaccagccagcacagcgactatggccagcgcttccagcagaggatgcagacccacgtgtag

SEQ ID NO: 104592 - DNA, 1965 bp, Artificial Sequence
  derived and/or modified sequence
atgctgagcctgctggtgtggatcctgaccctgagtgacaccttcagccagggcacccagacccgcttcagccaggagcctgctgaccagacagtggtggccggccagagagctgtgctgccctgtgtgctgctgaactacagcggcatcgtgcagtggaccaaggatggcctggccctgggcatgggccagggcctgaaggcctggccccgctacagagtggtgggcagcgcagatgctggccagtacaacctggagatcacagatgctgagctgagtgatgatgccagctatgagtgccaggccacagaagctgccctgcggagccggcgggccaagctgactgtgctgaaccccccaacagtgaccctgagcattgagccccagacagtgcaggagggggagcgggtggtgttcacctgccaggccacagccaaccctgagatcctgggctaccgctgggccaagggcggcttcctgattgaagatgcccacgagagccgctatgagaccaacgtggactacagcttcttcacagagcctgtgtcctgtgaggtgcacaacaaggtgggcagcaccaacgtgtccaccctggtgaatgtgcactttgcccccagaattgtggtggaccccaagcccaccaccacagacatcggcagtgatgtgaccctgacctgtgtgtgggtgggcaacccccccctgaccctgacctggaccaagaaggacagcaacatggtgctgagcaacagcaaccagctgctgctgaagtctgtgacccaggctgatgctggcacctacacctgccgggccatcgtgcccagaattggagtggccgagcgggaggtgcccctgtatgtgaatggaccacccatcatcagcagcgaggccgtgcagtatgctgtgagaggagatggcggcaaggtggagtgcttcatcggcagcaccccacctccagacagaattgcctgggcctggaaggagaacttcctggaggtgggcaccctggagcgctacacagtggagaggaccaacagcggcagcggcgtgctgagcaccctgaccatcaacaacgtgatggaggccgacttccagacccactacaactgcacagcctggaacagctttggacctggaacagccatcatccagctggaggagcgggaggtgctgcctgtgggcatcatcgccggggccaccatcggggccagcatcctgctgatcttcttcttcatcgccctggtgttcttcctgtacagaagaaggaagggcagcaggaaggatgtgaccctgaggaagctggacatcaaggtggagaccgtgaaccgggagcccctgaccatgcacagcgaccgggaggatgacacagcctctgtgtccacagccaccagggtgatgaaggccatctacagcagcttcaaggatgatgtggacctgaagcaggacctgcgctgtgacaccatcgacacccgggaggagtatgagatgaaggaccccaccaacggctactacaacgtgcgggcccatgaagatcggcccagcagcagagctgtgctgtatgctgactaccgggcccctggccctgccaggtttgatggccggcccagcagccggctgagccacagcagcggctacgcccagctgaacacctacagccggggccctgccagtgactatggccctgagcccaccccacctggccctgctgccccagctggaacagacaccaccagccagctgtcctatgagaactatgagaagttcaacagccaccccttccctggagctgctggctaccccacctaccgcctgggctacccccaggcccctccttctggcctggagaggaccccctatgaggcctatgaccccatcggcaagtatgccacagccacccgcttctcctacaccagccagcacagcgactatggccagcgcttccagcagaggatgcagacccacgtgtag

SEQ ID NO: 104593 - DNA, 1974 bp, Artificial Sequence
  derived and/or modified sequence
atgctgagcctgctggtgtggatcctgaccctgagtgacaccttcagccaggtgcccccagaggacaccagaattgatggcggccctgtgatcctgctgcaggccggcaccccccacaacctgacctgccgggccttcaatgccaagccagctgccaccatcatctggttcagagatggcacccagcaggagggcgctgtggccagcacagagctgctgaaggatggcaagcgggagaccaccgtgtcccagctgctgatcaaccccacagacctggacatcggccgggtcttcacctgccgctccatgaatgaggccatccccagcggcaaggagaccagcattgagctggatgtgcaccacccccccaccgtgaccctgagcattgagccccagacagtgcaggagggggagcgggtggtgttcacctgccaggccacagccaaccctgagatcctgggctaccgctgggccaagggcggcttcctgattgaagatgcccacgagagccgctatgagaccaacgtggactacagcttcttcacagagcctgtgtcctgtgaggtgcacaacaaggtgggcagcaccaacgtgtccaccctggtgaatgtgcactttgccccccgcatcgtggtggaccccaagcccaccaccacagacattggaagtgatgtgaccctgacctgtgtgtgggtgggcaacccccccctgaccctgacctggaccaagaaggacagcaacatggtgctgagcaacagcaaccagctgctgctgaagtctgtgacccaggctgatgctggcacctacacctgccgggccatcgtgccccgcatcggcgtggccgagcgggaggtgcccctgtatgtgaatggcccccccatcatcagcagcgaggccgtgcagtatgctgtgagaggagatggcggcaaggtggagtgcttcatcggcagcaccccacctccagaccgcatcgcctgggcctggaaggagaacttcctggaggtgggcaccctggagcgctacacagtggagaggaccaacagcggcagcggcgtgctgagcaccctgaccatcaacaacgtgatggaggccgacttccagacccactacaactgcacagcctggaacagctttggacctggaacagccatcatccagctggaggagcgggaggtgctgcctgtgggcatcatcgccggggccaccatcggggccagcatcctgctgatcttcttcttcatcgccctggtgttcttcctgtacagaagaaggaagggcagcaggaaggatgtgaccctgaggaagctggacatcaaggtggagaccgtgaaccgggagcccctgaccatgcacagcgacagagaagatgacacagcctctgtgtccacagccaccagggtgatgaaggccatctacagcagcttcaaggatgatgtggacctgaagcaggacctgcgctgtgacaccatcgacacccgggaggagtatgagatgaaggaccccaccaacggctactacaacgtgcgggcccacgaggaccggcccagcagcagagctgtgctgtatgctgactaccgggcccctggccctgccaggtttgatggccggcccagcagccggctgagccacagcagcggctacgcccagctgaacacctacagccggggccctgccagtgactatggccctgagcccaccccacctggccctgctgccccagctggaacagacaccaccagccagctgtcctatgaaaattatgagaagttcaacagccaccccttccctggagctgctggctaccccacctaccgcctgggctacccccaggccccacccagcggcctggagaggaccccctatgaggcctatgaccccatcggcaagtatgccacagccacccgcttctcctacaccagccagcacagcgactatggccagcgcttccagcagaggatgcagacccacgtgtag

SEQ ID NO: 104594 - DNA, 1782 bp, Artificial Sequence
  derived and/or modified sequence
atgggccagggcctgaaggcctggccccggtaccgggtggtgggcagcgctgacgcaggacagtacaacctcgaaattacagacgcagagctctccgacgacgcctcatacgagtgtcaggccaccgaagctgctctgcgcagtcggcgagccaagctgaccgtgttgaatccaccaactgtcactctgagcattgagccacaaaccgtccaggaaggagagcgcgtggtctttacctgccaggctactgccaatcccgaaatcctgggctatcggtgggccaaaggagggttcctgatcgaggacgcccatgagagtcggtacgagactaatgtggactactctttttttactgagcccgtgtcatgtgaggttcataataaagtgggctccaccaatgtttccaccttggtcaacgtacattttgcgccacgaattgtcgtggatcctaaaccaacgaccacagacatcgggtcagacgtgaccttgacgtgcgtgtgggtggggaaccccccccttaccttgacctggaccaagaaggatagtaacatggtactatctaacagtaaccaactcctgctgaaatcggtcacgcaggccgatgcaggcacctatacctgtagagccattgtgccacgcattggtgtcgcagaacgggaagtgcctctgtatgtaaacgggcctccgatcataagctccgaggctgttcagtacgcagtaaggggggatggtggcaaggtggagtgtttcatcggcagtactcccccaccagaccgcatcgcgtgggcctggaaagagaacttcctggaagttggtactctggagcggtacactgttgagagaactaactctggcagtggcgttctatctacattgaccataaataatgttatggaggctgatttccagacccactataactgtactgcatggaactctttcggacctggcaccgcaataatacagcttgaggagcgggaagtactcccagtgggcattattgcaggggcgaccataggggcctcaatccttctcatatttttttttatagccttggtcttctttctgtatagaaggagaaagggatcccggaaagacgtgaccctgagaaagctcgatataaaagtcgaaacagtgaatagggaacccctcacaatgcactccgaccgggaagatgacacagcctcagtgtcaaccgccacgcgggtcatgaaagccatttacagcagtttcaaggacgacgtcgatctgaaacaggatctgaggtgcgacacgatcgacaccagagaagaatacgagatgaaggatcctacaaatggttactataatgtgcgagcccacgaggatcggccttcctcccgggcggtgctctacgctgactaccgagcgccgggtcccgcccgatttgacgggcgcccgagtagtaggctttcgcactcatctggctacgctcagttgaacacatattcacgaggacccgctagcgattacgggcctgaacccacacccccaggtcctgctgctcccgcagggactgacactacttcacagttgtcatatgagaattacgagaagttcaacagccaccctttccccggcgccgctggatatccaacataccggctcgggtatccccaggccccgccctccggactggagcggaccccctacgaggcatacgatcctattggaaaatatgctacagcaaccaggtttagctacaccagccagcatagtgactatggacagcgatttcagcagcggatgcagacacatgtgtag

SEQ ID NO: 104595 - DNA, 1965 bp, Artificial Sequence
  derived and/or modified sequence
atgctgagcctgctggtgtggatcctgaccctgagcgacaccttcagtcaaggtactcaaactagattctcacaggagcctgccgaccaaactgtagtcgcaggccagcgagctgtgctaccttgcgtactgcttaactacagcggaatcgttcagtggacaaaagatggcctagccctggggatgggccagggtctgaaggcctggccgcgatacagggtggtcggtagcgctgatgccggccagtacaatcttgaaatcacagatgctgagttatctgatgacgccagttacgaatgccaagccacagaggcagctctcagatcacgaagagcaaagcttacggtgctgaaccccccaacggtgacactgagcatcgagccccagactgtccaggagggagaaagggtggtgtttacatgtcaagcaaccgcaaacccagagatcctgggctatagatgggccaaaggcggattcctcatcgaggatgcacatgagtccaggtacgagactaatgtggattacagctttttcacagagcccgtaagctgcgaggttcacaacaaagttgggagtacaaacgtgagtactcttgtgaatgtgcatttcgccccgcggatcgtggtcgaccctaagcctacgacaacagacattgggtccgacgtaactctcacctgcgtgtgggtgggtaaccctcccctgacactgacctggaccaagaaagattccaacatggtgctgtcgaattctaaccaactgttgctaaagtctgtcacacaggcagatgccggtacttatacctgcagggcaatagtccccaggataggcgtggcggaacgagaggtgcctctttacgtgaatggacccccaatcatcagtagtgaggccgtgcagtatgccgtaaggggagatggggggaaggtggaatgctttataggaagcacaccgccgccagaccggatcgcctgggcttggaaagagaatttcctagaggtgggaaccctagaacggtatacagtcgagcgcaccaacagtggatccggcgtgctctctacgctgaccatcaacaatgtcatggaagccgattttcaaacccattacaactgtacagcatggaactctttcgggccagggaccgccatcatccagctcgaggagcgcgaagttctgccagtcggcatcatagccggcgccacgataggggcgagtatccttctcatattttttttcattgctctggtgttctttttgtataggagacggaaaggaagtaggaaagacgtgacactccgcaagttggacatcaaagtggagaccgtgaaccgcgaacccctaacgatgcactctgacagggaagacgatactgcctccgtctccactgcaacgcgggttatgaaggctatttatagttccttcaaggacgatgtggaccttaaacaggatttacgatgtgacactatagacactcgagaagagtacgaaatgaaggaccctactaacggttactataacgttcgggcgcacgaggacagaccatcaagtagagctgtgctctatgctgactatagagcccccggacccgcccgctttgatgggaggccttcgtcccggttaagtcattcttccggatatgctcagttgaatacctattctcggggacctgcttctgactacgggccagaacctaccccccccggccccgccgccccggcagggactgacacgacgtctcagctgagttacgaaaactacgaaaaattcaattcccacccattccctggtgccgctgggtacccaacttaccgattgggatatccccaggccccaccctccgggctggagcgcaccccctacgaagcttacgacccaattgggaagtacgcaacagccaccagattcagctatacctctcaacatagcgattatggccagagatttcagcagcgcatgcagacccacgtctag

SEQ ID NO: 104596 - DNA, 1974 bp, Artificial Sequence
  derived and/or modified sequence
atgctgagcctgctggtgtggatcctgaccctgagcgacaccttctcacaggtgccccccgaggacacgcgcattgatggcggaccagtgatcctgttgcaagctggaaccccccataacctcacctgcagggccttcaatgctaagcccgctgccaccatcatatggttccgagacggaactcagcaggaaggggccgttgcttccaccgagcttctgaaggacggcaagagggaaacgaccgtgtctcagctgctcataaatccaacagatctagacatcggacgcgtctttacttgtaggtctatgaatgaagctatcccttcaggtaaagagacttcaattgagttagacgttcaccaccctcctaccgtgactttgtccattgaacctcagaccgttcaggagggggagcgagtggtatttacttgtcaggcgactgcaaacccagaaattctaggatacagatgggctaaaggcggctttctgatcgaggatgctcacgagtcacgatacgagaccaatgtcgactattccttctttaccgaacccgtgtcatgcgaggtgcataacaaggtggggtccacaaatgtatcaacacttgtgaatgttcattttgcccccagaattgtggtggacccaaagcctactaccaccgacatcgggagcgatgtgactctgacatgtgtgtgggttggcaacccacctttgaccctgacatggactaagaaggacagtaatatggttctttctaattccaaccagttgttgctgaagtcggttactcaggccgacgcagggacgtacacctgccgtgccatcgtgcccaggatcggcgtagctgagagggaagtgcctctctacgttaacggtccgcccattatctcttccgaggcagttcagtacgctgtgcgaggtgacggcggtaaggttgagtgtttcatcgggtctacacccccaccggaccggatcgcctgggcatggaaagagaacttccttgaggtggggacattggagcgctataccgtcgagagaacaaactctggcagtggcgtcctgagcaccctcactatcaataatgtaatggaggccgacttccagacccattacaactgtacagcctggaacagcttcggtccaggtacagcaatcatacaactggaagagcgggaggtgctgcccgttggtattattgcaggagccacaatcggcgcgtctatactgcttatattctttttcatcgctttggtatttttcctgtataggcggcgcaaaggctctcgcaaggacgtcaccctaaggaagctggacattaaggttgagactgttaacagggagcctttaaccatgcacagcgatcgggaggatgacacggcaagtgtgtctaccgcaaccagagtcatgaaagcaatctactcgagtttcaaggacgacgtagatctgaagcaggatctgaggtgtgacacaatcgataccagggaggagtatgaaatgaaggatccaactaacggttactataatgttcgggctcatgaggatcgcccaagttcacgcgcagtgctgtacgcagattaccgcgcgccaggacccgcccggttcgacggtcggccttcctccagattgagtcatagctctggatacgcacagctgaacacttattctcgggggccagcctccgattatggcccggagccgactccaccaggccccgccgcgccggccgggactgacaccacaagccagttgagttatgagaattacgagaagttcaactctcacccttttcctggcgctgccggatatcccacctaccggcttggatacccgcaagccccccccagtggacttgaacgtaccccttatgaagcctatgatcctataggcaaatacgcaacagccactcgtttcagctacacttcccagcactccgattacgggcaacgttttcagcaaaggatgcaaacccacgtgtag

SEQ ID NO: 104597 - DNA, 1782 bp, Artificial Sequence
  derived and/or modified sequence
atgggccaaggcctgaaagcttggcccagatatcgggtggtggggtccgcagatgccggtcagtataatctggagattacggatgccgagctgtcggatgacgcctcttatgaatgtcaggccactgaggccgcattgcgctctaggcgtgcgaaactcactgtgctgaatccaccaactgtcaccctatccatcgagccccagaccgtccaggagggcgagcgggtggtgtttacctgccaggccacggcgaatcctgagattctgggatataggtgggctaaaggaggcttcctcattgaggatgcccatgagtccaggtatgagaccaacgtggattattctttcttcactgagcctgtgagctgtgaggtacacaataaggttgggtctactaatgtgagtacccttgttaacgtacacttcgccccacgaatcgtggtggatccaaagccaaccaccacagatatcggaagcgatgtgacactgacctgtgtctgggtgggaaaccccccactaactctgacctggaccaagaaggactccaacatggtcctttcaaactccaaccagctgttattaaaaagcgtgacccaggctgacgcaggtacttatacctgcagagccattgtgcctaggataggggtagctgagagggaagtgcctttgtatgtcaatgggcctcctatcatcagttcagaggcagtccagtacgccgtccgcggtgacggcggaaaggttgagtgttttatcggctccacaccaccacccgatcggattgcctgggcatggaaagaaaactttctcgaggtggggaccctggaacgatatactgttgagaggacaaatagcggaagcggcgtactcagcactcttactatcaacaatgtaatggaggcagatttccagacccattataattgcaccgcttggaactcgttcggcccaggaacggccattatccaactggaggagagggaggtcctacctgtgggcattatcgctggagccacaatcggagcctcaatcctgcttatcttcttcttcatagcactggtgtttttcctgtataggaggcggaagggtagtcgtaaggacgtgactctgcggaagctagatatcaaagttgagaccgtcaaccgcgagccacttaccatgcacagtgatagagaagatgatactgcatccgttagtacagccacaagagtcatgaaggctatctatagcagctttaaggacgatgttgatcttaaacaggatctgaggtgcgacactattgacactagagaggaatatgagatgaaagaccccaccaatggatactataacgtccgggctcacgaggatagacccagtagtcgggcagtgctttacgctgactaccgagcgccaggtcctgctcggtttgacggaagaccgtcaagcaggctgtcacacagcagcggttacgcccagcttaacacgtactcaagaggcccagctagtgattacgggcctgagcccacgccacctggaccggcagcaccagcaggaaccgataccacctcccagctttcatacgaaaattatgaaaaattcaactctcatccattcccaggtgctgcgggttaccccacatacagattagggtatccccaggctccaccatctggccttgaaaggactccatatgaggcttacgatccgataggaaagtatgctaccgcaacaaggtttagctatacctcacagcacagcgactatggccagaggtttcagcaaagaatgcagacacacgtgtag

SEQ ID NO: 104598 - DNA, 1965 bp, Artificial Sequence
  derived and/or modified sequence
atgctctcgctgctggtgtggattctcaccctgtctgataccttcagccaaggtacacaaaccaggttctctcaggaaccagccgaccagacagtggtggccggtcaaagagctgttttaccttgcgtcctgctgaattatagcggcatagtgcagtggaccaaagatggtctggctctgggcatgggccaaggtctcaaagcctggcccagatacagagttgtcggcagtgccgatgctggccagtataacctggaaataacggacgcagaactgtcggatgacgcttcttacgagtgtcaggccactgaagccgctttgcgatccaggagagcaaagctcaccgttctgaatcccccaacggtgacactgtctattgaaccacagaccgtgcaagagggggagagagttgtattcacgtgccaagcgacggccaacccagagatcctggggtatcgatgggctaagggtgggttcctgattgaagacgcccacgagtcccggtatgaaacaaatgttgactatagcttctttacagagcctgtctcttgtgaagtgcacaacaaggtgggatccactaacgtaagcactttggttaacgtacactttgcccctcgcatcgtcgtggacccaaaacctacaaccactgacattggctcggatgtaacactgacctgcgtatgggttggtaacccaccactgactctcacctggaccaagaaggatagcaacatggtcttaagcaactcgaatcagctcttgctgaagtctgttacccaggctgatgctggaacctatacctgtcgggctattgtgccaagaataggcgtggccgagcgggaggttcctctgtatgtcaatgggcctcctataatcagttctgaagctgttcagtacgccgtacgcggagatggagggaaggttgagtgttttatcggttctacccctccacctgacagaattgcctgggcctggaaagagaactttctggaagtgggcaccctggagcgctatacagttgaaagaaccaattccggttcaggcgtgctctcaacattaaccatcaacaacgtgatggaagcagatttccagacacattataactgcactgcctggaatagtttcggcccaggcaccgccattatccaacttgaagagagggaagtgctccccgtcggcattattgctggcgcaacaattggtgccagtatcctgctgatcttcttcttcatagcactggtgttcttcctctatcgacgacggaaggggagcaggaaggacgttacgctcagaaagcttgacataaaagtggagacagtgaaccgagaacctctcactatgcatagcgatcgcgaggacgataccgcctccgtgtcaactgccacccgcgtgatgaaagccatctactcctcgttcaaagacgatgtggatctcaagcaggacttgaggtgtgacacaatcgatactcgggaggagtatgaaatgaaggacccaacaaatggctactacaacgtcagggctcacgaggacaggcctagctcccgggctgtgctgtacgccgattacagagctccaggccctgcgagatttgatggcaggccatcatcgcggctgtctcatagttcaggatatgcccaactaaatacctactcccggggacctgcttcggattacggccctgaaccgacgccaccagggccagctgcccctgctggaactgacacaacaagccaattgtcctacgaaaactacgaaaaatttaactcgcacccgttcccgggagctgccggttacccaacctaccgattggggtacccacaggctccaccgagcgggctggagaggacaccgtacgaagcctacgatcccattggaaaatatgcgacagcaactaggttcagctatacgtcacagcacagcgactacggtcagaggtttcagcagcgtatgcaaactcatgtgtag

SEQ ID NO: 104599 - DNA, 1974 bp, Artificial Sequence
  derived and/or modified sequence
atgctcagtctgctggtctggatattaaccttgagcgataccttttctcaggtaccccctgaggacaccagaatcgatggcggtcctgttattctccttcaggcaggcacaccgcacaatctcacttgccgcgcttttaacgcgaagcccgctgcaacaataatttggtttagggatgggacacagcaagaaggagccgtggctagtactgaactgctgaaagacggcaagcgcgaaacgactgtgtctcaattgttgatcaatcccactgatctcgacataggaagagtctttacctgtagatctatgaatgaggcaatcccgtcaggaaaagagacaagtatcgagttggacgtacaccatccgcctactgtcaccttgtctatcgagccccaaactgttcaagagggcgagagggttgtgttcacatgccaggccactgcaaatccagaaatcctgggatatagatgggccaagggcggattcttgattgaggacgcacatgagtctagatacgagacaaacgtggactatagtttcttcaccgagcccgtgtcctgcgaggtgcacaataaagttgggtcaaccaatgtttccaccttggttaacgtgcatttcgccccaaggatcgtggtggatcctaaaccaaccaccactgacataggcagtgacgttactctgacttgcgtttgggtgggcaaccctccgttaactctgacttggacaaagaaagacagcaacatggtgctttcaaatagcaatcagttgttgctgaaaagcgtaacccaggctgatgccggaacatatacctgccgcgcaatcgttcctaggattggagttgcggagcgagaggtcccactctacgtcaatggccctcccatcattagcagtgaagccgttcagtatgcagtgaggggagacggaggtaaggtcgagtgtttcatcggcagcacacccccacctgaccggattgcatgggcctggaaggaaaacttcctcgaagtcggtactctcgaacgttacaccgtggaacgcactaattccggtagcggagttctgtccacattaaccatcaacaacgtgatggaagccgattttcagacacattataattgcactgcctggaactccttcgggccaggcaccgcaataatccagctggaggagcgagaagtgctaccggtgggcatcattgctggtgcgacaataggggcttccatcctgctcatcttcttcttcattgcgttggttttcttcctgtatcggaggagaaaaggttctaggaaggacgttacactacgtaaactcgatattaaggtcgagacggtcaatagggaaccattgactatgcattcggatcgggaagacgacaccgccagcgtgtcaacagccacaagggtaatgaaggcgatatattcaagcttcaaagacgacgtcgacctaaagcaggatttaagatgcgacaccatagatacacgggaagagtatgagatgaaagatccaaccaacgggtattacaacgtccgcgctcacgaggatagaccctcctcccgggctgttctttatgctgattaccgggcacctggcccagcccgatttgacggcaggccgtcaagccgtttgtcccactcctctgggtacgcacagctaaatacttactccagaggacctgctagtgattatgggcctgagcccacgcctcctggtccagctgcacccgctggcacagataccacttctcaactcagctacgagaactatgaaaagttcaattctcatccgttcccaggtgcggctggctatccaacctacaggctgggttacccccaggctccaccaagcgggctcgaacggaccccttatgaggcgtatgaccccatcggcaagtatgctacggcaacccgctttagttacactagccaacatagcgactacggtcagcgtttccagcagcggatgcagacccacgtttag

SEQ ID NO: 104600 - protein, 280 aa, Artificial Sequence
  derived and/or modified sequence
MWTPGGPPGSAGWDRRRLGARLRAAFAGLQELQGLRATQQERVRGALALQPPPAPAAPCGPHGLHGPEQQLEAALAALQEQLSRLRQQDIGLKTHLDQLDLQISKLQLDVGTASGEALDSDSRPSSGFYEMSDGGSCSLSTSCASVCSDHISPSLGSLLPVAQAHKARPSMGDWRPRSVDETTVPAWRPQATEEGARPPGSVEDAGQPWGTFWPRPVSTELCNAPGELDMHAPPAGCTSSSLTGVGSGLRGKCGLCGCQLPFCSVNTSSKTKSSGISRQQ

SEQ ID NO: 104601 - DNA, 843 bp, Artificial Sequence
  derived and/or modified sequence
atgtggacacctggaggccctcctggtagtgccggttgggatcggcgtcgccttggggccagactgcgggccgcgtttgccgggcttcaagagctgcagggtctgcgggcaacgcagcaggaacgcgttagaggcgcgctggctttgcagcccccaccagcgcctgccgcaccctgcggaccccacggactccatggtcccgagcagcagctagaagcggccttggctgcccttcaggagcagctgtcacgcctgcggcagcaagacatagggctcaagacacacctcgaccagctggatctgcagatctctaaactgcagttggatgtggggactgcaagcggtgaagcgttggacagcgattcccgcccttcaagcggattttatgagatgtctgacggcggctcctgctccctctccacttcctgtgcaagcgtgtgttcagaccatatatctccgtcattgggctctttgcttcccgtggcacaggcacacaaagccaggccctctatgggcgactggcgcccgcggtcagtcgacgaaacaacagtgccggcgtggcgccctcaagctacggaggagggagctcggcctccggggagcgttgaagacgccggccagccttgggggacattctggccacgcccagtgtccactgaactctgtaatgcccctggtgaactggatatgcatgcaccaccagccggctgtacgagcagctcactaaccggggtcggctcaggtttaaggggaaagtgcgggctttgcggttgccagttgccattctgctccgtgaacacaagctcgaagaccaagtcgtccggtatatcccgccagcagtag

SEQ ID NO: 104602 - DNA, 843 bp, Artificial Sequence
  derived and/or modified sequence
atgtggacccctgggggccccccaggcagcgctggctgggacagaagaaggctgggcgcccggctgcgggccgcctttgctggcctgcaggagctgcagggcctgcgggccacccagcaggagcgggtgcggggggccctggccctgcagcccccaccagccccagctgccccctgtggcccccacggcctgcacggccctgagcagcagctggaggccgccctggccgccctgcaggagcagctgagccggctgcggcagcaggacatcggcctgaagacccacctggaccagctggacctgcagatcagcaagctgcagctggatgtgggcacagccagcggggaggccctggacagcgacagccggcccagcagcggcttctatgagatgtctgatggcggcagctgcagcctgagcaccagctgtgcctctgtgtgcagcgaccacatcagccccagcctgggcagcctgctgcctgtggcccaggcccacaaggcccggcccagcatgggagactggaggcccaggtctgtggatgagaccaccgtgcctgcctggaggccccaggccacagaggagggcgcccggcccccaggctctgtggaggatgctggccagccctggggcaccttctggcccaggcctgtgtccacagagctgtgcaatgcccctggagagctggacatgcacgcccctcctgctggctgcaccagcagcagcctgactggagtgggcagcggcctgcggggcaaatgtggcctgtgtggctgccagctgcccttctgcagcgtgaacaccagcagcaagaccaagagcagcggcatcagccggcagcagtag

SEQ ID NO: 104603 - DNA, 843 bp, Artificial Sequence
  derived and/or modified sequence
atgtggacccccggcggcccccccggcagcgccggctgggaccggcgtagactcggcgcgcggcttcgcgccgccttcgctgggctccaggagcttcaaggcttacgggccacacagcaggaaagagtaaggggggctttggccctgcagccacccccggcacccgctgccccatgtggcccccacggcctgcacggccccgagcagcagctggaagccgctctggccgcactgcaggagcaactatcccgactcagacaacaagacataggcctaaaaacccatctagatcagctcgatcttcagatcagcaagctgcaactggacgtagggaccgccagcggagaggccctagattctgactctcggccatcatccggtttctatgagatgtctgacggcggtagctgtagtctctccaccagctgcgcatctgtgtgttccgaccatatctcaccctccttgggctcgttacttcccgtcgctcaggcgcataaagcaaggccaagtatgggtgactggaggccacgctccgtggacgagaccacagtgcccgcctggcggccacaggcaacagaagaaggggcgcgacccccaggctctgtagaggatgcgggccagccatgggggactttttggccccgccccgttagcacggaattgtgcaatgcccccggcgaattagacatgcacgcgccacctgccggctgcacgtcatcatccttgactggagtgggaagtgggctgcggggtaaatgcggactgtgtggctgccagctgcccttctgcagtgtcaatacatcctccaaaaccaaaagtagtggaatttcaagacagcagtag

SEQ ID NO: 104604 - DNA, 843 bp, Artificial Sequence
  derived and/or modified sequence
atgtggacccctggcggacccccagggtccgcaggctgggaccggaggcgactgggcgcacgtctcagggcggctttcgccggattacaggaactgcagggcctgagagcaacacagcaggaaagggtcaggggtgccctagctctgcagccccctccagcaccggcagcaccatgtggccctcatggtcttcacggtcctgaacaacagttagaagctgctcttgcggcactccaagagcagctttctcggttgagacagcaggacatcgggctgaaaacgcatctggaccagctggacctgcagatcagtaagcttcaacttgatgtgggtactgcgtccggagaagcacttgattcggattcacgcccatcatccgggttttacgaaatgtctgatggcggtagctgcagcctgtcaacatcctgcgcatcagtgtgctccgaccacatcagccccagcctgggaagccttctgccggtcgcccaggcgcacaaagcgaggccatccatgggcgattggcggccaaggtctgtcgacgaaacaacggtccccgcttggcgccctcaagcaacagaagagggtgcgcgaccccctggctcagttgaggatgccggacagccctggggtacattttggccccgacctgtaagcaccgagctgtgtaacgcgcctggcgagctggacatgcacgctcccccagctggttgcaccagcagctcgttgaccggggtgggtagcgggctgcgaggaaaatgcggactctgcggttgccaattgcccttttgcagtgtgaacacgtcctctaaaactaaatctagtggcatctcgcggcagcagtag

SEQ ID NO: 104605 - DNA, 2026 bp, Artificial Sequence
  derived and/or modified sequence
ctgcggagccgggggcggagagaggaggcgcaggaggacccgcgacacagctcgggatccgcgcgcgctgggcctccggcgccgctcgtggggttcgggaggccgggaccctgcccgggagatgtggacgccgggcggacccccggggtccgcgggctgggaccgccgtaggttgggcgcgaggttgcgcgcggcgttcgcggggctgcaggagctgcaggggctgcgagccacgcagcaggagcgggtacggggcgccctggccctgcagcccccgcccgcgcccgccgcgccctgcggcccccacggcctccacggccccgagcagcagctggaggcggcgctggccgcgctgcaggagcagctgtcccggctgagacaacaggacatcggcctgaagacccacctggaccagctggacctgcagattagcaagctgcagctggatgtgggcacagcctcaggggaggccctggacagcgacagcaggcccagctcaggcttttacgagatgagcgacggtggatcctgctccctgtccacgtcctgtgcctccgtctgcagtgaccacatctctccctcgctgggcagtttgttgcctgtggcccaggcccacaaggccaggcccagcatgggggactggaggccccggtcggttgatgagactactgtgccagcgtggagaccccaggctaccgaggagggcgccaggcccccagggagcgtggaggatgcaggccagccgtggggcacattctggcccaggcctgtgtctacagagctgtgcaatgctccaggtgaacttgacatgcatgctccgcctgcaggctgcacctccagttcactgacaggtgtaggttctggtttgagaggaaagtgtggcctctgtggctgtcagctccctttctgctcagtgaacacaagttcaaagacaaaatcatcaggaatttcaagacagcaatgacagagcactacaccaagctgggggctgcattgactgaccagtcacaggctggaagtcgggtcctggccacaggcccagcttcttctcccgatatcatcggcccccctctgcccgccaagtcactctgctttccccacagtgagccagtgggagctgcagagaagtgtccagaaaggactgctggtcagtggaatttcctttacgtggaaagttgaagtgagggagtaatggacgtaagagagaatggtttctccctaacaaatagactggaaattccaatccttctactttctgtgtgtttttctagcatgactgcaagtgctggggccataagcaccatgttcagcagcacccaggaagcaaaagtagttgacagaatgttagtgagcattccttcttgtttttatttttttttaaagccccttctatatttcataatttttgtgattttgggtaaatacaatgttatcataagttaaggaaaagttaatctttttaggctaggaaaagttccagtttacgtgcatatatattattgcaaaatgatgtgaaaatttaatattttttgagataattgatatttttcattcactatgttaataagatgaatcatattaacaaaatgtccattgctaaaccaatcatgcattcataggatgaacaatgtttggttatggtgtttttgtttgtacttttaaatggtacttaaacataattagggagaagatgagctccaaagcacctggcacagctccagcaggctcagctaatggccggtcttctcatttaccaaacccacgtggccaccccgacctcagacgaattttttttacaaagtccagacattcaattatttacaatgtgtctttttaggacactgccagaattaggttgtaaatttttttttaggattgtatcttatgttcatagaagaaattggcctatgaaatttctttcatataatactcacatctggttttcatcccaaagctaaaccagcccataaaagcagctgtgatggttttcttcttcttatatttcaataaatggtatgtaaaagac

SEQ ID NO: 104606 - DNA, 843 bp, Artificial Sequence
  derived and/or modified sequence
atgtggacccccggcggcccccccggcagcgccggctgggacagaagaagactgggcgccagactgagagccgccttcgccggcctgcaggagctgcagggcctgagagccacccagcaggagagagtgagaggcgccctggccctgcagcccccccccgcccccgccgccccctgcggcccccacggcctgcacggccccgagcagcagctggaggccgccctggccgccctgcaggagcagctgagcagactgagacagcaggacatcggcctgaagacccacctggaccagctggacctgcagatcagcaagctgcagctggacgtgggcaccgccagcggcgaggccctggacagcgacagcagacccagcagcggcttctacgagatgagcgacggcggcagctgcagcctgagcaccagctgcgccagcgtgtgcagcgaccacatcagccccagcctgggcagcctgctgcccgtggcccaggcccacaaggccagacccagcatgggcgactggagacccagaagcgtggacgagaccaccgtgcccgcctggagaccccaggccaccgaggagggcgccagaccccccggcagcgtggaggacgccggccagccctggggcaccttctggcccagacccgtgagcaccgagctgtgcaacgcccccggcgagctggacatgcacgccccccccgccggctgcaccagcagcagcctgaccggcgtgggcagcggcctgagaggcaagtgcggcctgtgcggctgccagctgcccttctgcagcgtgaacaccagcagcaagaccaagagcagcggcatcagcagacagcagtag

SEQ ID NO: 104607 - protein, 751 aa, Artificial Sequence
  derived and/or modified sequence
MAFLIILITCFVIILATSQPCQTPDDFVAATSPGHIIIGGLFAIHEKMLSSEDSPRRPQIQECVGFEISVFLQTLAMIHSIEMINNSTLLPGVKLGYEIYDTCTEVTVAMAATLRFLSKFNCSRETVEFKCDYSSYMPRVKAVIGSGYSEITMAVSRMLNLQLMPQVGYESTAEILSDKIRFPSFLRTVPSDFHQIKAMAHLIQKSGWNWIGIITTDDDYGRLALNTFIIQAEANNVCIAFKEVLPAFLSDNTIEVRINRTLKKIILEAQLLGVLKNVTFTDGWNSFHFDAHGDLNTGYDVVLWKEINGHMTVTKMAEYDLQNDVFIIPDQETKNEFRNLKQIQSKCSKECSPGQMKKTTRSQHICCYECQNCPENHYTNQTDMPHCLLCNNKTHWAPVRSTMCFEKEVEYLNWNDSLAILLLILSLLGIIFVLVVGIIFTRNLNTPVVKSSGGLRVCYVILLCHFLNFASTSFFIGEPQDFTCKTRQTMFGVSFTLCISCILTKSLKILLAFSFDPKLQKFLKCLYRPILIIFTCTGIQVVICTLWLIFAAPTVEVNVSLPRVIILECEEGSILAFGTMLGYIAILAFICFIFAFKGKYENYNEAKFITFGMLIYFIAWITFIPIYATTFGKYVPAVEIIVILISNYGILYCTFIPKCYVIICKQEINTKSAFLKMIYSYSSHSVSSIALSPASLDSMSGNVTMTNPSSSGKSATWQKSKDLQAQAFAHICRENATSVSKTLPRKRMSSI

SEQ ID NO: 104608 - DNA, 2256 bp, Artificial Sequence
  derived and/or modified sequence
atggccttcctgatcatcctgatcacctgcttcgtgatcatcctggccaccagccagccctgccagacccccgacgacttcgtggccgccaccagccccggccacatcatcatcggcggcctgttcgccatccacgagaagatgctgagcagcgaggacagccccagaagaccccagatccaggagtgcgtgggcttcgagatcagcgtgttcctgcagaccctggccatgatccacagcatcgagatgatcaacaacagcaccctgctgcccggcgtgaagctgggctacgagatctacgacacctgcaccgaggtgaccgtggccatggccgccaccctgagattcctgagcaagttcaactgcagcagagagaccgtggagttcaagtgcgactacagcagctacatgcccagagtgaaggccgtgatcggcagcggctacagcgagatcaccatggccgtgagcagaatgctgaacctgcagctgatgccccaggtgggctacgagagcaccgccgagatcctgagcgacaagatcagattccccagcttcctgagaaccgtgcccagcgacttccaccagatcaaggccatggcccacctgatccagaagagcggctggaactggatcggcatcatcaccaccgacgacgactacggcagactggccctgaacaccttcatcatccaggccgaggccaacaacgtgtgcatcgccttcaaggaggtgctgcccgccttcctgagcgacaacaccatcgaggtgagaatcaacagaaccctgaagaagatcatcctggaggcccagctgctgggcgtgctgaagaacgtgaccttcaccgacggctggaacagcttccacttcgacgcccacggcgacctgaacaccggctacgacgtggtgctgtggaaggagatcaacggccacatgaccgtgaccaagatggccgagtacgacctgcagaacgacgtgttcatcatccccgaccaggagaccaagaacgagttcagaaacctgaagcagatccagagcaagtgcagcaaggagtgcagccccggccagatgaagaagaccaccagaagccagcacatctgctgctacgagtgccagaactgccccgagaaccactacaccaaccagaccgacatgccccactgcctgctgtgcaacaacaagacccactgggcccccgtgagaagcaccatgtgcttcgagaaggaggtggagtacctgaactggaacgacagcctggccatcctgctgctgatcctgagcctgctgggcatcatcttcgtgctggtggtgggcatcatcttcaccagaaacctgaacacccccgtggtgaagagcagcggcggcctgagagtgtgctacgtgatcctgctgtgccacttcctgaacttcgccagcaccagcttcttcatcggcgagccccaggacttcacctgcaagaccagacagaccatgttcggcgtgagcttcaccctgtgcatcagctgcatcctgaccaagagcctgaagatcctgctggccttcagcttcgaccccaagctgcagaagttcctgaagtgcctgtacagacccatcctgatcatcttcacctgcaccggcatccaggtggtgatctgcaccctgtggctgatcttcgccgcccccaccgtggaggtgaacgtgagcctgcccagagtgatcatcctggagtgcgaggagggcagcatcctggccttcggcaccatgctgggctacatcgccatcctggccttcatctgcttcatcttcgccttcaagggcaagtacgagaactacaacgaggccaagttcatcaccttcggcatgctgatctacttcatcgcctggatcaccttcatccccatctacgccaccaccttcggcaagtacgtgcccgccgtggagatcatcgtgatcctgatcagcaactacggcatcctgtactgcaccttcatccccaagtgctacgtgatcatctgcaagcaggagatcaacaccaagagcgccttcctgaagatgatctacagctacagcagccacagcgtgagcagcatcgccctgagccccgccagcctggacagcatgagcggcaacgtgaccatgaccaaccccagcagcagcggcaagagcgccacctggcagaagagcaaggacctgcaggcccaggccttcgcccacatctgcagagagaacgccaccagcgtgagcaagaccctgcccagaaagagaatgagcagcatctag

SEQ ID NO: 104609 - DNA, 2310 bp, Artificial Sequence
  derived and/or modified sequence
gaactgagcaaatgagatagaaacatggcattcttaattatactaattacctgctttgtgattattcttgctacttcacagccttgccagacccctgatgactttgtggctgccacttctccgggacatatcataattggaggtttgtttgctattcatgaaaaaatgttgtcctcagaagactctcccagacgaccacaaatccaggagtgtgttggctttgaaatatcagtttttcttcaaactcttgccatgatacacagcattgagatgatcaacaattcaacactcttacctggagtcaaactggggtatgaaatctatgacacttgtacagaagtcacagtggcaatggcagccactctgaggtttctttctaaattcaactgctccagagaaactgtggagtttaagtgtgactattccagctacatgccaagagttaaggctgtcataggttctgggtactcagaaataactatggctgtctccaggatgttgaatttacagctcatgccacaggtgggttatgaatcaactgcagaaatcctgagtgacaaaattcgctttccttcatttttacggactgtgcccagtgacttccatcaaattaaagcaatggctcacctgattcagaaatctggttggaactggattggcatcataaccacagatgatgactatggacgattggctcttaacacttttataattcaggctgaagcaaataacgtgtgcatagccttcaaagaggttcttccagcctttctttcagataataccattgaagtcagaatcaatcggacactgaagaaaatcattttagaagcccagttacttggtgtgctaaaaaatgtgacattcactgatggatggaattcatttcattttgatgctcacggggatttaaatactggatatgatgttgtgctctggaaggagatcaatggacacatgactgtcactaagatggcagaatatgacctacagaatgatgtcttcatcatcccagatcaggaaacaaaaaatgagttcaggaatcttaagcaaattcaatctaaatgctccaaggaatgcagtcctgggcaaatgaagaaaactacaagaagtcaacacatctgttgctatgaatgtcagaactgtcctgaaaatcattacactaatcagacagatatgcctcactgccttttatgcaacaacaaaactcactgggcccctgttaggagcactatgtgctttgaaaaggaagtggaatatctcaactggaatgactccttggccatcctactcctgattctctccctactgggaatcatatttgttctggttgttggcataatatttacaagaaacctgaacacacctgttgtgaaatcatccgggggattaagagtctgctatgtgatccttctctgtcatttcctcaattttgccagcacgagctttttcattggagaaccacaagacttcacatgtaaaaccaggcagacaatgtttggagtgagctttactctttgcatctcctgcattttgacgaagtctctgaaaattttgctagccttcagctttgatcccaaattacagaaatttctgaagtgcctctatagaccgatccttattatcttcacttgcacgggcatccaggttgtcatttgcacactctggctaatctttgcagcacctactgtagaggtgaatgtctccttgcccagagtcatcatcctggagtgtgaggagggatccatacttgcatttggcaccatgctgggctacattgccatcctggccttcatttgcttcatatttgctttcaaaggcaaatatgagaattacaatgaagccaaattcattacatttggcatgctcatttacttcatagcttggatcacattcatccctatctatgctaccacatttggcaaatatgtaccagctgtggagattattgtcatattaatatctaactatggaatcctgtattgcacattcatccccaaatgctatgttattatttgtaagcaagagattaacacaaagtctgcctttctcaagatgatctacagttattcttcccatagtgtgagcagcattgccctgagtcctgcttcactggactccatgagcggcaatgtcacaatgaccaatcccagctctagtggcaagtctgcaacctggcagaaaagcaaagatcttcaggcacaagcatttgcacacatatgcagggaaaatgccacaagtgtatctaaaactttgcctcgaaaaagaatgtcaagtatatgaataagccttaggagatgccacattccagaa

SEQ ID NO: 104610 - DNA, 2256 bp, Artificial Sequence
  derived and/or modified sequence
atggccttcctgataatcctgataacctgcttcgtgataatactcgcaacaagccagccttgccaaaccccggatgatttcgtcgcagccacctcacccggacacattattatcggcggtctgtttgccatacatgaaaagatgctgtcctccgaagatagtcccaggcgacctcagatccaggagtgcgtaggttttgaaatctcggtcttcctgcagactttggccatgatccattcgatcgagatgattaataactccacactgttgcctggtgtgaaattaggttacgaaatttatgacacctgcaccgaagttactgtcgcaatggctgccaccttgcggttcctgtccaagttcaactgctcgcgagagaccgtagagtttaagtgcgactatagctcgtatatgccaagagtcaaggccgtgatagggtccggttattcagagatcaccatggccgtctctcgaatgcttaacctccaactgatgcctcaggttggctacgagagtaccgccgagattctctccgacaagattcgctttccaagttttctgcgaactgtaccgtctgatttccatcagatcaaggctatggcacaccttatccagaaatcgggatggaactggattgggatcatcactacagacgacgactatggcagactcgccctgaacactttcatcatacaggcagaagctaataatgtgtgcattgcttttaaagaggtccttccagcctttctgagcgataacaccattgaggtacggattaaccgtacactgaaaaaaatcatcctagaggcacagctgctgggagtcctgaagaatgtgacctttactgatgggtggaactcattccactttgatgctcatggggacttaaacacgggctacgacgttgttctatggaaggaaattaacgggcatatgacggtaactaaaatggccgagtacgacttgcagaacgacgtcttcatcattcccgatcaggaaaccaagaacgaatttcgcaacctgaaacagatacagtctaagtgctctaaagaatgcagtcctgggcagatgaagaagaccacacgaagccagcacatatgttgttatgaatgccagaattgtccagagaaccactatactaatcagaccgacatgcctcactgcctcttgtgcaataacaagacacattgggcccccgtgcgcagcactatgtgttttgagaaggaagtggagtacctgaattggaacgacagtctcgctatcttattgctgattttgagtcttctcggcattatatttgttctggtcgttgggattatatttaccagaaacctcaatactccggtggtgaaatcgtccggcggcctcagggtctgctatgtgatcctgctgtgccattttctgaacttcgcgtctactagctttttcataggagaaccccaggacttcacctgcaagacccggcaaaccatgttcggcgtgtcattcactctttgcatcagctgtatcctgaccaagtcccttaaaatcttactggcctttagtttcgaccccaaactgcagaagttcctgaagtgcctgtaccgtcctatactcataatcttcacatgtactggcatccaggttgtgatttgcacgctatggctgattttcgcggctccgacagtcgaggtcaatgtcagccttccaagggttatcatcctggaatgtgaagaaggcagtattctggccttcggcactatgctggggtacatcgccatcctggcctttatatgctttatcttcgccttcaagggaaaatacgaaaattataatgaagcaaagttcataacgtttggtatgctgatttactttatagcgtggatcactttcattccaatatacgcaacaactttcgggaagtacgtgccagctgttgaaataatcgtgattctcatttcaaactacggtatcctctattgtactttcattcccaagtgctacgtgattatttgcaaacaggaaattaacacaaaaagcgccttcctcaaaatgatctactcctactcctcccatagtgtctcctccatcgccttgagcccagccagtctcgactccatgtccgggaacgtgactatgacaaatccttcttcttccggcaagtctgccacctggcagaaatcaaaggacctgcaggcccaagcttttgcccatatttgccgggagaatgcgacaagcgttagcaagactctgccaagaaaacggatgtcttcaatctag

SEQ ID NO: 104611 - DNA, 2256 bp, Artificial Sequence
  derived and/or modified sequence
atggccttcctgatcatcctgatcacctgctttgtgatcatcctggccaccagccagccctgccagaccccagatgactttgtggccgccaccagccctggccacatcatcatcggcggcctgtttgccatccacgagaagatgctgagcagcgaggacagcccccggcggccccagatccaggagtgtgtgggctttgagatctctgtgttcctgcagaccctggccatgatccacagcattgagatgatcaacaacagcaccctgctgcccggggtgaagctgggctatgagatctatgacacctgcacagaggtgacagtggccatggccgccaccctgcgcttcctgagcaagttcaactgcagccgggagaccgtggagttcaagtgtgactacagcagctacatgccccgggtgaaggccgtcatcggcagcggctacagcgagatcaccatggctgtgtccaggatgctgaacctgcagctgatgccccaggtgggctatgagagcacagctgagatcctgagtgacaagatccgcttccccagcttcctgaggacagtgcccagcgacttccaccagatcaaggccatggcccacctgatccagaagagcggctggaactggattggcatcatcaccacagatgatgattatggccgcctggccctgaacaccttcatcatccaggccgaggccaacaacgtgtgcatcgccttcaaggaggtgctgcctgccttcctgagtgacaacaccatcgaggtgcgcatcaacagaaccctgaagaagatcatcctggaggcccagctgctgggcgtgctgaagaatgtgaccttcacagatggctggaacagcttccactttgatgcccacggggacctgaacacaggctatgatgtggtgctgtggaaggagatcaatggccacatgacagtgaccaagatggccgagtatgacctgcagaatgatgtgttcatcatcccagaccaggagaccaagaatgagttcaggaacctgaagcagatccagagcaagtgcagcaaggagtgcagccctggccagatgaagaagaccaccaggagccagcacatctgctgctatgagtgccagaactgcccagagaaccactacaccaaccagacagacatgccccactgcctgctgtgcaacaacaagacccactgggcccctgtgcgcagcaccatgtgctttgagaaggaggtggagtacctgaactggaatgacagcctggccatcctgctgctgatcctgagcctgctgggcatcatctttgtgctggtggtgggcatcatcttcaccaggaacctgaacacccctgtggtgaagagcagcggcggcctgcgggtgtgctacgtgatcctgctgtgccacttcctgaactttgccagcaccagcttcttcatcggggagccccaggacttcacctgcaagacccggcagaccatgtttggagtgtccttcaccctgtgcatcagctgcatcctgaccaagagcctgaagatcctgctggccttctcctttgaccccaagctgcagaagttcctgaagtgcctgtaccggcccatcctgatcatcttcacctgcaccggcatccaggtggtgatctgcaccctgtggctgatctttgctgcccccaccgtggaggtgaatgtgtccctgcccagggtcatcatcctggagtgtgaggagggcagcatcctggccttcggcaccatgctgggctacatcgccatcctggccttcatctgcttcatctttgccttcaagggcaagtatgagaactacaatgaggccaagttcatcaccttcggcatgctgatctacttcatcgcctggatcaccttcatccccatctatgccaccaccttcggcaagtatgtgcctgctgtggagatcatcgtcatcctgatcagcaactacggcatcctgtactgcaccttcatccccaagtgctacgtgatcatctgcaagcaggagatcaacaccaagagcgccttcctgaagatgatctacagctacagcagccacagcgtgagcagcatcgccctgagccctgccagcctggacagcatgtctggaaatgtgaccatgaccaaccccagcagcagcggcaagagcgccacctggcagaagagcaaggacctgcaggcccaggcctttgcccacatctgccgggagaatgccacctctgtgtccaagaccctgcccaggaagaggatgagcagcatctag

SEQ ID NO: 104612 - DNA, 2256 bp, Artificial Sequence
  derived and/or modified sequence
atggccttcctgatcatcctgatcacctgcttcgtgatcatcctggcaacttcccaaccttgccagactccagacgatttcgtcgctgcaacttctcctggccacatcatcataggcgggttgttcgccattcacgagaagatgctgtcctctgaagacagtccccggagacctcagatccaagaatgtgtcggcttcgaaattagtgtttttcttcaaacgcttgcaatgatccactccatagaaatgatcaacaattccacgctgctgcccggggtgaagctgggctatgaaatatatgacacctgtacagaagtgacagtggcgatggctgctaccctgaggttcctgtctaaatttaattgtagtagggagaccgtagagtttaagtgcgactacagttcctatatgccaagagtcaaagcagttattgggtctggctattccgagataaccatggcggtctcccgtatgctgaacctccaactgatgcctcaggttgggtacgagtccactgctgagatcctttcagacaagatccgttttcccagcttcttgagaacagtgccctcagacttccaccaaatcaaggcaatggctcacctaattcagaaatccggatggaattggatcggtattataacaacagatgacgactatggtaggttagccttaaacacgttcattatccaggctgaggcaaacaatgtttgcattgcctttaaagaggtgctacctgctttcctttccgacaatacaatagaggtaaggatcaacagaactctcaagaagattatcctggaagcacagctgctgggcgtattgaaaaacgtgacgtttactgatgggtggaattcctttcacttcgacgctcatggtgacctgaatacagggtacgacgtggtgctctggaaggagatcaatggacacatgactgtcaccaagatggctgagtacgatctgcagaacgacgtgttcattattcccgatcaggagacaaaaaatgaattcagaaatctgaaacagatacagtccaaatgctccaaagagtgtagcccagggcaaatgaaaaagactacgagaagccagcacatctgctgctacgagtgtcaaaactgtcctgaaaaccattacactaaccagactgacatgcctcactgcctcttatgcaacaataagacccattgggccccagtacgctccactatgtgctttgagaaggaagtcgagtaccttaactggaatgacagcctcgcaatcctgctgctcatcctttctcttctgggcatcattttcgtgctggtcgtggggattatcttcaccagaaacctgaataccccagtggtgaagtctagtgggggcctccgggtctgttacgtaattctcctgtgtcattttctgaactttgcatctacgagcttttttatcggtgagccgcaggactttacttgcaagacccggcagactatgttcggtgtttcttttacactgtgcatctcgtgcatcctgacaaagtcactgaagattttgcttgcattcagcttcgacccaaagctgcagaagttcctgaagtgtctctaccgccccatactgataatttttacctgtacgggtatacaggtggtgatctgtacactgtggttgattttcgctgcccccaccgtagaagtaaacgtctccctgcctagggtgattattttggaatgtgaagaaggtagtatcttggcctttggcactatgttgggatatatcgcaatcttggcattcatatgtttcatttttgcctttaagggcaaatacgaaaattacaacgaggctaagtttatcaccttcggcatgctgatttatttcatcgcttggatcactttcattccaatttacgctacgacctttggtaaatacgtaccagcagtcgagatcattgtgatactcatctcaaactacgggatcctgtattgtacattcataccgaagtgttatgtgataatatgcaaacaggaaatcaacacaaaatccgctttcctgaaaatgatctattcctattcctcgcatagcgtgtcctctatcgcccttagccccgcaagtctggacagcatgtcagggaatgtgaccatgaccaacccttctagcagtggaaaatcagccacctggcagaagtccaaagatctccaggcgcaagcctttgcgcacatttgcagagagaacgccactagcgtctcgaaaactctccctaggaagaggatgtcttccatatag

SEQ ID NO: 104613 - DNA, 2256 bp, Artificial Sequence
  derived and/or modified sequence
atggcattcctcatcatattgattacgtgctttgtgataattctggccacatcgcaaccctgccagacccccgacgactttgtggccgcaacctctcccggacatatcataatcgggggtctgtttgccatccatgagaaaatgctgagttcagaggactccccgcgaaggcctcagattcaggagtgtgttggctttgaaatatcagtgtttcttcagacattggctatgattcacagcatcgagatgatcaacaacagcaccttgctgcccggtgtcaagctcggctacgagatctatgatacttgtacggaggtcacagtcgcaatggcagccacactgcgctttctttcgaagtttaattgtagccgggagactgtggagtttaagtgtgactactcatcctatatgccgagagtgaaggccgtcatcgggagcggttatagcgaaattactatggcggtctccaggatgctgaatttgcagctgatgccccaggtgggatacgaatctacggccgagatactgagcgataaaataaggttcccatcattcctgagaacggtcccaagcgacttccatcagatcaaggcaatggcccacctcatacagaaatcaggatggaattggatcggcatcatcactactgacgacgactatggcaggctggccctgaacacattcatcatccaggctgaagccaataatgtgtgcatcgcttttaaggaggtcctgccagcttttctctccgacaacacaatcgaggtgcgtatcaatagaactctgaagaaaataatactggaagcccaactgctcggagttttgaagaatgtgaccttcactgatggatggaattccttccactttgacgcccatggtgatcttaacaccggatatgatgtggtgctgtggaaggagattaacgggcacatgaccgtcaccaaaatggctgagtacgacttacaaaatgatgttttcatcattcctgaccaagaaacaaagaacgagtttaggaatttaaagcagatccaatctaaatgttccaaggaatgcagccctggccaaatgaaaaaaactactaggagccagcacatttgttgctacgagtgtcagaattgtcccgaaaatcactacaccaaccaaaccgacatgcctcattgcctgttgtgtaataataaaacccactgggcgcctgtaaggtccactatgtgcttcgagaaggaagtagaatacctgaattggaatgatagtctagctatccttctgttaattctgtccttattaggcataatcttcgtgcttgtggttgggattatctttactcgcaacttaaatacacccgtggtaaagagcagtgggggtctcagagtatgctatgtgatccttctgtgtcacttcctgaactttgcctcaacttcattcttcatcggggagccccaggacttcacctgcaagacacgtcagactatgttcggagtcagttttaccctgtgcatctcatgcatcctgaccaaatccctcaagattctgctcgcattttcgtttgatccaaagctgcaaaagttcctaaagtgtctgtatcgcccaattctcatcatctttacatgcacggggatccaagtagttatttgcaccctctggctcatcttcgcggcaccaacagtggaggtgaatgtgagtcttcccagagtcatcatcttagaatgcgaggagggcagtatcctggcctttggcaccatgctcgggtacattgccatcttggcatttatttgttttatcttcgcattcaagggcaagtatgagaactataacgaagcaaagtttattacgttcggtatgttaatttactttatcgcttggatcacatttataccaatctatgcaactacttttggtaagtacgtcccggcagtcgaaatcatcgtcatcctcatctctaactacggcatactgtactgtacatttattccaaaatgttatgtgatcatctgtaagcaggagatcaatacaaagtccgcattcctcaagatgatttacagctacagctctcacagcgtgtctagtatcgcgctgagtccagccagcctggatagcatgtcaggcaatgtaactatgaccaatcctagttctagcggtaagagcgctacctggcagaaatccaaggacctgcaggcccaggccttcgcccatatctgcagagaaaacgccacctctgtatctaaaacactgcctaggaagaggatgagcagcatttag

SEQ ID NO: 104614 - protein, 77 aa, Artificial Sequence
  derived and/or modified sequence
MGGGNGGAGGGGKLKPWECSSKCSSRCSGTQYKKACLTYCNKCCATCLCVPPGTYGNKGACPCYNNWKTKEGGPKCP

SEQ ID NO: 104615 - protein, 90 aa, Artificial Sequence
  derived and/or modified sequence
MKLVFATLLLCSLLLSSSFLEPVIAYEDSSYCSNKCSDRCSSAGVKDRCLRYCGICCAECKCVPSGTYGNKHQCPCYRDKLNKKGKPKCP

SEQ ID NO: 104616 - protein, 90 aa, Artificial Sequence
  derived and/or modified sequence
MKLVFGTLLLCSLLLSFSFLEPVIAYEDSSYCSNKCADRCSSAGVKDRCVKYCGICCAECKCVPSGTYGNKHECPCYRDKLNKKGKPKCP

SEQ ID NO: 104617 - protein, 855 aa, Artificial Sequence
  derived and/or modified sequence
MAFLIILITCFVIILATSQPCQTPDDFVAATSPGHIIIGGLFAIHEKMLSSEDSPRRPQIQECVGFEISVFLQTLAMIHSIEMINNSTLLPGVKLGYEIYDTCTEVTVAMAATLRFLSKFNCSRETVEFKCDYSSYMPRVKAVIGSGYSEITMAVSRMLNLQLMPQVGYESTAEILSDKIRFPSFLRTVPSDFHQIKAMAHLIQKSGWNWIGIITTDDDYGRLALNTFIIQAEANNVCIAFKEVLPAFLSDNTIEVRINRTLKKIILEAQVNVIVVFLRQFHVFDLFNKAIEMNINKMWIASDNWSTATKITTIPNVKKIGKVVGFAFRRGNISSFHSFLQNLHLLPSDSHKLLHEYAMHLSACAYVKDTDLSQCIFNHSQRTLAYKANKAIERNFVMRNDFLWDYAEPGLIHSIQLAVFALGYAIRDLCQARDCQNPNAFQPWEQIQSKCSKECSPGQMKKTTRSQHICCYECQNCPENHYTNQTDMPHCLLCNNKTHWAPVRSTMCFEKEVEYLNWNDSLAILLLILSLLGIIFVLVVGIIFTRNLNTPVVKSSGGLRVCYVILLCHFLNFASTSFFIGEPQDFTCKTRQTMFGVSFTLCISCILTKSLKILLAFSFDPKLQKFLKCLYRPILIIFTCTGIQVVICTLWLIFAAPTVEVNVSLPRVIILECEEGSILAFGTMLGYIAILAFICFIFAFKGKYENYNEAKFITFGMLIYFIAWITFIPIYATTFGKYVPAVEIIVILISNYGILYCTFIPKCYVIICKQEINTKSAFLKMIYSYSSHSVSSIALSPASLDSMSGNVTMTNPSSSGKSATWQKSKDLQAQAFAHICRENATSVSKTLPRKRMSSI

SEQ ID NO: 104618 - DNA, 2568 bp, Artificial Sequence
  derived and/or modified sequence
atggccttcctgatcatcctgatcacctgcttcgtgatcatcctggccaccagccagccctgccagacccccgacgacttcgtggccgccaccagccccggccacatcatcatcggcggcctgttcgccatccacgagaagatgctgagcagcgaggacagccccagaagaccccagatccaggagtgcgtgggcttcgagatcagcgtgttcctgcagaccctggccatgatccacagcatcgagatgatcaacaacagcaccctgctgcccggcgtgaagctgggctacgagatctacgacacctgcaccgaggtgaccgtggccatggccgccaccctgagattcctgagcaagttcaactgcagcagagagaccgtggagttcaagtgcgactacagcagctacatgcccagagtgaaggccgtgatcggcagcggctacagcgagatcaccatggccgtgagcagaatgctgaacctgcagctgatgccccaggtgggctacgagagcaccgccgagatcctgagcgacaagatcagattccccagcttcctgagaaccgtgcccagcgacttccaccagatcaaggccatggcccacctgatccagaagagcggctggaactggatcggcatcatcaccaccgacgacgactacggcagactggccctgaacaccttcatcatccaggccgaggccaacaacgtgtgcatcgccttcaaggaggtgctgcccgccttcctgagcgacaacaccatcgaggtgagaatcaacagaaccctgaagaagatcatcctggaggcccaggtgaacgtgatcgtggtgttcctgagacagttccacgtgttcgacctgttcaacaaggccatcgagatgaacatcaacaagatgtggatcgccagcgacaactggagcaccgccaccaagatcaccaccatccccaacgtgaagaagatcggcaaggtggtgggcttcgccttcagaagaggcaacatcagcagcttccacagcttcctgcagaacctgcacctgctgcccagcgacagccacaagctgctgcacgagtacgccatgcacctgagcgcctgcgcctacgtgaaggacaccgacctgagccagtgcatcttcaaccacagccagagaaccctggcctacaaggccaacaaggccatcgagagaaacttcgtgatgagaaacgacttcctgtgggactacgccgagcccggcctgatccacagcatccagctggccgtgttcgccctgggctacgccatcagagacctgtgccaggccagagactgccagaaccccaacgccttccagccctgggagcagatccagagcaagtgcagcaaggagtgcagccccggccagatgaagaagaccaccagaagccagcacatctgctgctacgagtgccagaactgccccgagaaccactacaccaaccagaccgacatgccccactgcctgctgtgcaacaacaagacccactgggcccccgtgagaagcaccatgtgcttcgagaaggaggtggagtacctgaactggaacgacagcctggccatcctgctgctgatcctgagcctgctgggcatcatcttcgtgctggtggtgggcatcatcttcaccagaaacctgaacacccccgtggtgaagagcagcggcggcctgagagtgtgctacgtgatcctgctgtgccacttcctgaacttcgccagcaccagcttcttcatcggcgagccccaggacttcacctgcaagaccagacagaccatgttcggcgtgagcttcaccctgtgcatcagctgcatcctgaccaagagcctgaagatcctgctggccttcagcttcgaccccaagctgcagaagttcctgaagtgcctgtacagacccatcctgatcatcttcacctgcaccggcatccaggtggtgatctgcaccctgtggctgatcttcgccgcccccaccgtggaggtgaacgtgagcctgcccagagtgatcatcctggagtgcgaggagggcagcatcctggccttcggcaccatgctgggctacatcgccatcctggccttcatctgcttcatcttcgccttcaagggcaagtacgagaactacaacgaggccaagttcatcaccttcggcatgctgatctacttcatcgcctggatcaccttcatccccatctacgccaccaccttcggcaagtacgtgcccgccgtggagatcatcgtgatcctgatcagcaactacggcatcctgtactgcaccttcatccccaagtgctacgtgatcatctgcaagcaggagatcaacaccaagagcgccttcctgaagatgatctacagctacagcagccacagcgtgagcagcatcgccctgagccccgccagcctggacagcatgagcggcaacgtgaccatgaccaaccccagcagcagcggcaagagcgccacctggcagaagagcaaggacctgcaggcccaggccttcgcccacatctgcagagagaacgccaccagcgtgagcaagaccctgcccagaaagagaatgagcagcatctag

SEQ ID NO: 104619 - DNA, 2622 bp, Artificial Sequence
  derived and/or modified sequence
gaactgagcaaatgagatagaaacatggcattcttaattatactaattacctgctttgtgattattcttgctacttcacagccttgccagacccctgatgactttgtggctgccacttctccgggacatatcataattggaggtttgtttgctattcatgaaaaaatgttgtcctcagaagactctcccagacgaccacaaatccaggagtgtgttggctttgaaatatcagtttttcttcaaactcttgccatgatacacagcattgagatgatcaacaattcaacactcttacctggagtcaaactggggtatgaaatctatgacacttgtacagaagtcacagtggcaatggcagccactctgaggtttctttctaaattcaactgctccagagaaactgtggagtttaagtgtgactattccagctacatgccaagagttaaggctgtcataggttctgggtactcagaaataactatggctgtctccaggatgttgaatttacagctcatgccacaggtgggttatgaatcaactgcagaaatcctgagtgacaaaattcgctttccttcatttttacggactgtgcccagtgacttccatcaaattaaagcaatggctcacctgattcagaaatctggttggaactggattggcatcataaccacagatgatgactatggacgattggctcttaacacttttataattcaggctgaagcaaataacgtgtgcatagccttcaaagaggttcttccagcctttctttcagataataccattgaagtcagaatcaatcggacactgaagaaaatcattttagaagcccaggttaatgtcattgtggtatttctgaggcaattccatgtttttgatctcttcaataaagccattgaaatgaatataaataagatgtggattgctagtgataattggtcaactgccaccaagattaccaccattcctaatgttaaaaagattggcaaagttgtagggtttgcctttagaagagggaatatatcctctttccattcctttcttcaaaatctgcacttgcttcccagtgacagtcacaaactcttacatgaatatgccatgcatttatctgcctgcgcatatgtcaaggacactgatttgagtcaatgcatattcaatcattctcaaaggactttggcctacaaggctaacaaggctatagaaaggaacttcgtcatgagaaatgacttcctctgggactatgctgagccaggactcattcatagtattcagcttgcagtgtttgcccttggttatgccattcgggatctgtgtcaagctcgtgactgtcagaaccccaacgcctttcaaccatgggagcaaattcaatctaaatgctccaaggaatgcagtcctgggcaaatgaagaaaactacaagaagtcaacacatctgttgctatgaatgtcagaactgtcctgaaaatcattacactaatcagacagatatgcctcactgccttttatgcaacaacaaaactcactgggcccctgttaggagcactatgtgctttgaaaaggaagtggaatatctcaactggaatgactccttggccatcctactcctgattctctccctactgggaatcatatttgttctggttgttggcataatatttacaagaaacctgaacacacctgttgtgaaatcatccgggggattaagagtctgctatgtgatccttctctgtcatttcctcaattttgccagcacgagctttttcattggagaaccacaagacttcacatgtaaaaccaggcagacaatgtttggagtgagctttactctttgcatctcctgcattttgacgaagtctctgaaaattttgctagccttcagctttgatcccaaattacagaaatttctgaagtgcctctatagaccgatccttattatcttcacttgcacgggcatccaggttgtcatttgcacactctggctaatctttgcagcacctactgtagaggtgaatgtctccttgcccagagtcatcatcctggagtgtgaggagggatccatacttgcatttggcaccatgctgggctacattgccatcctggccttcatttgcttcatatttgctttcaaaggcaaatatgagaattacaatgaagccaaattcattacatttggcatgctcatttacttcatagcttggatcacattcatccctatctatgctaccacatttggcaaatatgtaccagctgtggagattattgtcatattaatatctaactatggaatcctgtattgcacattcatccccaaatgctatgttattatttgtaagcaagagattaacacaaagtctgcctttctcaagatgatctacagttattcttcccatagtgtgagcagcattgccctgagtcctgcttcactggactccatgagcggcaatgtcacaatgaccaatcccagctctagtggcaagtctgcaacctggcagaaaagcaaagatcttcaggcacaagcatttgcacacatatgcagggaaaatgccacaagtgtatctaaaactttgcctcgaaaaagaatgtcaagtatatgaataagccttaggagatgccacattccagaa

SEQ ID NO: 104620 - DNA, 2568 bp, Artificial Sequence
  derived and/or modified sequence
atggcttttctaatcatactcatcacgtgcttcgtgatcatactggccacatcacaaccctgccaaacaccagatgactttgtggctgcgacgtctcctggtcatattattattggtgggctcttcgccatccatgaaaaaatgctttcttccgaagactcccctagacgtccccaaatccaggaatgtgtaggattcgaaatctccgttttcttacagacccttgccatgatccattcaattgaaatgatcaacaattctaccctcctgcccggtgttaagctggggtacgagatttatgatacctgtactgaggtcactgtggccatggctgcaacattaagatttctgtcaaaattcaactgctctcgggagacagtagagtttaagtgtgactattcaagctacatgcctcgggttaaagctgtcatcggtagcggatattctgaaatcacaatggccgtctccagaatgctcaacctccagctgatgccccaagttggatacgaatccacggccgagattctctcagacaaaatacgcttcccgagctttctgcgcacggtgccttcggatttccaccagatcaaagctatggcacaccttattcagaagtctgggtggaactggatcgggataatcacgacagacgacgactacggccgcctggcactgaatacattcattatccaagcggaagccaataacgtgtgtatcgcttttaaggaggtattaccagcctttctgagcgacaacacaatagaagtccgtattaatcggacccttaaaaaaatcatccttgaagcccaggtgaacgttatagttgttttcctgcgccagtttcacgtcttcgacctctttaacaaggccattgaaatgaatatcaataagatgtggattgcttccgataactggtccaccgccacaaagattaccacaatacccaatgtaaagaagattggcaaggttgtcggcttcgcgtttcggagaggcaatatttctagcttccattcattcttgcagaacctccacttacttccatcagacagccataaactgctgcacgagtatgccatgcatctttctgcgtgcgcatatgttaaagacaccgatctttctcaatgtattttcaaccacagccagaggaccttagcttacaaggctaataaagccatagagcggaacttcgttatgcggaacgactttttgtgggattatgctgagccaggcctgatacactccatacagctcgcggtgttcgctttgggctatgcgataagagacctttgtcaggcacgggattgccagaaccccaatgcctttcaaccgtgggagcagattcagagcaagtgctcaaaagagtgctctcctggacagatgaagaagacaacacgctcccaacacatctgctgttatgagtgtcagaactgcccagaaaatcactataccaatcagacagacatgccccactgcttgttgtgtaacaacaaaacgcattgggcccccgtgcgcagtacaatgtgcttcgagaaagaagtggagtaccttaattggaatgacagcctcgcaatccttctgctaatcctgagtctgctggggatcatcttcgtccttgtcgtcgggattatctttactcgcaacctcaacacacccgttgtgaagtcctctggcgggctgagagtgtgctacgtaatactgctctgccactttcttaatttcgccagcacgtctttcttcattggagagccccaagattttacttgtaagacgcgtcagaccatgtttggtgtgtcctttaccctgtgcatttcttgcatcctaacaaagagtctgaagatcctgttggccttcagtttcgacccaaagctacagaagttccttaagtgtctgtaccgtcctatactgataatttttacctgcacgggcattcaggtggtgatctgtacactgtggctgatcttcgccgcacccaccgtggaggtgaacgtcagcttgccacgagtgatcattctggaatgtgaagaaggttccatcctggccttcggcacaatgctggggtatattgctattttggccttcatttgcttcatttttgctttcaaaggaaagtacgagaattataatgaagctaaattcatcacattcggcatgctgatctatttcattgcctggattacgtttattccaatttacgccaccacttttggtaagtatgtccctgcagtggaaatcatcgtcattctaatttcgaactacggtatcctgtattgcacatttatcccgaagtgctatgtgataatctgcaagcaggagatcaacactaagtcagcatttctgaagatgatttatagctactcgtcccacagcgtgagctctatagccctgagccctgcgtcgctcgacagtatgagcggtaatgtgactatgacgaatcccagctcttccggaaagagcgcaacctggcagaaatcaaaagaccttcaggcacaggcttttgcccatatctgccgggaaaatgcaacctctgtgtccaaaactctgcctagaaagcgcatgtcgtcaatttag

SEQ ID NO: 104621 - DNA, 2568 bp, Artificial Sequence
  derived and/or modified sequence
atggccttcctgatcatcctgatcacctgctttgtgatcatcctggccaccagccagccctgccagaccccagatgactttgtggccgccaccagccctggccacatcatcatcggcggcctgtttgccatccacgagaagatgctgagcagcgaggacagcccccggcggccccagatccaggagtgtgtgggctttgagatctctgtgttcctgcagaccctggccatgatccacagcattgagatgatcaacaacagcaccctgctgcccggggtgaagctgggctatgagatctatgacacctgcacagaggtgacagtggccatggccgccaccctgcgcttcctgagcaagttcaactgcagccgggagaccgtggagttcaagtgtgactacagcagctacatgccccgggtgaaggccgtcatcggcagcggctacagcgagatcaccatggctgtgtccaggatgctgaacctgcagctgatgccccaggtgggctatgagagcacagctgagatcctgagtgacaagatccgcttccccagcttcctgaggacagtgcccagcgacttccaccagatcaaggccatggcccacctgatccagaagagcggctggaactggattggcatcatcaccacagatgatgattatggccgcctggccctgaacaccttcatcatccaggccgaggccaacaacgtgtgcatcgccttcaaggaggtgctgcctgccttcctgagtgacaacaccatcgaggtgcgcatcaacagaaccctgaagaagatcatcctggaggcccaggtgaatgtcatcgtggtgttcctgcggcagttccacgtgtttgacctcttcaacaaggccatcgagatgaacatcaacaagatgtggatcgccagtgacaactggagcacagccaccaagatcaccaccatccccaacgtgaagaagattggcaaggtggtgggctttgccttcagaagaggcaacatcagcagcttccacagcttcctgcagaacctgcacctgctgcccagcgacagccacaagctgctgcatgaatatgccatgcacctgagcgcctgtgcctacgtgaaggacacagacctgagccagtgcatcttcaaccacagccagaggaccctggcctacaaggccaacaaggccatcgagaggaactttgtgatgagaaatgacttcctgtgggactatgcagagcccggcctcatccacagcatccagctggccgtgtttgccctgggctacgccatccgggacctgtgccaggcccgggactgccagaaccccaatgccttccagccctgggagcagatccagagcaagtgcagcaaggagtgcagccctggccagatgaagaagaccaccaggagccagcacatctgctgctatgagtgccagaactgcccagagaaccactacaccaaccagacagacatgccccactgcctgctgtgcaacaacaagacccactgggcccctgtgcgcagcaccatgtgctttgagaaggaggtggagtacctgaactggaatgacagcctggccatcctgctgctgatcctgagcctgctgggcatcatctttgtgctggtggtgggcatcatcttcaccaggaacctgaacacccctgtggtgaagagcagcggcggcctgcgggtgtgctacgtgatcctgctgtgccacttcctgaactttgccagcaccagcttcttcatcggggagccccaggacttcacctgcaagacccggcagaccatgtttggagtgtccttcaccctgtgcatcagctgcatcctgaccaagagcctgaagatcctgctggccttctcctttgaccccaagctgcagaagttcctgaagtgcctgtaccggcccatcctgatcatcttcacctgcaccggcatccaggtggtgatctgcaccctgtggctgatctttgctgcccccaccgtggaggtgaatgtgtccctgcccagggtcatcatcctggagtgtgaggagggcagcatcctggccttcggcaccatgctgggctacatcgccatcctggccttcatctgcttcatctttgccttcaagggcaagtatgagaactacaatgaggccaagttcatcaccttcggcatgctgatctacttcatcgcctggatcaccttcatccccatctatgccaccaccttcggcaagtatgtgcctgctgtggagatcatcgtcatcctgatcagcaactacggcatcctgtactgcaccttcatccccaagtgctacgtgatcatctgcaagcaggagatcaacaccaagagcgccttcctgaagatgatctacagctacagcagccacagcgtgagcagcatcgccctgagccctgccagcctggacagcatgtctggaaatgtgaccatgaccaaccccagcagcagcggcaagagcgccacctggcagaagagcaaggacctgcaggcccaggcctttgcccacatctgccgggagaatgccacctctgtgtccaagaccctgcccaggaagaggatgagcagcatctag

SEQ ID NO: 104622 - DNA, 2568 bp, Artificial Sequence
  derived and/or modified sequence
atggccttcctgatcatcctgatcacctgcttcgtgatcatcctggctacgtcccagccatgccagactcctgatgacttcgtggccgcaacctcccctggccatattataattggagggctattcgccatacatgagaaaatgctgtcttctgaggacagtcctcggagaccacagattcaggagtgcgtaggttttgagatttccgtgttcctgcagaccctggctatgatccatagcatcgaaatgattaataatagcactcttttgcctggagtcaagctgggctacgaaatctatgatacgtgtactgaggtcaccgtggccatggctgccaccctgcggtttctcagtaagtttaactgttcgcgcgagacggtggagtttaagtgtgactacagtagttacatgccccgcgtgaaagctgtaattggcagcgggtattcagaaattactatggctgtgagtaggatgctgaatctgcagctgatgcctcaggtcggctacgagagcactgccgagattctgtcggacaagatcaggttcccctctttcttacgcacagtccctagcgatttccaccaaattaaagcaatggcacacctgatccagaaaagtgggtggaactggataggcatcatcaccacggacgacgactatggccggttggctctcaatacctttatcatccaggccgaggcaaacaatgtgtgtatagctttcaaggaagtactaccggccttcctctcagacaacaccattgaagtgcgcatcaacaggaccttaaaaaaaattatattggaggcacaggtgaatgtaatcgttgtcttcctcagacagttccatgtgttcgacttgttcaataaagctatcgaaatgaatatcaacaagatgtggatagcttcagataattggtctactgcgacaaagatcaccaccattcccaatgtgaagaagatcggtaaggtggtggggtttgcgtttaggcgggggaacattagttcatttcacagttttctgcagaatcttcatctgttaccctccgattcacataagctgctacacgagtatgcaatgcatttgagcgcctgtgcatacgtaaaagatacagacctgtcccaatgcatttttaatcactcccagcggacccttgcgtataaagcgaataaggccatagaacgtaacttcgttatgcgcaacgacttcctttgggactacgccgaacctggccttattcattcgatccaactcgccgtgtttgcactgggttacgccattcgcgacctgtgtcaggcacgtgattgccagaaccctaatgcctttcagccctgggagcaaattcagagcaagtgttccaaggagtgctctcccggccagatgaaaaagacaacacggtcgcagcacatttgctgttatgaatgtcaaaactgtccagaaaaccattatacgaatcaaactgacatgcctcactgtctgttgtgcaataacaagacgcattgggcacctgttagaagcactatgtgcttcgaaaaggaggtcgaatatcttaattggaacgattcactcgctatactgcttcttatcctcagcctcttggggataatcttcgtactcgtcgttgggatcatctttacgcgcaacctgaatacccccgtagttaaatcttcaggaggcctgcgggtctgctacgtgatcttactgtgtcacttcctgaacttcgcatctacttctttttttattggcgagcctcaagatttcacttgtaagactcgtcagactatgttcggagtgtccttcacgctctgtatttcgtgcatactgactaaatcgcttaagatcctgctggccttctcctttgaccccaagctgcagaagtttctaaagtgcttatacagacccatcctcattatatttacttgtaccggaattcaggtcgtgatctgtacactatggctgatttttgccgcccccacagtggaggtgaacgttagcctgccacgggtgattatacttgaatgtgaagagggatctatcctggccttcggaaccatgctgggatacatcgccattctggcctttatctgttttattttcgccttcaagggcaaatacgagaattacaatgaagccaagtttatcacgttcggtatgttaatatacttcattgcctggattacatttattccaatctatgcgacaacgttcgggaaatacgttcccgcagtggaaattatcgtgatcttaatttccaattacggaatactgtactgcacctttatccctaagtgttatgtaatcatctgtaaacaggaaataaacacaaaatctgcgtttttgaagatgatttattcctacagctcacactccgtcagcagtatagcactctctcctgcctcccttgatagcatgagcggcaacgtgacaatgacaaacccatcctcatctgggaagtcagccacctggcagaagagtaaagacttgcaagcccaggcttttgcgcatatctgtagggaaaacgccacctcagtgagtaagaccctgccccggaagaggatgtccagcatctag

SEQ ID NO: 104623 - DNA, 2568 bp, Artificial Sequence
  derived and/or modified sequence
atggcttttttaatcattcttattacctgcttcgtcatcattctcgcgacatctcagccatgtcagactccagacgattttgtcgcagcgactagtcccggtcacataattatcggcggtctgtttgcaatccatgaaaagatgctgagtagcgaagattctcccagaaggccacaaattcaggagtgtgttggctttgagatctccgtgtttcttcagaccctcgcaatgatacattcgatagaaatgatcaacaattctaccctgttgcccggagtaaagctaggctacgaaatctacgacacttgtacggaagtgactgtggccatggccgcaacccttagatttttgagcaagtttaactgctcaagagagacagtcgagtttaagtgcgactactcttcttacatgccccgtgtaaaagccgttatcggcagtgggtatagcgaaatcacaatggccgtgtccagaatgttaaaccttcagctgatgccgcaagtgggatatgaaagcaccgccgaaattctgtcagacaagatcaggttcccaagcttcctccgtacagtcccttcagatttccatcagatcaaggcgatggctcacctcatacaaaaaagcggctggaactggatcggcatcatcaccacagacgacgattatggccgactggcgctgaacactttcataatccaggcagaggcaaataatgtgtgtatcgctttcaaggaagttctgccagcattcctttcagacaacacaatcgaagtgcggattaaccggaccctcaaaaaaatcattctcgaagctcaggtaaatgttatcgtggtctttctgaggcagtttcacgtgtttgatcttttcaataaagcaattgagatgaatataaataagatgtggattgcatctgataattggagcactgccaccaagattacaacaatcccgaatgtgaaaaagattggcaaagtggttggcttcgcatttagaagggggaacatctcaagctttcattccttccttcagaacctgcatttactgcctagcgatagccataagttactccacgaatacgcaatgcatctttctgcctgcgcctatgttaaagacaccgacctgtctcaatgtatcttcaatcattctcagagaactcttgcctataaggcaaacaaggctattgagaggaatttcgtcatgcgaaatgatttcctgtgggactacgccgagccaggactgatccacagtatccagctcgccgtttttgccctagggtatgccattagggatctttgccaggcgagggattgtcagaatccaaacgcattccagccttgggagcagattcaaagcaaatgtagtaaagagtgcagtccgggacagatgaaaaaaactacacgcagccagcacatctgttgctacgagtgtcagaactgccccgagaatcattacacgaatcagaccgatatgccacactgcctgttgtgcaacaacaaaactcattgggctccagtgagatcaacaatgtgctttgagaaagaggtggagtacttgaattggaatgattccctggcaatcctcctgttgatactatctctactgggcattattttcgtcctggtggtcggtataatctttactaggaacctcaacactccagtggtgaagtcaagcggtggtctgagggtatgctacgtgatcctactgtgtcacttcctgaacttcgccagcacatctttcttcataggggagccgcaggatttcacttgtaagactagacagacaatgttcggcgtgtcctttaccttgtgcatctcctgtattctcacaaagtccctgaagattctgttggctttttcattcgatccaaaactgcaaaagttcctcaagtgtctgtaccgcccaatactgatcatttttacctgtaccggaatccaggtggtgatatgtactctctggctcattttcgctgcacccactgtggaggtcaatgtctccctccccagggtgattattctggagtgcgaagagggtagtatcctggcctttggcactatgcttggatatatcgccattcttgccttcatttgttttatcttcgcattcaagggaaagtacgaaaactacaatgaagcgaagtttatcacttttggaatgctcatctacttcatcgcatggatcacattcataccaatctacgccacgacctttggcaaatatgtccctgctgttgagataatagttattctgatctctaattatgggattctgtattgcacgttcatccctaaatgttacgtcataatctgcaaacaagagatcaataccaagtccgcctttctgaagatgatttacagttactcaagtcattctgtatcatccattgctttgagccctgccagtttagatagcatgtctggaaacgtgactatgactaaccccagtagttcgggtaaatctgctacctggcagaaaagcaaagatctccaggctcaggcctttgcccacatctgccgagagaacgcaacttccgtgagtaaaaccctgcccaggaaacgcatgtcatccatctag

SEQ ID NO: 104624 - protein, 140 aa, Artificial Sequence
  derived and/or modified sequence
MVRYRVRSLSERSHEVYRQQLHGQEQGHHGQEEQGLSPEHVEVYERTHGQSHYRRRHCSRRRLHRIHRRQHRSCRRRKRRSCRHRRRHRRESLGDPLNQNFLSQKAAEPGREHAEGTKLPGPLTPSWKLRKSRPKHQVRP

SEQ ID NO: 104625 - DNA, 423 bp, Artificial Sequence
  derived and/or modified sequence
atggttcgatatcgggtgcggagcctttccgaacgctcacacgaggtatacaggcaacagcttcatggacaagagcagggccatcacggacaggaagaacaagggctgtccccagaacacgtcgaagtttacgaaagaacccacgggcagtcacattatcggcgccgccattgtagtagaaggaggttgcacaggattcatagacggcaacaccgcagctgtcgaaggaggaagagaaggagttgtaggcatcgcagaagacaccggcgggagtccctgggggaccctctcaaccagaacttcttgtctcagaaagctgctgaacccggccgcgagcatgccgaaggtactaagctccccgggcctctaacgcccagctggaagctacgaaaaagtaggccaaagcatcaggttcgcccttag

SEQ ID NO: 104626 - DNA, 423 bp, Artificial Sequence
  derived and/or modified sequence
atggtgcgctacagagtgcgcagcctgtctgagaggagccatgaggtgtaccggcagcagctgcacggccaggagcagggccaccacggccaggaggagcagggcctgagccctgagcacgtggaggtgtatgaaagaacccacggccagagccactacagaagaagacactgcagcagaagaaggctgcaccgcatccaccggcggcagcacaggagctgcagaagaaggaagagaagaagctgccgccacagaagaagacacagaagagagagcctgggggaccccctgaaccagaacttcctgagccagaaggctgctgagcccggccgggagcacgccgagggcaccaagctgcccggccccctgacccccagctggaagctgaggaagagccggcccaagcaccaggtgcggccctag

SEQ ID NO: 104627 - DNA, 423 bp, Artificial Sequence
  derived and/or modified sequence
atggtgcggtaccgggtgcggagcctgagcgagcggagccacgaggtctaccggcagcagctccacgggcaggagcaagggcatcatggccaggaggagcagggcctgagccctgaacacgtggaggtgtatgaaagaacccatggccagtcccattaccggcgccgccattgttcccggaggcgtttacatcgtattcatcggcgccaacaccggtcgtgtcgtcgaagaaagaggcggtcctgccggcaccgccgccgtcaccggcgggaatccctcggagatccgcttaatcagaattttctgagccagaaagccgctgagcctggacgcgagcatgctgaaggaaccaaattgcccgggcctcttacccccagctggaaactaagaaagagcaggcctaaacatcaggttcgaccgtag

SEQ ID NO: 104628 - DNA, 423 bp, Artificial Sequence
  derived and/or modified sequence
atggtccgataccgcgttcgatccctgagcgagaggagccatgaagtgtaccggcagcagctccatggacaggagcaggggcatcacgggcaagaagagcaggggttgagccctgagcatgtggaggtatacgagaggacgcacggccagagccattatagaaggcgtcattgttcgagaagacggttgcaccgcattcacaggcgacaacaccgttcctgccgaagaagaaaacggcgaagttgtcgccataggaggagacaccgaagggagagcttgggagatcccttgaaccagaatttcctctcccaaaaagccgcagagcctggcagagaacacgccgagggcaccaagcttccaggccctctcactccttcgtggaagctacgtaagagccgccctaaacatcaggtgcgaccctag

SEQ ID NO: 104629 - DNA, 723 bp, Artificial Sequence
  derived and/or modified sequence
agaccagaccaacagtaacaccaagggcaggtgggcaggcctccgccctcctcccctactccagggcccactgcagcctcagcccaggagccaccagatctcccaacaccatggtccgataccgcgtgaggagcctgagcgaacgctcgcacgaggtgtacaggcagcagttgcatgggcaagagcaaggacaccacggccaagaggagcaagggctgagcccggagcacgtcgaggtctacgagaggacccatggccagtctcactataggcgcagacactgctctcgaaggaggctgcaccggatccacaggcggcagcatcgctcctgcagaaggcgcaaaagacgctcctgcaggcaccggaggaggcatcgcagagagtccctaggtgaccccctcaaccagaactttctttcccaaaaggctgcagaaccaggaagagaacatgcagaaggcactaagcttcctgggcccctcacccccagctggaaattaagaaaaagtcgcccgaaacaccaagtgaggccatagcaattcccctacatcaaatgctcaagcccccagctggaagttaagagaaagtcacctgcccaagaaacaccgagtgaggccatagcaactcccctacatcaaatgctcaagccctgagttgccgccgagaagcccacaagatctgagtgaaacgagcaaaagtcacctgcccaataaagcttgacaagac

SEQ ID NO: 104630 - DNA, 423 bp, Artificial Sequence
  derived and/or modified sequence
atggtgagatacagagtgagaagcctgagcgagagaagccacgaggtgtacagacagcagctgcacggccaggagcagggccaccacggccaggaggagcagggcctgagccccgagcacgtggaggtgtacgagagaacccacggccagagccactacagaagaagacactgcagcagaagaagactgcacagaatccacagaagacagcacagaagctgcagaagaagaaagagaagaagctgcagacacagaagaagacacagaagagagagcctgggcgaccccctgaaccagaacttcctgagccagaaggccgccgagcccggcagagagcacgccgagggcaccaagctgcccggccccctgacccccagctggaagctgagaaagagcagacccaagcaccaggtgagaccctag

SEQ ID NO: 104631 - DNA, 309 bp, Artificial Sequence
  derived and/or modified sequence
atggtacgttaccgagtaagaagtctgtcagagcggagccatgaagtgtatcgccagcaactacacggacaagagcagggtcatcacgggcaagaggaacagggactgtctcctgagcacgtggaagtctacgaaaggacccacggccaaagtcattaccggagacgtcactgttctcggcgcaggttgcatcggatccataggaggcagcacaggagctgccgtaggaggaagcggcggagctgtaggcacagaaggagacaccgcagaggctgcagaaccagaaagagaacatgtagacgccactag

SEQ ID NO: 104632 - DNA, 309 bp, Artificial Sequence
  derived and/or modified sequence
atggtgcgctacagagtgcgcagcctgtctgagaggagccatgaggtgtaccggcagcagctgcacggccaggagcagggccaccacggccaggaggagcagggcctgagccctgagcacgtggaggtgtatgaaagaacccacggccagagccactacagaagaagacactgcagcagaagaaggctgcaccgcatccaccggcggcagcacaggagctgcagaagaaggaagagaagaagctgccgccacagaagaagacacagaagaggctgcaggaccaggaagaggacctgccgccgccactag

SEQ ID NO: 104633 - DNA, 309 bp, Artificial Sequence
  derived and/or modified sequence
atggtgcggtaccgggtgcggagcctgagcgagcggagccacgaggtataccgacagcagcttcatgggcaggaacagggccaccacgggcaggaggagcaagggctgagccctgaacacgtggaagtgtacgaacggactcacgggcaatctcattatcggcgtaggcattgctctagaaggaggctgcaccgtattcatcgacgccagcaccgctcctgcaggcgtcggaaaaggcgcagctgtcggcatagaaggagacacagacggggatgccggactaggaaacgcacatgccggcgccattag

SEQ ID NO: 104634 - DNA, 309 bp, Artificial Sequence
  derived and/or modified sequence
atggtgcggtacagggtgagatcactgtccgagaggtcccatgaagtgtatagacaacagctgcacggacaagaacagggacatcatgggcaagaggagcagggattatcaccggagcatgttgaagtgtacgaaagaactcatggccaatcacactaccgtagacgccattgttcccggcgacgtctccatcgaatacatcgccgacaacatcgcagctgtcggcgtcgcaaacgacggtcctgccggcacagaagaagacacagaagaggctgtagaacaaggaagcggacctgtcgcagacactag

SEQ ID NO: 104635 - DNA, 309 bp, Artificial Sequence
  derived and/or modified sequence
atggtgagatacagagtgagaagcctgagcgagagaagccacgaggtgtacagacagcagctgcacggccaggagcagggccaccacggccaggaggagcagggcctgagccccgagcacgtggaggtgtacgagagaacccacggccagagccactacagaagaagacactgcagcagaagaagactgcacagaatccacagaagacagcacagaagctgcagaagaagaaagagaagaagctgcagacacagaagaagacacagaagaggctgcagaaccagaaagagaacctgcagaagacactag

SEQ ID NO: 104636 - DNA, 680 bp, Artificial Sequence
  derived and/or modified sequence
agaccagaccaacagtaacaccaagggcaggtgggcaggcctccgccctcctcccctactccagggcccactgcagcctcagcccaggagccaccagatctcccaacaccatggtccgataccgcgtgaggagcctgagcgaacgctcgcacgaggtgtacaggcagcagttgcatgggcaagagcaaggacaccacggccaagaggagcaagggctgagcccggagcacgtcgaggtctacgagaggacccatggccagtctcactataggcgcagacactgctctcgaaggaggctgcaccggatccacaggcggcagcatcgctcctgcagaaggcgcaaaagacgctcctgcaggcaccggaggaggcatcgcagaggctgcagaaccaggaagagaacatgcagaaggcactaagcttcctgggcccctcacccccagctggaaattaagaaaaagtcgcccgaaacaccaagtgaggccatagcaattcccctacatcaaatgctcaagcccccagctggaagttaagagaaagtcacctgcccaagaaacaccgagtgaggccatagcaactcccctacatcaaatgctcaagccctgagttgccgccgagaagcccacaagatctgagtgaaacgagcaaaagtcacctgcccaataaagcttgacaagaca

SEQ ID NO: 104637 - DNA, 663 bp, Artificial Sequence
  derived and/or modified sequence
gagatggccgccctggcccccctgccccccctgcccgcccagttcaagagcatccagcaccacctgagaaccgcccaggagcacgacaagagagaccccgtggtggcctactactgcagactgtacgccatgcagaccggcatgaagatcgacagcaagacccccgagtgcagaaagttcctgagcaagctgatggaccagctggaggccctgaagaagcagctgggcgacaacgaggccatcacccaggagatcgtgggctgcgcccacctggagaactacgccctgaagatgttcctgtacgccgacaacgaggacagagccggcagattccacaagaacatgatcaagagcttctacaccgccagcctgctgatcgacgtgatcaccgtgttcggcgagctgaccgacgagaacgtgaagcacagaaagtacgccagatggaaggccacctacatccacaactgcaaggagtggggcgacagcagcagcagaccctgctggctgaagaagatcatgatcctgaagaagatgaagatgctggagcagcccctgtgccccctgagccagctgagccaccaccacctgcagctgatgacccagcacgccatcagacagctgtactggaacaccgacagcagcggctgcaccagaagcagctag

SEQ ID NO: 104638 - DNA, 663 bp, Artificial Sequence
  derived and/or modified sequence
gaaatggccgccctggcacccctcccccctctgcccgctcagttcaaaagtattcagcatcacctgcgaacagctcaggagcacgacaaacgtgatcctgtcgtggcttattactgccgcttgtacgctatgcaaactgggatgaaaatcgattctaagaccccagagtgcaggaagttcttaagcaaactgatggaccagttagaggccctgaagaagcagctgggagataacgaggcgatcactcaggagatcgttggttgcgctcatctggagaactacgctttgaaaatgttcctctacgcggacaacgaagaccgggcagggcgctttcataaaaatatgattaaatccttctacacggcctctttgctgattgacgtcataactgtgtttggagagctcaccgacgaaaatgtcaaacaccggaaatacgcccgctggaaagctacatacattcacaactgtaaggaatggggcgacagctcttccaggccatgctggctgaagaaaattatgatcctcaaaaagatgaaaatgttggagcagcccctatgccccttgagtcaactgtcccaccatcacctccagctaatgactcagcacgccattcggcagctgtattggaacaccgactcatccggctgtaccagatcaagttag

SEQ ID NO: 104639 - DNA, 663 bp, Artificial Sequence
  derived and/or modified sequence
gagatggccgccctggcccccctgccccccctgcctgcccagttcaagagcatccagcaccacctgaggacagcccaggagcatgacaagagggaccctgtggtggcctactactgccgcctgtatgccatgcagacaggcatgaagattgacagcaagaccccagagtgcaggaagttcctgagcaagctgatggaccagctggaggccctgaagaagcagctgggggacaatgaggccatcacccaggagatcgtgggctgtgcccacctggagaactatgccctgaagatgttcctgtatgctgacaatgaagatcgggccggccgcttccacaagaacatgatcaagagcttctacacagccagcctgctgattgatgtgatcaccgtgtttggagagctgacagatgaaaatgtgaagcacaggaaatatgcccgctggaaggccacctacatccacaactgcaaggagtggggagacagcagcagccggccctgctggctgaagaagatcatgatcctgaagaagatgaagatgctggagcagcccctgtgccccctgagccagctgagccaccaccacctgcagctgatgacccagcacgccatccggcagctgtactggaacacagacagcagcggctgcaccaggagcagctag

SEQ ID NO: 104640 - DNA, 663 bp, Artificial Sequence
  derived and/or modified sequence
gagatggccgccctggcccccctgccccccctgcccgcccagttcaagtccatccagcatcatctaagaaccgcccaggaacacgataaacgtgatcccgttgtggcttactattgccgtctttatgccatgcagactggtatgaagatcgacagcaaaacgcctgagtgtcggaagttcttgtccaaactgatggatcagttggaggctcttaagaagcagttgggggataacgaggcaatcacccaggaaattgtgggatgcgcccatctggagaattatgctcttaagatgtttctctacgccgacaacgaggatcgtgcagggcggttccacaaaaatatgatcaaaagcttttatacggcttctctactcatagacgttatcaccgtcttcggcgagctgaccgatgagaatgttaagcatcgcaagtatgcgagatggaaagcgacttatatccacaattgtaaagaatggggcgatagttcatctagaccatgttggttaaaaaaaatcatgattctgaaaaaaatgaaaatgctcgagcagccactgtgtccgttatcgcagctgtctcatcatcatctacagctgatgacccagcatgccattcgccagttatactggaatacagacagtagcgggtgtacccggagtagctag

SEQ ID NO: 104641 - DNA, 663 bp, Artificial Sequence
  derived and/or modified sequence
gagatggcagcacttgctccactgcctcctcttccagcccaattcaaaagcattcagcatcacttaaggacagcacaggaacatgacaaacgtgatcctgtggtagcctactactgtcgcctgtacgcaatgcagacgggcatgaagatcgacagcaagacccccgagtgcagaaagttcctgagcaagctgatggatcagcttgaggccttgaaaaagcagttgggcgataacgaagcaattacccaagagattgtgggatgtgcccatctcgaaaattatgcgttaaaaatgtttctgtacgcggataacgaagatcgcgctgggaggttccataagaatatgatcaagtccttttacaccgcaagcttactgattgacgtgatcaccgtctttggggagctcacagatgaaaatgttaagcatcgaaaatatgccaggtggaaagctacctatattcacaattgcaaagaatggggtgacagctccagcaggccctgttggctcaagaagataatgattctcaaaaaaatgaagatgctcgaacagccgctgtgccctctgagtcagctctctcaccatcacctccagctgatgacccagcacgccatccgccagctgtattggaatacagacagtagtggttgcacaaggtcctcgtag

SEQ ID NO: 104642 - protein, 222 aa, Artificial Sequence
  derived and/or modified sequence
MTSETLWWLITLKKQLGDNEAITQEIVGCAHLENYALKMFLYADNEDRAGRFHKNMIKSFYTASLLIDVITVFGELTDENVKHRKYARWKATYIHNCLKNGETPQAGPVGIEEDNDIEENEDAGAASLPTQPTQPSSSSTYDPSNMPSGNYTGIQIPPGAHAPANTPAEVPHSTGDVRLTPEDFARAQKYCKYAGSALQYEDVSTAVQNLQKALKLLTTGRE

SEQ ID NO: 104643 - DNA, 669 bp, Artificial Sequence
  derived and/or modified sequence
atgaccagcgagaccctgtggtggctgatcaccctgaagaagcagctgggcgacaacgaggccatcacccaggagatcgtgggctgcgcccacctggagaactacgccctgaagatgttcctgtacgccgacaacgaggacagagccggcagattccacaagaacatgatcaagagcttctacaccgccagcctgctgatcgacgtgatcaccgtgttcggcgagctgaccgacgagaacgtgaagcacagaaagtacgccagatggaaggccacctacatccacaactgcctgaagaacggcgagaccccccaggccggccccgtgggcatcgaggaggacaacgacatcgaggagaacgaggacgccggcgccgccagcctgcccacccagcccacccagcccagcagcagcagcacctacgaccccagcaacatgcccagcggcaactacaccggcatccagatcccccccggcgcccacgcccccgccaacacccccgccgaggtgccccacagcaccggcgacgtgagactgacccccgaggacttcgccagagcccagaagtactgcaagtacgccggcagcgccctgcagtacgaggacgtgagcaccgccgtgcagaacctgcagaaggccctgaagctgctgaccaccggcagagagtag

SEQ ID NO: 104644 - DNA, 669 bp, Artificial Sequence
  derived and/or modified sequence
atgacttccgaaacactatggtggctgattacccttaaaaagcagttgggggacaatgaagccataacgcaggagatcgttggatgtgcacacctggagaactatgcactgaagatgtttctctatgccgataacgaagacagggccggaaggtttcacaagaatatgataaaaagcttttatactgcgtcccttttgattgatgtcattacggtgttcggagaactgaccgacgaaaatgtgaagcaccggaagtacgctcggtggaaggctacctatattcacaactgtctgaagaatggtgagactccacaggccgggcctgttggtattgaagaggacaatgacatagaagagaacgaagacgctggcgccgccagcctgccaacacagccaacacagcctagcagttctagcacatacgatccgtctaatatgccttctgggaattacactggtattcagatcccccccggtgcccacgcccctgctaatacacccgctgaggtgccccatagcacaggggatgtgcgactgacacccgaggatttcgctcgggcgcagaagtattgcaagtatgcaggtagcgcactgcaatacgaagacgtgtctaccgccgtccagaacctgcagaaggcgcttaagctcctcacaacgggtcgcgagtag

SEQ ID NO: 104645 - DNA, 669 bp, Artificial Sequence
  derived and/or modified sequence
atgaccagcgagaccctgtggtggctgatcaccctgaagaagcagctgggggacaatgaggccatcacccaggagatcgtgggctgtgcccacctggagaactatgccctgaagatgttcctgtatgctgacaatgaagatagagctggccgcttccacaagaacatgatcaagagcttctacacagccagcctgctgattgatgtgatcaccgtgtttggagagctgacagatgaaaatgtgaagcacaggaaatatgcccgctggaaggccacctacatccacaactgcctgaagaatggagagaccccccaggccggccctgtgggcattgaagaagataatgacattgaagaaaatgaagatgctggagctgccagcctgcccacccagcccacccagcccagcagcagcagcacctatgaccccagcaacatgcccagcggcaactacacaggcatccagatccccccaggggcccacgccccagccaacaccccagctgaggtgccccacagcactggagatgtgcggctgaccccagaggactttgcccgggcccagaagtactgcaagtatgccggcagcgccctgcagtatgaagatgtgtccacagctgtgcagaacctgcagaaggccctgaagctgctgaccaccggccgggagtag

SEQ ID NO: 104646 - DNA, 669 bp, Artificial Sequence
  derived and/or modified sequence
atgaccagcgagaccctgtggtggctgatcaccctgaagaagcagctaggtgacaacgaagccatcacgcaagaaatagttggatgtgcccacctggagaactacgccctgaagatgttcttgtacgctgacaacgaggatagagccggtaggtttcacaaaaatatgatcaagagcttctatacagcatctcttttaattgatgtcataacagttttcggcgagttgactgacgagaatgtgaagcacaggaagtatgctcggtggaaggcaacctacattcacaactgtctgaagaatggcgaaaccccacaggctggacccgttggcattgaagaagataatgatattgaagaaaatgaggatgccggggctgcctcactcccgacccagcctactcaaccatcaagtagcagtacctacgaccccagcaatatgccctcgggcaactataccggaatccagatcccccccggcgctcatgctccagcaaatacaccagccgaggtaccccatagcaccggagatgtaagactcacacctgaagacttcgcaagagcgcaaaaatattgtaaatatgcgggatcagcgttgcaatacgaggatgtgtccacagcggttcagaacctgcagaaggctctgaaactgcttacaaccggccgagagtag

SEQ ID NO: 104647 - DNA, 669 bp, Artificial Sequence
  derived and/or modified sequence
atgaccagcgagacgctgtggtggttaatcacactgaaaaagcagctcggtgacaacgaggctataacacaggaaatagtcggctgcgcacacttggaaaactacgccctcaagatgttcctgtacgctgacaatgaagatcgagcgggaagatttcataaaaatatgatcaaatccttttacaccgccagtttgctgatcgacgttataacggtgttcggggaactgaccgacgagaatgttaaacaccggaaatacgcccgttggaaagctacatacatacataactgtctcaaaaacggagagacaccccaagccggaccagtggggattgaagaggacaacgacatcgaagagaatgaggatgctggtgctgcctctctgccaacacagccgacacagccctcgagcagtagcacttacgatccctctaatatgcccagcggaaattacaccggtatccagattccaccgggtgcacatgccccagccaacacccctgccgaggtgccccattccactggagacgtccgactcactcctgaagatttcgcgagagcacagaagtactgcaagtacgccggaagcgcactccagtatgaagatgtgagtaccgctgttcagaatctccagaaggcgttgaagctactaacaacggggagggaatag

SEQ ID NO: 104648 - DNA, 1383 bp, Artificial Sequence
  derived and/or modified sequence
gtaggaagtggtgagttcggagtagagatggccgcgcttgcaccgctgcccccgctccccgcacagttcaagagcatacagcatcatctgaggacggctcaggagcatgacaagcgagaccctgtggtggcttattactctaaagaagcagttgggtgataatgaagctattactcaagaaatagtgggctgtgcccatttggagaattatgctttgaaaatgtttttgtatgcagacaatgaagatcgtgctggacgatttcacaaaaacatgatcaagtccttctatactgcaagtcttttgatagatgtcataacagtatttggagaactcactgatgaaaatgtgaaacacaggaagtatgccagatggaaggcaacatacatccataattgtttaaagaatggggagactcctcaagcaggccctgttggaattgaagaagataatgatattgaagaaaatgaagatgctggagcagcctctctgcccactcagccaactcagccatcatcatcttcaacttatgacccaagcaacatgccatcaggcaactatactggaatacagattcctccgggtgcacacgctccagctaatacaccagcagaagtgcctcacagcacaggggatgttcgtctaaccccagaagactttgctagagctcagaagtactgcaaatatgctggcagtgctttgcagtatgaagatgtaagcactgctgtccagaatctacaaaaggctctcaagttactgacgacaggcagagaatgaagcctttgtatgacagacccatgtatttttggcatgaggaactaacagtccattactctatcttcagcctatcaggatcacagttttaaggaagacttggttttgttgaatatgacaatgaaatctgtgtgtatcagatttttattgaagcattcatcagcagcctcaaccagttttcattgtccatttactagattcaatcgtctctgagtatatagggctgatgttagcaagaccctaaaaatgtccattgaaccctgcttcaaaaaatgaaaacacacctctataaaatgtgtactgggaataagctttgtatttacatacattaggggaattttttaaaatctgtaatgtttggacaaacagatgatattactttgctataaaattataaatgtaacttttaataaagatagccagaatattctaaattagaaattacgtttttgtttccctcaagacataaaacaaatataaacattctaaactgctggatgaatctgaaaagacattaagttcaaattttaatttattctcatattaaatataactccattaaaagtttaaaatttcatgggagaaaatataataaggtaaagaggtagaat

SEQ ID NO: 104649 - protein, 403 aa, Artificial Sequence
  derived and/or modified sequence
MPNRKASRNAYYFFVQEKIPELRRRGLPVARVADAIPYCSSDWAKPVFTPLRRPGMLVPKQNVSPPDMSALSLKGDQALLGGIFYFLNIFSHGELPPHCEQRFLPCEIGCVKYSLQEGIMADFHSFINPGEIPRGFRFHCQAASDSSHKIPISNFERGHNQATVLQNLYRFIHPNPGNWPPIYCKSDDRTRVNWCLKHMAKASEIRQDLQLLTVEDLVVGIYQQKFLKEPSKTWIRSLLDVAMWDYSSNTRCKWHEENDILFCALAVCKKIAYCISNSLATLFGIQLTEAHVPLQDYEASNSVTPKMVVLDAGRYQKLRVGSSGFSHFNSSNEEQRSNTPIGDYPSRAKISGQNSSVRGRGITRLLESISNSSSNIHKFSNCDTSLSPYMSQKDGYKSFSSLS

SEQ ID NO: 104650 - protein, 316 aa, Artificial Sequence
  derived and/or modified sequence
MPNRKASRNAYYFFVQEKIPELRRRGLPVARVADAIPYCSSDWAKPVFTPLRRPGMLVPKQNVSPPDMSALSLKGDQALLGGIFYFLNIFSHGELPPHCEQRFLPCEIGCVKYSLQEGIMADFHSFINPGEIPRGFRFHCQAASDSSHKIPISNFERGHNQATVLQNLYRFIHPNPGNWPPIYCKSDDRTRVNWCLKHMAKASEIRQDLQLLTVEDLVVGIYQQKFLKEPSKTWIRSLLDVAMWDYSSNTRCKWHEENDILFCALAVCKKIAYCISNSLATLFGIQLTEAHVPLQDYEASNSVTPKMVVLDAGRYQ

SEQ ID NO: 104651 - DNA, 1212 bp, Artificial Sequence
  derived and/or modified sequence
atgccaaaccgcaaggcctccaggaacgcatattactttttcgtgcaagagaaaatcccagaattacgtagacgaggcttgcccgtggcgagagttgctgatgcaatcccctattgtagtagcgactgggccaagcctgtgtttactcctcttcgaaggcctggcatgctggttcctaaacaaaacgtgtcgccacccgatatgtccgctctctcacttaaaggtgatcaggctctgctcggaggcatcttctattttctgaacatcttctcccacggcgagctgccccctcattgtgaacagagatttctcccctgtgaaattgggtgcgtgaaatacagcctgcaggaaggcatcatggctgactttcatagctttattaacccaggcgagatccctcgtggtttcagattccactgtcaagcagccagcgattcctcccacaagattcccattagcaactttgagcgcggtcacaaccaggccactgtactgcagaacctgtaccgcttcatccatcccaatccaggaaactggccacctatttattgtaaatccgatgatcggacccgggtgaactggtgtctgaaacatatggccaaggccagcgagatacggcaagacctgcaactgctgacagtcgaagatcttgtggtgggcatctaccagcaaaagtttctgaaggagcctagcaaaacttggattcggagcctcctggatgtggccatgtgggattatagctcaaatacgagatgcaagtggcatgaggagaacgacatccttttttgtgccctcgctgtttgcaaaaaaattgcctactgtatctctaacagcctcgctacgctgttcggaattcagctaactgaagctcatgttccactgcaagactacgaggcaagtaacagtgtcacacccaaaatggtcgtacttgacgcgggtcggtaccaaaagttgcgtgtaggatcctccggattctcccactttaatagcagcaatgaagagcagcgttctaacaccccgattggagattatccatctcgcgccaaaatcagtggtcaaaactcttccgtacgaggccgcgggatcactagattgcttgaatcaatctccaactcttctagtaatatccataagttcagcaattgcgacactagtctatctccctacatgagccaaaaagatggttacaagtccttctccagcctctcttag

SEQ ID NO: 104652 - DNA, 951 bp, Artificial Sequence
  derived and/or modified sequence
atgccgaaccggaaagcaagtagaaacgcctactacttttttgtgcaggaaaaaatcccggagttgaggcggcggggtctgcccgtggcacgcgtggctgatgcaattccttattgctctagcgattgggcaaagccagtgttcacgcctctgaggagacctggcatgctggttcctaagcaaaacgttagtccgcctgatatgagtgccctctcactgaaaggagatcaggcactgctggggggcatcttttactttctcaacattttttcccatggggaattgccaccccactgcgagcagcgattccttccctgtgaaatagggtgtgttaaatatagtctgcaggaaggaataatggcagatttccactcgttcatcaaccccggggaaataccaagaggcttcaggttccactgtcaggctgcaagcgacagctcccataagatccctatctcgaactttgagcggggccacaaccaggctaccgttctgcagaacctgtatcgattcattcacccaaatccaggcaactggccaccaatctactgcaaaagtgacgaccggactcgggtcaattggtgcctgaagcatatggctaaggccagcgagatccggcaagatctccagctactaactgtggaggatctggtggtgggcatctaccagcaaaagtttctgaaggagcccagcaagacctggattcggtctcttcttgacgtggccatgtgggattactcaagtaacacgagatgtaagtggcacgaggaaaatgacatactattttgtgctctcgctgtgtgcaagaaaattgcttattgtattagtaattctctggctactctgttcggcatccaactgactgaagcccacgtgcctttacaggactatgaggctagcaacagcgtgactcccaaaatggtagtgcttgatgccggaagatatcaatag

SEQ ID NO: 104653 - DNA, 1212 bp, Artificial Sequence
  derived and/or modified sequence
atgcccaacaggaaggccagcagaaatgcctactacttctttgtgcaggagaagatccctgagctgcggcggcggggcctgcctgtggcccgggtggctgatgccatcccctactgcagcagtgactgggccaagcctgtgttcacccccctgcggcggcccggcatgctggtgcccaagcagaatgtgtccccaccagacatgtctgccctgagcctgaagggggaccaggccctgctgggcggcatcttctacttcctgaacatcttcagccacggggagctgcccccccactgtgagcagcgcttcctgccctgtgagatcggctgtgtgaagtacagcctgcaggagggcatcatggctgacttccacagcttcatcaaccctggagagatcccccggggcttccgcttccactgccaggccgccagtgacagcagccacaagatccccatcagcaactttgagcggggccacaaccaggccaccgtgctgcagaacctgtaccgcttcatccaccccaaccctggcaactggccacccatctactgcaagagtgatgacaggaccagggtgaactggtgcctgaagcacatggccaaggccagcgagatccggcaggacctgcagctgctgactgtggaggacctggtggtgggcatctaccagcagaagttcctgaaggagcccagcaagacctggatccgcagcctgctggatgtggccatgtgggactacagcagcaacacccgctgcaagtggcatgaagaaaatgacatcctcttctgtgccctggccgtgtgcaagaagatcgcctactgcatcagcaacagcctggccaccctgtttggcatccagctgacagaggcccacgtgcccctgcaggactatgaggccagcaacagcgtgacccccaagatggtggtgctggatgctggccgctaccagaagctgcgggtgggcagcagcggcttcagccacttcaacagcagcaatgaggagcagaggagcaacacccccatcggggactaccccagccgggccaagatcagcggccagaacagctctgtgcggggccggggcatcacccggctgctggagagcatcagcaacagcagcagcaacatccacaagttcagcaactgtgacaccagcctgagcccctacatgagccagaaggatggctacaagagcttcagcagcctgtcctag

SEQ ID NO: 104654 - DNA, 951 bp, Artificial Sequence
  derived and/or modified sequence
atgcccaacaggaaggccagcagaaatgcctactacttctttgtgcaggagaagatccctgagctgcggcggcggggcctgcctgtggcccgggtggctgatgccatcccctactgcagcagtgactgggccaagcctgtgttcacccccctgcggcggcccggcatgctggtgcccaagcagaatgtgtccccaccagacatgtctgccctgagcctgaagggggaccaggccctgctgggcggcatcttctacttcctgaacatcttcagccacggggagctgcccccccactgtgagcagcgcttcctgccctgtgagatcggctgtgtgaagtacagcctgcaggagggcatcatggctgacttccacagcttcatcaaccctggagagatcccccggggcttccgcttccactgccaggccgccagtgacagcagccacaagatccccatcagcaactttgagcggggccacaaccaggccaccgtgctgcagaacctgtaccgcttcatccaccccaaccctggcaactggccacccatctactgcaagagtgatgacaggaccagggtgaactggtgcctgaagcacatggccaaggccagcgagatccggcaggacctgcagctgctgactgtggaggacctggtggtgggcatctaccagcagaagttcctgaaggagcccagcaagacctggatccgcagcctgctggatgtggccatgtgggactacagcagcaacacccgctgcaagtggcatgaagaaaatgacatcctcttctgtgccctggccgtgtgcaagaagatcgcctactgcatcagcaacagcctggccaccctgtttggcatccagctgacagaggcccacgtgcccctgcaggactatgaggccagcaacagcgtgacccccaagatggtggtgctggatgctggccgctaccagtag

SEQ ID NO: 104655 - DNA, 1626 bp, Artificial Sequence
  derived and/or modified sequence
gcaggcgcctacctctgttacttagggcgggagcccggcgagggcgccggtgctttgttctgtctgaggccaggaagtttgaccgcgctgccatgccgaaccgtaaggccagccggaatgcttactatttcttcgtgcaggagaagatccccgaactacggcgacgaggcctgcctgtggctcgcgttgctgatgccatcccttactgctcctcagactgggcgaaacctgttttcacaccactgaggaggccaggcatgcttgtaccaaagcagaatgtttcacctccagatatgtcagctttgtctttaaaaggtgatcaagctctccttggaggcattttttattttttgaacatttttagccatggcgagctacctcctcattgtgaacagcgcttcctcccttgtgaaattggctgtgttaagtattctctccaagaaggtattatggcagatttccacagttttataaatcctggtgaaattccacgaggatttcgatttcattgtcaggctgcaagtgattctagtcacaagattcctatttcaaattttgaacgtgggcataaccaagcaactgtgttacaaaacctttatagatttattcatcccaacccagggaactggccacctatctactgcaagtctgatgatagaaccagagtcaactggtgtttgaagcatatggcaaaggcatcagaaatcaggcaagatctacaacttctcactgtagaggaccttgtagtggggatctaccaacaaaaatttctcaaggagccctctaagacttggattcgaagcctcctagatgtggccatgtgggattattctagcaacacaaggtgcaagtggcatgaagaaaatgatattctcttctgtgctttagctgtttgcaagaagattgcgtactgcatcagtaattctctggccactctctttggaatccagctcacagaggctcatgtaccactacaagattatgaggccagcaatagtgtgacacccaaaatggttgtattggatgcagggcgttaccagaagctaagggttgggagttcaggattctctcatttcaactcttctaatgaggaacaaagatcaaacacacccattggtgactacccatctagggcaaaaatttctggccaaaacagcagcgttcggggaagaggaattacccgcttactagagagcatttccaattcttccagcaatatccacaaattctccaactgtgacacttcactctcaccttacatgtcccaaaaagatggatacaaatctttctcttccttatcttaatgatggtactcttttcaatttctgaaaacagtaacaggcccaacttccttcttactacagtcatattaaacagatcacatcaatgacaaatgtcactactataaaaactacttaatttgtaaggaaattgtttcatagatttaaaaaaattgtggttggagagcatcttggcatttgtgctttttttcttgagggattgttctgcttcctggctgtatgatgggtatatcattaaagtttggagtcctatatgaacaaaactgacatttttagagttgtacttttgggaatgttatagattgatcattctttctcctgataa

SEQ ID NO: 104656 - DNA, 1013 bp, Artificial Sequence
  derived and/or modified sequence
cgggagcccggcgagggcgccggtgctttgttctgtctgaggccaggaagtttgaccgcgctgccatgccgaaccgtaaggccagccggaatgcttactatttcttcgtgcaggagaagatccccgaactacggcgacgaggcctgcctgtggctcgcgttgctgatgccatcccttactgctcctcagactgggcgaaacctgttttcacaccactgaggaggccaggcatgcttgtaccaaagcagaatgtttcacctccagatatgtcagctttgtctttaaaaggtgatcaagctctccttggaggcattttttattttttgaacatttttagccatggcgagctacctcctcattgtgaacagcgcttcctcccttgtgaaattggctgtgttaagtattctctccaagaaggtattatggcagatttccacagttttataaatcctggtgaaattccacgaggatttcgatttcattgtcaggctgcaagtgattctagtcacaagattcctatttcaaattttgaacgtgggcataaccaagcaactgtgttacaaaacctttatagatttattcatcccaacccagggaactggccacctatctactgcaagtctgatgatagaaccagagtcaactggtgtttgaagcatatggcaaaggcatcagaaatcaggcaagatctacaacttctcactgtagaggaccttgtagtggggatctaccaacaaaaatttctcaaggagccctctaagacttggattcgaagcctcctagatgtggccatgtgggattattctagcaacacaaggtgcaagtggcatgaagaaaatgatattctcttctgtgctttagctgtttgcaagaagattgcgtactgcatcagtaattctctggccactctctttggaatccagctcacagaggctcatgtaccactacaagattatgaggccagcaatagtgtgacacccaaaatggttgtattggatgcagggcgttaccag

SEQ ID NO: 104657 - DNA, 1212 bp, Artificial Sequence
  derived and/or modified sequence
atgcccaaccggaaggccagccggaacgcctactacttcttcgtgcaggaaaagatcccagagctgcgacggcgcgggctgccagtcgctcgggtcgcagacgctattccatactgctcctctgattgggccaagcccgtttttacgccactgcggcgcccggggatgctggtgcccaagcaaaacgtgtcgcctccagatatgtccgcactcagtcttaagggggatcaggcgctactcggcggcatcttttattttctgaatattttttctcatggagaactgcccccccactgcgaacagcgctttctgccctgtgagatcggttgcgtgaaatacagcctccaggagggtatcatggcagactttcattcattcattaatcccggggagatccctcgaggcttccggtttcattgccaggccgcgagtgactcctcgcataagatcccaatctcaaactttgaacggggccataatcaggcgacagtgctccagaatctctatcgctttatccatccaaaccctggcaattggccgccgatatattgtaaaagcgatgacagaactagggtcaattggtgtttaaaacatatggctaaggcatcggaaatcaggcaagacctccaactgctcacagtggaagacctcgtggtaggcatttaccaacagaaatttcttaaggagccatccaaaacatggatccgcagcctgctcgatgtggccatgtgggattattcttccaacacaaggtgcaagtggcacgaagagaatgacattcttttttgtgccttggctgtatgcaagaagatcgcgtattgtattagtaactcacttgctaccttattcgggattcagctgactgaagcacacgttccgctccaggactacgaagcatccaattctgtgaccccaaaaatggtggtgctcgatgccgggcgctaccaaaagctgcgggtgggtagcagcggcttctctcatttcaattcatctaacgaggaacagcggagtaatacgcctataggtgactacccttcccgagcaaaaatttcaggccagaattcttccgttaggggaagagggataactagactgttggagtctatcagtaatagcagttcaaacatacacaaattttctaattgcgatactagcctgtccccatacatgagccagaaggacgggtataagagcttttcatcgctctcttag

SEQ ID NO: 104658 - DNA, 951 bp, Artificial Sequence
  derived and/or modified sequence
atgcccaaccggaaggccagccggaacgcctactacttcttcgtgcaggagaagatccccgagctgcgtcgcagaggcctgcctgtcgctcgagtggcagacgccattccctactgttcttctgactgggccaaaccggttttcacccctctgcgtcggccgggcatgttagtccctaaacagaatgtgtccccgcctgacatgtccgccttgtccctgaaaggagaccaggctctcctcggcggcatcttttactttctaaacatctttagccacggtgagcttccaccacactgcgagcagcggtttctgccctgcgaaataggttgcgtgaaatactccctccaggagggcattatggcggactttcactcttttattaatcccggcgaaattcccaggggatttcgtttccactgccaggctgccagtgacagttctcacaaaatcccaatttcaaattttgaacggggccataaccaggccactgtcctacaaaatctgtacaggtttatccacccaaacccaggtaactggccccccatttattgtaagtccgacgacaggacgagggtcaattggtgtcttaagcacatggcaaaggccagtgaaattcgccaggacctgcagctactgacagtggaggatctggtagttggtatttaccagcagaaattcctgaaagagccctccaaaacatggattcggtctttgctggacgtagctatgtgggactactcgagtaataccaggtgtaaatggcacgaggagaatgatattctgttttgcgcccttgctgtctgcaagaagatcgcttattgtatcagcaattcacttgctactctgtttggaatccagctgactgaagcccacgtccctttacaggattatgaagccagcaattctgttacacccaaaatggtggtgctagatgcgggtcgctaccagtag

SEQ ID NO: 104659 - DNA, 1212 bp, Artificial Sequence
  derived and/or modified sequence
atgcctaataggaaggcaagtaggaatgcttattactttttcgtccaagagaagatcccggagttacgccgtagaggtctgccagtcgctcgggtggccgatgctataccctactgtagctccgactgggcaaaacctgtatttacaccgttgcggaggcccggaatgctcgtcccaaaacaaaatgtcagcccccctgatatgagtgctctaagcttgaaaggggatcaggccctgctcgggggtattttttacttcttaaacattttctcccacggggaactgcctcctcattgcgaacagagattcttgccatgtgagataggatgcgtgaagtactcgctgcaggaaggaatcatggccgatttccatagcttcatcaacccaggtgaaattcctagggggtttcgctttcattgccaggcagcaagcgactcatctcacaagatcccaatatccaacttcgagcgtgggcacaaccaggccaccgtgcttcagaacctttaccgcttcatccaccccaacccagggaattggccacccatctactgcaagtccgacgatcgcactcgtgtgaactggtgtctgaaacacatggccaaggcatccgagatacgacaggatctgcagctgttgaccgtggaagatctggtggtggggatttatcaacagaaatttcttaaagagccctctaagacttggattagaagtctgttggatgtggctatgtgggattactcctcaaatactagatgcaaatggcacgaggagaatgacatcctgttttgcgctctcgcggtctgtaagaaaatcgcctactgcataagtaattctctggccacccttttcggaatccaacttactgaagctcacgttcctctgcaggattacgaggcctctaattcggtcacccccaaaatggttgtcttggacgcgggtcgctaccagaaactacgtgttggtagcagtgggttctctcactttaattcttctaacgaggaacaaagatcgaacacgcccatcggggactatccatcccgagctaaaataagcggacagaactcctccgtgcgtgggagaggtattacaaggctgttggagagcattagcaattctagcagtaacatccacaaattctccaattgcgacacatccctctccccttacatgagccagaaggatggttacaagagcttttcatcactatcctag

SEQ ID NO: 104660 - DNA, 951 bp, Artificial Sequence
  derived and/or modified sequence
atgccaaacaggaaagcttccaggaatgcttactacttttttgtgcaggagaaaattccagagctaaggcgtaggggcctccccgtagctcgagtggcagacgcaatcccctattgttcatcagactgggccaaacctgttttcacccccctgaggcgtcctggaatgctcgttcccaaacaaaatgtgtcacccccagatatgtccgcactctccctgaagggcgaccaagcactgcttggaggaatcttttatttcctcaacatcttctcacacggggagctgcctcctcattgtgagcaacggtttctcccatgcgaaattggttgcgttaagtactctctgcaggagggtattatggccgacttccatagttttatcaaccccggagagattcctcgagggttccgatttcattgccaggcagcttctgactctagccacaagatacctatcagcaacttcgaaaggggccacaatcaggccaccgtgctgcagaacctgtaccgctttatccatcctaacccgggtaactggccgccaatttactgtaagtcggacgatagaacccgcgtaaactggtgtctcaaacatatggccaaggctagcgagattaggcaggacctgcaacttctcactgtggaagatcttgtggtgggaatttatcagcaaaaatttctgaaagaaccgagtaagacctggatcaggtctctgcttgacgtggctatgtgggattatagctctaataccagatgcaagtggcatgaggagaatgatattcttttctgcgccctagccgtctgcaaaaaaatcgcatactgtatttccaattcactcgccaccctctttgggatccaactgactgaggcccacgtaccgctccaggactatgaggcctcaaactcagtcaccccaaagatggttgtgctcgatgctggcaggtatcaatag

SEQ ID NO: 104661 - DNA, 1212 bp, Artificial Sequence
  derived and/or modified sequence
atgcccaacagaaaggccagcagaaacgcctactacttcttcgtgcaggagaagatccccgagctgagaagaagaggcctgcccgtggccagagtggccgacgccatcccctactgcagcagcgactgggccaagcccgtgttcacccccctgagaagacccggcatgctggtgcccaagcagaacgtgagcccccccgacatgagcgccctgagcctgaagggcgaccaggccctgctgggcggcatcttctacttcctgaacatcttcagccacggcgagctgcccccccactgcgagcagagattcctgccctgcgagatcggctgcgtgaagtacagcctgcaggagggcatcatggccgacttccacagcttcatcaaccccggcgagatccccagaggcttcagattccactgccaggccgccagcgacagcagccacaagatccccatcagcaacttcgagagaggccacaaccaggccaccgtgctgcagaacctgtacagattcatccaccccaaccccggcaactggccccccatctactgcaagagcgacgacagaaccagagtgaactggtgcctgaagcacatggccaaggccagcgagatcagacaggacctgcagctgctgaccgtggaggacctggtggtgggcatctaccagcagaagttcctgaaggagcccagcaagacctggatcagaagcctgctggacgtggccatgtgggactacagcagcaacaccagatgcaagtggcacgaggagaacgacatcctgttctgcgccctggccgtgtgcaagaagatcgcctactgcatcagcaacagcctggccaccctgttcggcatccagctgaccgaggcccacgtgcccctgcaggactacgaggccagcaacagcgtgacccccaagatggtggtgctggacgccggcagataccagaagctgagagtgggcagcagcggcttcagccacttcaacagcagcaacgaggagcagagaagcaacacccccatcggcgactaccccagcagagccaagatcagcggccagaacagcagcgtgagaggcagaggcatcaccagactgctggagagcatcagcaacagcagcagcaacatccacaagttcagcaactgcgacaccagcctgagcccctacatgagccagaaggacggctacaagagcttcagcagcctgagctag

SEQ ID NO: 104662 - DNA, 951 bp, Artificial Sequence
  derived and/or modified sequence
atgcccaacagaaaggccagcagaaacgcctactacttcttcgtgcaggagaagatccccgagctgagaagaagaggcctgcccgtggccagagtggccgacgccatcccctactgcagcagcgactgggccaagcccgtgttcacccccctgagaagacccggcatgctggtgcccaagcagaacgtgagcccccccgacatgagcgccctgagcctgaagggcgaccaggccctgctgggcggcatcttctacttcctgaacatcttcagccacggcgagctgcccccccactgcgagcagagattcctgccctgcgagatcggctgcgtgaagtacagcctgcaggagggcatcatggccgacttccacagcttcatcaaccccggcgagatccccagaggcttcagattccactgccaggccgccagcgacagcagccacaagatccccatcagcaacttcgagagaggccacaaccaggccaccgtgctgcagaacctgtacagattcatccaccccaaccccggcaactggccccccatctactgcaagagcgacgacagaaccagagtgaactggtgcctgaagcacatggccaaggccagcgagatcagacaggacctgcagctgctgaccgtggaggacctggtggtgggcatctaccagcagaagttcctgaaggagcccagcaagacctggatcagaagcctgctggacgtggccatgtgggactacagcagcaacaccagatgcaagtggcacgaggagaacgacatcctgttctgcgccctggccgtgtgcaagaagatcgcctactgcatcagcaacagcctggccaccctgttcggcatccagctgaccgaggcccacgtgcccctgcaggactacgaggccagcaacagcgtgacccccaagatggtggtgctggacgccggcagataccagtag

SEQ ID NO: 104663 - protein, 242 aa, Artificial Sequence
  derived and/or modified sequence
MTIPGGTPSLKILWLNQEPEIQVRRLDTLLACFNLSSSREELQAVESPFQALCCLLIYLFVQVDTLCLEDLHAFIAQALCLQGKSTSQLVNLQPDYINPRAVQLGSLLVRGLTTLVLVNSACGFPWKTSDFMPWNVFDGKLFHQKYLQSEKGYAVEVLLEQNRSRLTKFHNLKAVVCKACMKENRRITGRAHWGSHHAGRWGRQGSSYHRTGSGYSRSSQGQPWRDQGPGSRQYEHDQWRRY

SEQ ID NO: 104664 - protein, 910 aa, Artificial Sequence
  derived and/or modified sequence
MGVRGLQGFVGSTCPHICTVVNFKELAEHHRSKYPGCTPTIVVDAMCCLRYWYTPESWICGGQWREYFSALRDFVKTFTAAGIKLIFFFDGMVEQDKRDEWVKRRLKNNREISRIFHYIKSHKEQPGRNMFFIPSGLAVFTRFALKTLGQETLCSLQEADYEVASYGLQHNCLGILGEDTDYLIYDTCPYFSISELCLESLDTVMLCREKLCESLGLCVADLPLLACLLGNDIIPEGMFESFRYKCLSSYTSVKENFDKKGNIILAVSDHISKVLYLYQGEKKLEEILPLGPNKALFYKGMASYLLPGQKSPWFFQKPKGVITLDKQVISTSSDAESREEVPMCSDAESRQEVPMCTGPESRREVPVYTDSEPRQEVPMCSDPEPRQEVPTCTGPESRREVPMCSDPEPRQEVPMCTGPEARQEVPMYTDSEPRQEVPMYTDSEPRQEVPMYTGSEPRQEVPMYTGPESRQEVPMYTGPESRQEVLIRTDPESRQEIMCTGHESKQEVPICTDPISKQEDSMCTHAEINQKLPVATDFEFKLEALMCTNPEIKQEDPTNVGPEVKQQVTMVSDTEILKVARTHHVQAESYLVYNIMSSGEIECSNTLEDELDQALPSQAFIYRPIRQRVYSLLLEDCQDVTSTCLAVKEWFVYPGNPLRHPDLVRPLQMTIPGGTPSLKILWLNQEPEIQVRRLDTLLACFNLSSSREELQAVESPFQALCCLLIYLFVQVDTLCLEDLHAFIAQALCLQGKSTSQLVNLQPDYINPRAVQLGSLLVRGLTTLVLVNSACGFPWKTSDFMPWNVFDGKLFHQKYLQSEKGYAVEVLLEQNRSRLTKFHNLKAVVCKACMKENRRITGRAHWGSHHAGRWGRQGSSYHRTGSGYSRSSQGQPWRDQGPGSRQYEHDQWRRY

SEQ ID NO: 104665 - protein, 922 aa, Artificial Sequence
  derived and/or modified sequence
MDRQMILSRSSVMGVRGLQGFVGSTCPHICTVVNFKELAEHHRSKYPGCTPTIVVDAMCCLRYWYTPESWICGGQWREYFSALRDFVKTFTAAGIKLIFFFDGMVEQDKRDEWVKRRLKNNREISRIFHYIKSHKEQPGRNMFFIPSGLAVFTRFALKTLGQETLCSLQEADYEVASYGLQHNCLGILGEDTDYLIYDTCPYFSISELCLESLDTVMLCREKLCESLGLCVADLPLLACLLGNDIIPEGMFESFRYKCLSSYTSVKENFDKKGNIILAVSDHISKVLYLYQGEKKLEEILPLGPNKALFYKGMASYLLPGQKSPWFFQKPKGVITLDKQVISTSSDAESREEVPMCSDAESRQEVPMCTGPESRREVPVYTDSEPRQEVPMCSDPEPRQEVPTCTGPESRREVPMCSDPEPRQEVPMCTGPEARQEVPMYTDSEPRQEVPMYTDSEPRQEVPMYTGSEPRQEVPMYTGPESRQEVPMYTGPESRQEVLIRTDPESRQEIMCTGHESKQEVPICTDPISKQEDSMCTHAEINQKLPVATDFEFKLEALMCTNPEIKQEDPTNVGPEVKQQVTMVSDTEILKVARTHHVQAESYLVYNIMSSGEIECSNTLEDELDQALPSQAFIYRPIRQRVYSLLLEDCQDVTSTCLAVKEWFVYPGNPLRHPDLVRPLQMTIPGGTPSLKILWLNQEPEIQVRRLDTLLACFNLSSSREELQAVESPFQALCCLLIYLFVQVDTLCLEDLHAFIAQALCLQGKSTSQLVNLQPDYINPRAVQLGSLLVRGLTTLVLVNSACGFPWKTSDFMPWNVFDGKLFHQKYLQSEKGYAVEVLLEQNRSRLTKFHNLKAVVCKACMKENRRITGRAHWGSHHAGRWGRQGSSYHRTGSGYSRSSQGQPWRDQGPGSRQYEHDQWRRY

SEQ ID NO: 104666 - DNA, 5155 bp, Artificial Sequence
  derived and/or modified sequence
gtgaacgaggcggctgtggcggtggctgaggcggctgggcctagggtgcagcgggcgcgtctgcggctggtgttggcgcatctctagatcctttcccggagttcagttatgggtgtgagaggtttgcaaggatttgtgggaagtacctgcccacatatatgtacagtagtaaatttcaaagaactggcagagcaccaccgaagcaagtatcctggatgtacccctaccattgtggttgatgccatgtgttgtctcagatattggtatactccagaatcttggatctgcggtggccagtggcgagaatacttttctgctttgcgagattttgttaaaacttttacggcagctgggatcaagttgatattcttctttgatggcatggtggagcaggataagagagatgaatgggtgaaacgaaggctcaagaacaacagggagatatccaggatttttcattacatcaagtcacacaaggagcagccaggcagaaatatgttcttcatcccctcagggctagctgtgtttacacgatttgctctaaagacactgggccaggaaactttgtgttctttgcaggaagcagattatgaggtagcttcctatggcctccagcataactgtcttgggattctgggggaagacactgattacctaatctatgacacttgtccctacttttcaattagcgagctctgcctagagagcctggacaccgtcatgctctgcagagagaagctctgtgagagtctgggcctctgtgtggccgaccttcctcttctggcctgcctccttggcaacgacataatcccagagggcatgtttgaaagctttaggtacaaatgcttatcgtcctacacctctgtaaaagagaactttgacaaaaaaggtaacatcatattagctgtgtcagaccatatatcgaaagttctttacttgtatcaaggtgagaaaaaattagaagagatattacctctgggaccaaacaaagctcttttttataaaggaatggcatcatatcttttaccaggacaaaaatctccatggtttttccaaaaacccaaaggtgtaataactttggacaaacaagtaatatccacgagttcagacgccgaatccagggaagaagttcccatgtgttcagatgctgaatccaggcaagaagttcccatgtgtacaggccctgaatccaggcgagaagttcccgtgtatacagattctgaacccaggcaagaagttcccatgtgttcagaccctgaacccaggcaagaagttcccacgtgtacaggccctgaatccaggcgagaagttcccatgtgttcagaccctgaacccaggcaagaagttcccatgtgtacaggccctgaagccaggcaagaagttcccatgtatacagactctgaacccaggcaagaagttcccatgtatacagactctgaacccaggcaagaagttcccatgtatacaggctctgaacccaggcaagaagttcccatgtatacaggccctgaatccaggcaagaagttcccatgtatacaggccctgaatccaggcaagaagttttaatacggacagaccctgaatctaggcaagaaattatgtgtacaggccatgaatccaaacaggaagttcccatatgtacagatcctatatccaagcaagaagactccatgtgtacacacgctgaaatcaatcaaaaattacctgtagcaacagattttgaatttaagctagaagctctcatgtgtacaaaccctgaaattaaacaagaagaccccacaaatgtggggcctgaagtaaagcaacaagtaaccatggtttcagacactgaaatcttaaaggttgctagaacacatcacgtccaagcagaaagctacctggtgtacaacatcatgagcagtggagagattgaatgcagcaacaccctagaagatgagcttgaccaggccttacccagccaggccttcatttaccgtcccattcgacagcgggtctactcactcttactggaggactgtcaagatgtcaccagcacctgcctagctgtcaaggagtggtttgtgtatcctgggaacccactgaggcacccggacctcgtcaggccgctgcagatgaccattccagggggaacgcctagtttgaaaatattatggctgaaccaagagccagaaatacaggttcggcgcttggacacactcctagcctgtttcaatctttcctcctcaagagaagagctgcaggctgtcgaaagcccatttcaagctttgtgctgcctcttgatctacctctttgtccaggtggacacgctttgcctggaggatttgcatgcgtttattgcgcaggccttgtgcctccaaggaaaatccacctcgcagcttgtaaatctacagcctgattacatcaaccccagagccgtgcagctgggctcccttctcgtccgcggcctcaccactctggttttagtcaacagcgcatgtggcttcccctggaagacgagtgatttcatgccctggaatgtatttgacgggaagctttttcatcagaagtacttgcaatctgaaaagggttatgctgtggaggttcttttagaacaaaatagatctcggctcaccaaattccacaacctgaaggcagtcgtctgcaaggcctgcatgaaggagaacagacgcatcactggccgagcccactggggctcacaccacgcagggaggtggggaagacagggctccagctaccacaggacgggctctgggtatagccgttccagtcagggacagccgtggagagaccagggaccaggaagcagacagtatgagcatgaccagtggagaaggtactagtcaacctccagaaagagtatggagagaaaaagaggcacacctggacgcagagccctgccagcgccctcctctgctgttgcagctgcaaggagaccatgcctgtgggagccaggcctcgcttgcatgaagaaggaacgatgcctttttcaatggtgtctccctcccattgtgcagaagagcttttgttggcttctctcccgagcttgtgcctgattctgtggcccaaaacaatcattgttaacatcttcatgtgtttcattctgatctttcattcatatatatgatgcctagctaatttcattttaaaataaatgggaatctgttgtattctgattttttattagcaacactagattatgaggggttatctcctgttattaaaaagtcagaaaacactatacagtagtcctcccttatctgcgggggagacatcccaagaccctcagtggatgcctgagactggatagtatggaatcctacatatctataccttggctttttcctctacgtacataccatgataaagcttaacaaagaacagtgagagattaacagcaaccaataactaataaaagctatgtgaatgtggtctctgtcaaaatatcgtgctgtaatcacccttcttgctatctgaaaaccaagaagaccactaagtgactaatggtcagagaagctggatgaggggctgattcatgtcctgggcatgacagagcgggaggcacaaggtttcatcacactattcacaatggcgagcaagttaaaacggatttcccatttaatttaattttcagacttcagttgaccatgagtaaccgaaaccacagaaagtgaagctggggatatttcagaaattcttttctaatcagaaattctaatcaaacataagtttccaactatgtgttctcttggtcctcagaagtgtttgaatagaaaagtaacaactaacttcccatctttctggtggaagagttaattctgcctggagggttctgcctgggagacatgacagcatgtgtgtgactcctgtgtctgtttctgtggggtcatccctttcgtttcattttgccagggcctggctcaggattttttatggcagtgcctgtgaagacaagcctggccctccatccagtcacacaggaaatccacagagagcatgctgagagcagccagcggctgggctgccatcaggcctggtttatgatgccacaagtgaatggcacgtttgttcctctttatctctgagcattgaaggacttttggttaaaaaaaaaaattaagttcagagtaatccttttcatggaagaatcttcaggtcaccaaagaattgaaattttaagccccagattgtactgagctgtacctgtgggaaaaggaatggccagggtattgatgatggaaaagattcaaatgaggagttagaaggcaagccctctgtgggcagccgtcttccagaaacctcgaacttatgtctgtctccacctgagaaaggagaagaaaagctggtggtgacccctgctcctgctgggccatgccatggctctgaagatgccccgtgttcttaggaggtgctcacccctggcacctaaagacatttccttctggttgttgctctttaaaaacaaaataagcccctgaacgtgcttgcaggccagtttgtgtgcctgcacttgacgaattaccttgaccaacgggccaaaggcacagagctccaaggcatcatctttccttaaaatcctgagtgtttattaaaaagggacatggtctctaggtatcttattacatttgtatttcttacatttgaaatatcctaaccgctcccttcggtttcttcttaagaacatttacatctaattatttttcgtgcaagtcttgtaggacccacatgttttcctagctttggaaatcgatttttttcattcctcttatgaggatttccctatgtcagtaaacattaactttctatttcttccatttttgctcatttgaaacccctgctgcttctagatctatttctttgcacttgtataactttgaaataaattcctcatcccttagactaagagagtgggtgtctgtgaaaattgttttctccttcataatacctaaattctagtttgtcagtaaaatatttgtgtttggttaacaagctcttatttaagccattgagttagtataatctttattacctttgaaaaaccagagagctgaattttttgtcattctaagttgtaagtaacactgcagtcaagtcttctgatgaaatttccatatatcaaattgaaaataaagcaaaatatatttattactcataact

SEQ ID NO: 104667 - DNA, 3721 bp, Artificial Sequence
  derived and/or modified sequence
gtcactcggcggcggcggtcgttccgggagcactccgggctccgatctccggtgtcacagcaaagatccgcgtctttccgatgaatccagccaatgccatccagtacacacgcgcaggaccggaggggccgggccgtgggaggaggctctgcgccgcggctgcccgggttcccctgcgctctgccctcggccgggtcgggtctccgcgggtgcgcgcagaggatctggctctcgccggcgcctgccgcccttatattcagccggccgcccgcatggctaatgagatgcaaatcagcagccccccaatctggcgagagctgtcacaaaggagccacttttccaaaccctcctctcaatggatcgccaaatgatcctttcccggagttcagttatgggtgtgagaggtttgcaaggatttgtgggaagtacctgcccacatatatgtacagtagtaaatttcaaagaactggcagagcaccaccgaagcaagtatcctggatgtacccctaccattgtggttgatgccatgtgttgtctcagatattggtatactccagaatcttggatctgcggtggccagtggcgagaatacttttctgctttgcgagattttgttaaaacttttacggcagctgggatcaagttgatattcttctttgatggcatggtggagcaggataagagagatgaatgggtgaaacgaaggctcaagaacaacagggagatatccaggatttttcattacatcaagtcacacaaggagcagccaggcagaaatatgttcttcatcccctcagggctagctgtgtttacacgatttgctctaaagacactgggccaggaaactttgtgttctttgcaggaagcagattatgaggtagcttcctatggcctccagcataactgtcttgggattctgggggaagacactgattacctaatctatgacacttgtccctacttttcaattagcgagctctgcctagagagcctggacaccgtcatgctctgcagagagaagctctgtgagagtctgggcctctgtgtggccgaccttcctcttctggcctgcctccttggcaacgacataatcccagagggcatgtttgaaagctttaggtacaaatgcttatcgtcctacacctctgtaaaagagaactttgacaaaaaaggtaacatcatattagctgtgtcagaccatatatcgaaagttctttacttgtatcaaggtgagaaaaaattagaagagatattacctctgggaccaaacaaagctcttttttataaaggaatggcatcatatcttttaccaggacaaaaatctccatggtttttccaaaaacccaaaggtgtaataactttggacaaacaagtaatatccacgagttcagacgccgaatccagggaagaagttcccatgtgttcagatgctgaatccaggcaagaagttcccatgtgtacaggccctgaatccaggcgagaagttcccgtgtatacagattctgaacccaggcaagaagttcccatgtgttcagaccctgaacccaggcaagaagttcccacgtgtacaggccctgaatccaggcgagaagttcccatgtgttcagaccctgaacccaggcaagaagttcccatgtgtacaggccctgaagccaggcaagaagttcccatgtatacagactctgaacccaggcaagaagttcccatgtatacagactctgaacccaggcaagaagttcccatgtatacaggctctgaacccaggcaagaagttcccatgtatacaggccctgaatccaggcaagaagttcccatgtatacaggccctgaatccaggcaagaagttttaatacggacagaccctgaatctaggcaagaaattatgtgtacaggccatgaatccaaacaggaagttcccatatgtacagatcctatatccaagcaagaagactccatgtgtacacacgctgaaatcaatcaaaaattacctgtagcaacagattttgaatttaagctagaagctctcatgtgtacaaaccctgaaattaaacaagaagaccccacaaatgtggggcctgaagtaaagcaacaagtaaccatggtttcagacactgaaatcttaaaggttgctagaacacatcacgtccaagcagaaagctacctggtgtacaacatcatgagcagtggagagattgaatgcagcaacaccctagaagatgagcttgaccaggccttacccagccaggccttcatttaccgtcccattcgacagcgggtctactcactcttactggaggactgtcaagatgtcaccagcacctgcctagctgtcaaggagtggtttgtgtatcctgggaacccactgaggcacccggacctcgtcaggccgctgcagatgaccattccagggggaacgcctagtttgaaaatattatggctgaaccaagagccagaaatacaggttcggcgcttggacacactcctagcctgtttcaatctttcctcctcaagagaagagctgcaggctgtcgaaagcccatttcaagctttgtgctgcctcttgatctacctctttgtccaggtggacacgctttgcctggaggatttgcatgcgtttattgcgcaggccttgtgcctccaaggaaaatccacctcgcagcttgtaaatctacagcctgattacatcaaccccagagccgtgcagctgggctcccttctcgtccgcggcctcaccactctggttttagtcaacagcgcatgtggcttcccctggaagacgagtgatttcatgccctggaatgtatttgacgggaagctttttcatcagaagtacttgcaatctgaaaagggttatgctgtggaggttcttttagaacaaaatagatctcggctcaccaaattccacaacctgaaggcagtcgtctgcaaggcctgcatgaaggagaacagacgcatcactggccgagcccactggggctcacaccacgcagggaggtggggaagacagggctccagctaccacaggacgggctctgggtatagccgttccagtcagggacagccgtggagagaccagggaccaggaagcagacagtatgagcatgaccagtggagaaggtactagtcaacctccagaaagagtatggagagaaaaagaggcacacctggacgcagagccctgccagcgccctcctctgctgttgcagctgcaaggagaccatgcctgtgggagccaggcctcgcttgcatgaagaaggaacgatgcctttttcaatggtgtctccctcccattgtgcagaagagcttttgttggcttctctcccgagcttgtgcctgattctgtggcccaaaacaatcattgttaacatcttcatgtgtttcattctgatctttcattcatatatatgatgcctagctaatttcattttaaaataaatgggaatctgttgtattctgattttttattagcaacactagattatgaggggttatctcctgttattaaaaagtcagaaaacactatacagtagtcctcccttatctgcgggggagacatcccaagaccctcagtggatgcctgagactggatagtatggaatcctacatatctataccttggctttttcctctacgtacataccatgataaagcttaacaaagaacagtgagagattaacagcaaccaataactaataaaagctatgtgaatgtggtctctgtc

SEQ ID NO: 104668 - DNA, 2733 bp, Artificial Sequence
  derived and/or modified sequence
atgggagtgagggggttacaaggatttgtgggaagtacatgcccacacatctgtaccgtggtgaactttaaagagctggcagagcaccaccggtccaaataccccggctgtacaccaaccatagtggtagacgcgatgtgctgtctccggtattggtatacccccgaatcttggatttgtgggggacagtggcgagaatacttttccgccctccgcgacttcgtgaaaactttcacggccgccgggatcaaacttattttcttcttcgacggcatggtagagcaggataaaagagacgaatgggtgaaacggaggctcaaaaacaacagagaaatttctagaatttttcattatattaaatcacataaggagcagcccggcaggaatatgttcttcattcccagcggccttgccgtgtttactagatttgcgctgaaaactttgggacaggagactctctgctccctgcaagaggcagactacgaggttgcatcctacggactacagcacaactgcctgggaattctgggtgaggatacagattaccttatctatgatacatgcccttatttcagcataagcgaactgtgcttggagtcattagacaccgtcatgctctgtcgggagaagctttgtgagagcctgggactttgtgtcgccgatttgccactgctggcctgtctattaggcaacgatattatccctgaggggatgttcgaatcctttcgctataaatgcttgagcagctatacctcggtgaaagagaactttgataaaaaaggcaatattatcctcgcagtctctgaccacatctctaaggtgctgtacctataccagggggagaaaaagctggaagagattctacctctcggtccaaataaagctcttttttacaaggggatggccagctacctgctgccaggtcagaaatcaccctggttctttcagaaaccaaagggggtcatcacgctcgacaagcaagtgatttccacatccagtgatgcggagagcagggaggaagtccccatgtgctctgacgcagagagtaggcaggaggtgcccatgtgtaccgggcccgagagccgacgcgaagtgcccgtgtacacagactctgaaccccgtcaggaagttccaatgtgcagcgatccggagcccagacaagaagtcccaacctgtaccgggcctgagtctcgccgcgaagtgcccatgtgctccgatcccgagcctcggcaggaagtcccaatgtgcacaggacctgaagcacgtcaggaagtgccaatgtacaccgactccgagccaaggcaggaggttcctatgtatacagactctgaaccaaggcaggaggtgcctatgtataccggaagcgagccccgtcaagaggtccccatgtatacgggccctgagagccgtcaggaagtccccatgtataccggtccagaatctcggcaggaggtgttgattcggacggaccctgaatctcggcaggagattatgtgtactggacatgaatcaaagcaggaggttcccatctgcaccgaccccatctcgaaacaggaggattctatgtgtacacatgctgagattaaccagaagctgcctgtggccactgactttgaatttaagctcgaagctctgatgtgtacaaatcctgagataaaacaggaagatccaaccaacgtgggacccgaggttaaacagcaagtgaccatggtttctgacacagaaattctaaaggtggctaggactcaccacgtgcaagcagaaagttatcttgtgtacaacatcatgtcctcaggcgaaatagagtgctcaaatacgctggaggatgaactggatcaggcactcccaagccaggcatttatttataggcccattcgtcagcgcgtgtactccctactgctcgaagactgtcaggatgtaacttctacctgtctcgccgtcaaggagtggttcgtgtacccagggaatcccttacggcacccggacttagtccgcccactgcagatgaccatcccaggaggcactccgtccttgaaaatcctctggttaaaccaggaacccgagatccaagtcagacgtctcgataccctgttagcctgtttcaatcttagctctagcagagaagagctacaggccgtagagagccctttccaagctctgtgctgcctgctcatatacctgtttgtccaggttgacaccctatgtctcgaagacttgcacgcatttattgcccaggcactgtgcctgcagggtaagagcacctcccagctcgtcaacctgcaaccagattacatcaacccccgggccgtccagctggggagtctgcttgttcgcggtcttacaacccttgttctagtgaattctgcatgtggctttccttggaaaacttccgacttcatgccctggaacgtcttcgatggcaagctttttcatcagaagtatctgcaatcagagaaagggtacgccgtagaggtcctgctcgagcaaaatcgctcccgtctaaccaagttccacaacttgaaggccgtggtgtgtaaggcttgtatgaaggagaaccgtcgaataacaggtagggcgcattgggggtcacaccatgccggcagatggggtcgacaaggctcgtcttaccaccgaactggcagcggctactctaggagtagccagggccagccgtggcgggatcaaggccctgggtctcggcagtatgagcatgatcaatggaggcggtactag

SEQ ID NO: 104669 - DNA, 2769 bp, Artificial Sequence
  derived and/or modified sequence
atggatcggcagatgatcctgagccgatcctctgtgatgggcgtccgtggcctgcaaggcttcgttggctcaacctgcccacacatatgcacagtggttaatttcaaagagctggctgaacatcatcgcagcaaatacccagggtgtactcccaccatagtagtggatgcaatgtgttgcctgaggtactggtatacaccggagtcatggatctgtgggggacagtggagagagtacttcagtgcgctccgcgatttcgtgaagaccttcacggcagctggcatcaaactgatctttttttttgacgggatggtggagcaggataagagagacgagtgggtcaaacgcaggcttaagaacaacagagagatctctcggatctttcactatatcaagtctcataaagaacagcccggccgaaacatgttttttatccctagcggccttgccgtttttacccggttcgccctgaaaaccttagggcaggaaacactctgtagcctgcaggaggcagattatgaagtggctagttacggactccaacataattgtctgggaattttaggggaagatacagattacctgatatacgacacatgtccatacttctccatctcagagctctgcctggaatccctcgacaccgtgatgctatgtcgtgaaaagctttgcgaaagtctgggcctctgtgttgccgacctgccgctgctcgcttgcctgctcggcaatgacatcatcccagaagggatgttcgagtcttttaggtacaaatgcctgtctagctataccagcgtcaaggaaaacttcgacaagaagggtaacattattctcgccgtgtcggaccacatttccaaggtcctctacctctatcagggcgaaaaaaagctggaggaaatcctgcccctcggacctaacaaagcactgttctacaaagggatggcttcttatttgctacccggccagaagtctccatggtttttccagaagccgaaaggagttataaccctggacaaacaggtaatcagtacttcgtcagacgctgaaagccgcgaagaggtgccaatgtgttctgacgctgaaagccgacaagaggtgcctatgtgtactgggccggagagtaggagagaagtgccggtctatacagatagcgaaccacgacaagaggtccctatgtgcagcgaccccgaaccccgacaggaagttcccacatgcaccggacccgaatctaggagggaggttccaatgtgctccgacccggagccgagacaggaggtccccatgtgtactggcccagaggcccgccaggaggtccctatgtacacagatagcgaacccaggcaggaagtgcccatgtacaccgacagtgagccaaggcaggaagtgcccatgtacaccggttccgaaccaaggcaggaggtgccaatgtatacaggtcctgagagtcgccaagaagtgcccatgtatactggacctgaatctcgccaagaggtcttgatacgcacagatcctgagtctaggcaggaaatcatgtgtacgggccacgagtctaaacaagaggtgcctatctgtacagatccaatcagcaagcaagaggacagcatgtgtacgcacgcagaaatcaatcaaaagctgccagtggccaccgacttcgaatttaagcttgaggcattaatgtgtaccaaccctgagatcaagcaagaggatcctaccaacgtgggtcctgaggtaaagcaacaagttacaatggtaagcgacaccgagatccttaaagttgcacgaacgcaccacgtccaggctgagagctacctggtttataacattatgtcctcgggagagatcgagtgtagcaatacattagaagacgagctcgaccaagccctgcccagtcaagcctttatctaccggccaatacggcagcgggtttacagcctcctgctggaagactgtcaggatgtaactagcacatgcctggccgtgaaggagtggtttgtttatcctggtaatccactgagacaccctgatctggttcgaccattgcaaatgaccatccccggtggcaccccctccttaaaaattttatggcttaatcaggagcccgagattcaggtacggagactcgatactctcttagcctgcttcaatttgtcatcttcgcgggaggaacttcaggctgtcgaatcccctttccaggctttgtgctgtctattgatctacctctttgttcaggtcgataccctgtgtctcgaagatctgcacgccttcattgcacaggccctgtgccttcaaggaaaatctaccagccaactggtgaaccttcagcctgactacattaatccccgcgcagtgcagctcgggtccctgctggttcggggtctgaccaccctcgtgttagtgaattctgcttgcgggttcccatggaaaacatctgatttcatgccatggaatgtcttcgatggcaagttattccaccagaaatacctgcagtctgaaaaagggtacgcggtggaagtcttgctggagcagaacaggtccaggctgaccaaattccacaacttgaaagccgtagtttgtaaggcctgcatgaaagaaaatagacggatcactggcagggcacactggggatcccatcacgccgggaggtgggggcgccaagggtcttcctaccaccggactggttctggctactcacggtccagccaaggacagccgtggcgggaccaggggcctggctctagacagtatgaacatgaccaatggcggcgttattag

SEQ ID NO: 104670 - DNA, 2733 bp, Artificial Sequence
  derived and/or modified sequence
atgggcgtgcggggcctgcagggctttgtgggcagcacctgcccccacatctgcaccgtggtgaacttcaaggagctggccgagcaccacaggagcaagtacccaggctgcacccccaccatcgtggtggatgccatgtgctgcctgcgctactggtacaccccagagagctggatctgtggcggccagtggagggagtacttcagcgccctgcgggactttgtgaagaccttcaccgctgctggcatcaagctgatcttcttctttgatggcatggtggagcaggacaagagagatgagtgggtgaagaggcggctgaagaacaaccgggagatcagccgcatcttccactacatcaagagccacaaggagcagcccggcaggaacatgttcttcatccccagcggcctggccgtgttcaccaggtttgccctgaagaccctgggccaggagaccctgtgcagcctgcaggaggccgactatgaggtggccagctatggcctgcagcacaactgcctgggcatcctgggggaggacacagactacctgatctatgacacctgcccctacttcagcatcagcgagctgtgcctggagagcctggacacagtgatgctgtgccgggagaagctgtgtgagagcctgggcctgtgtgtggccgacctgcccctgctggcctgcctgctgggcaatgacatcatccctgagggcatgtttgagagcttccgctacaagtgcctgagcagctacacctctgtgaaggaaaattttgacaagaagggcaacatcatcctggccgtgtctgaccacatcagcaaggtgctgtacctgtaccagggcgagaagaagctggaggagatcctgcccctgggccccaacaaggccctcttctacaagggcatggccagctacctgctgcccggccagaagagcccctggttcttccagaagcccaagggcgtcatcaccctggacaagcaggtgatcagcaccagcagtgatgctgagagccgggaggaggtgcccatgtgcagtgatgctgagagccggcaggaggtgcccatgtgcaccggccctgagagccggcgggaggtgcctgtgtacacagattctgagccccggcaggaggtgcccatgtgcagcgaccctgagccccggcaggaggtgcccacctgcaccggccctgagagccggcgggaggtgcccatgtgcagcgaccctgagccccggcaggaggtgcccatgtgcaccggccctgaggcccggcaggaggtgcccatgtacacagattctgagccccggcaggaggtgcccatgtacacagattctgagccccggcaggaggtgcccatgtacacaggcagcgagccccggcaggaggtgcccatgtacacaggccctgagagccggcaggaggtgcccatgtacacaggccctgagagccggcaggaggtgctgatcagaacagatcctgagagccggcaggagatcatgtgcaccggccacgagagcaagcaggaggtgcccatctgcacagaccccatcagcaagcaggaggacagcatgtgcacccacgccgagatcaaccagaagctgcctgtggccacagactttgagttcaagctggaggccctgatgtgcaccaaccctgagatcaagcaggaggaccccaccaacgtgggccctgaggtgaagcagcaggtgaccatggtgtctgacacagagatcctgaaggtggcccggacccaccacgtgcaggccgagagctacctggtgtacaacatcatgagcagcggggagattgagtgcagcaacaccctggaggatgagctggaccaggccctgcccagccaggccttcatctaccggcccatccggcagagggtgtacagcctgctgctggaggactgccaggatgtgaccagcacctgcctggccgtgaaggagtggtttgtgtacccaggcaaccccctgcggcacccagacctggtgcggcccctgcagatgaccatccctgggggcacccccagcctgaagatcctgtggctgaaccaggagcctgagatccaggtgcggcggctggacaccctgctggcctgcttcaacctgagcagcagccgggaggagctgcaggccgtggagagccccttccaggccctgtgctgcctgctgatctacctgtttgtgcaggtggacaccctgtgcctggaggacctgcacgccttcatcgcccaggccctgtgcctgcagggcaagagcaccagccagctggtgaacctgcagcctgactacatcaaccccagggctgtgcagctgggcagcctgctggtgcggggcctgaccaccctggtgctggtgaacagcgcctgtggcttcccctggaagaccagtgacttcatgccctggaatgtgtttgatggcaagctgttccaccagaagtacctgcagagcgagaagggctatgctgtggaggtgctgctggagcagaacagaagccggctgaccaagttccacaacctgaaggctgtggtgtgcaaggcctgcatgaaggaaaatcgccgcatcaccggccgggcccactggggcagccaccacgccggccgctggggccggcagggcagcagctaccacaggactggaagtggctacagccgcagcagccagggccagccctggagggaccagggccctggcagccggcagtatgaacatgaccagtggaggcgctactag

SEQ ID NO: 104671 - DNA, 2769 bp, Artificial Sequence
  derived and/or modified sequence
atggaccggcagatgatcctgagccgcagctctgtgatgggcgtgcggggcctgcagggctttgtgggcagcacctgcccccacatctgcaccgtggtgaacttcaaggagctggccgagcaccacaggagcaagtacccaggctgcacccccaccatcgtggtggatgccatgtgctgcctgcgctactggtacaccccagagagctggatctgtggcggccagtggagggagtacttcagcgccctgcgggactttgtgaagaccttcaccgctgctggcatcaagctgatcttcttctttgatggcatggtggagcaggacaagagagatgagtgggtgaagaggcggctgaagaacaaccgggagatcagccgcatcttccactacatcaagagccacaaggagcagcccggcaggaacatgttcttcatccccagcggcctggccgtgttcaccaggtttgccctgaagaccctgggccaggagaccctgtgcagcctgcaggaggccgactatgaggtggccagctatggcctgcagcacaactgcctgggcatcctgggggaggacacagactacctgatctatgacacctgcccctacttcagcatcagcgagctgtgcctggagagcctggacacagtgatgctgtgccgggagaagctgtgtgagagcctgggcctgtgtgtggccgacctgcccctgctggcctgcctgctgggcaatgacatcatccctgagggcatgtttgagagcttccgctacaagtgcctgagcagctacacctctgtgaaggaaaattttgacaagaagggcaacatcatcctggccgtgtctgaccacatcagcaaggtgctgtacctgtaccagggcgagaagaagctggaggagatcctgcccctgggccccaacaaggccctcttctacaagggcatggccagctacctgctgcccggccagaagagcccctggttcttccagaagcccaagggcgtcatcaccctggacaagcaggtgatcagcaccagcagtgatgctgagagccgggaggaggtgcccatgtgcagtgatgctgagagccggcaggaggtgcccatgtgcaccggccctgagagccggcgggaggtgcctgtgtacacagattctgagccccggcaggaggtgcccatgtgcagcgaccctgagccccggcaggaggtgcccacctgcaccggccctgagagccggcgggaggtgcccatgtgcagcgaccctgagccccggcaggaggtgcccatgtgcaccggccctgaggcccggcaggaggtgcccatgtacacagattctgagccccggcaggaggtgcccatgtacacagattctgagccccggcaggaggtgcccatgtacacaggcagcgagccccggcaggaggtgcccatgtacacaggccctgagagccggcaggaggtgcccatgtacacaggccctgagagccggcaggaggtgctgatcagaacagatcctgagagccggcaggagatcatgtgcaccggccacgagagcaagcaggaggtgcccatctgcacagaccccatcagcaagcaggaggacagcatgtgcacccacgccgagatcaaccagaagctgcctgtggccacagactttgagttcaagctggaggccctgatgtgcaccaaccctgagatcaagcaggaggaccccaccaacgtgggccctgaggtgaagcagcaggtgaccatggtgtctgacacagagatcctgaaggtggcccggacccaccacgtgcaggccgagagctacctggtgtacaacatcatgagcagcggggagattgagtgcagcaacaccctggaggatgagctggaccaggccctgcccagccaggccttcatctaccggcccatccggcagagggtgtacagcctgctgctggaggactgccaggatgtgaccagcacctgcctggccgtgaaggagtggtttgtgtacccaggcaaccccctgcggcacccagacctggtgcggcccctgcagatgaccatccctgggggcacccccagcctgaagatcctgtggctgaaccaggagcctgagatccaggtgcggcggctggacaccctgctggcctgcttcaacctgagcagcagccgggaggagctgcaggccgtggagagccccttccaggccctgtgctgcctgctgatctacctgtttgtgcaggtggacaccctgtgcctggaggacctgcacgccttcatcgcccaggccctgtgcctgcagggcaagagcaccagccagctggtgaacctgcagcctgactacatcaaccccagggctgtgcagctgggcagcctgctggtgcggggcctgaccaccctggtgctggtgaacagcgcctgtggcttcccctggaagaccagtgacttcatgccctggaatgtgtttgatggcaagctgttccaccagaagtacctgcagagcgagaagggctatgctgtggaggtgctgctggagcagaacagaagccggctgaccaagttccacaacctgaaggctgtggtgtgcaaggcctgcatgaaggaaaatcgccgcatcaccggccgggcccactggggcagccaccacgccggccgctggggccggcagggcagcagctaccacaggactggaagtggctacagccgcagcagccagggccagccctggagggaccagggccctggcagccggcagtatgaacatgaccagtggaggcgctactag

SEQ ID NO: 104672 - DNA, 2733 bp, Artificial Sequence
  derived and/or modified sequence
atgggcgtgcggggcctgcagggcttcgtgggcagcacctgcccccatatctgtaccgtggtcaactttaaggagctggctgaacatcaccgatcaaaatatcctgggtgcacgcccactatcgtcgtcgatgcgatgtgttgcctgcgatattggtacactcccgagtcttggatttgcggcggccagtggcgggagtacttcagcgcccttcgcgactttgtgaagaccttcaccgcagcaggaataaaactgatcttcttcttcgacggcatggtggagcaggacaagcgagatgagtgggtcaaacggaggttaaagaataaccgcgagatctcacgcatttttcattatataaaatctcataaagagcagccagggcgcaatatgtttttcattccatccggcctggccgtcttcactcgctttgctctcaaaactctcggccaagagaccctatgcagcctccaggaggctgactatgaggtggccagttatggcctgcagcacaactgcttaggcattcttggcgaagacacagactatctcatctacgacacgtgtccctacttttccatttcagagttgtgcctcgaaagcctagacactgtgatgttatgtcgggagaagctctgcgagtctctgggcctttgtgtggcagatcttccactgctcgcttgcctactcggtaatgacatcatcccggaggggatgttcgaaagcttcaggtacaaatgtttatcttcatacacctccgttaaagagaacttcgataagaaaggaaacatcatcctcgcagtctccgaccacatctccaaggttctgtacttatatcaaggtgagaagaaactggaagagatacttcctctgggacctaacaaggcactcttttataaaggcatggcctcctacttgctgcctggacaaaaaagcccctggtttttccagaagccaaaaggtgtgatcacactagacaagcaggtgatctcaacctcttctgacgctgaatcacgggaggaggtgcccatgtgcagtgatgccgagagcagacaggaagtgcccatgtgcacgggtcctgaatctcggagggaagtccccgtttacaccgactctgagccccggcaagaggtccctatgtgttcagatccagagccccgtcaagaggtgcctacctgtacggggccggaatccaggagggaggtgcctatgtgtagcgatcccgagccaagacaggaggtgcctatgtgtacaggccccgaagctcgccaggaagtgccaatgtatactgactccgagccgcgccaggaggtacctatgtacaccgacagcgaacctcggcaggaagtgcctatgtacaccgggagcgaaccccggcaagaagtgccgatgtatactggaccagagtcccgccaggaagtgccaatgtacaccggccctgagtcgaggcaggaggtgctaattcggacggatcctgaaagcagacaggaaatcatgtgcaccggccacgagtccaagcaggaggtgcctatctgtacagatccaatttctaagcaggaagattcaatgtgcacccatgcagagatcaaccagaaactaccagtggccactgacttcgagtttaagcttgaggcgctgatgtgcacgaatccggaaattaaacaagaggaccccacaaacgttggacccgaggtgaaacaacaagtgacaatggtctctgacaccgaaatccttaaagtggccagaacacaccacgtgcaggccgaatcgtatctggtctacaacatcatgtctagcggtgagatcgagtgttcaaacacgttggaagacgagctggaccaggccttgcccagtcaggcatttatctataggccaatcagacagagggtctacagcttgctgcttgaagattgccaggacgtcacctcgacatgtctggccgtcaaggaatggttcgtctatcccggaaatccattgcgccatccagacttggtccggcctctgcagatgacgattccgggggggacaccgagcctgaaaattctttggcttaatcaagaaccagagatacaggttcgcaggttagatactctgctggcatgtttcaatctgtcatcgtcacgcgaagaacttcaggctgttgagagtccgttccaggccctctgctgtcttctgatctatctcttcgtgcaagtggataccctatgcttggaagatctgcatgcatttattgcacaagctctctgtttgcagggcaagtcaacatctcagctggtaaatttgcaacctgattatattaaccccagagccgtgcagctcgggtcacttctggtgcgcgggctcacaaccctggtcctcgtcaactcggcatgtggcttcccctggaagactagtgattttatgccttggaacgtgttcgacggtaagttgttccaccaaaagtacctgcagtccgagaaagggtatgcagtggaggttttgcttgagcagaatcgaagccgactgaccaaatttcacaatctaaaggcagtggtttgcaaggcctgcatgaaggagaacagacggataaccgggagagctcactggggatcacaccatgcaggcagatggggacggcaaggatccagctaccatagaaccggttctgggtatagccgaagcagtcagggccagccctggcgcgaccagggccccggaagccgacagtacgaacatgatcagtggcgacgctattag

SEQ ID NO: 104673 - DNA, 2769 bp, Artificial Sequence
  derived and/or modified sequence
atggaccggcagatgatcctgagccggagcagcgtgatgggcgtgcgaggattgcagggctttgtaggcagcacatgcccacatatatgtactgtagtgaactttaaggaactggctgagcatcacagatccaaataccctgggtgtacaccgaccatagtggtggatgctatgtgttgcctgagatattggtacactcctgaaagttggatctgcggtggccagtggagggagtactttagcgccctccgagacttcgtgaagacctttactgcagcaggaatcaagttgatcttttttttcgatggcatggtggagcaagacaaaagggatgagtgggtcaagcgccgattgaagaacaacagagaaatatcaaggattttccattacataaagagccataaagaacagccgggcagaaatatgttttttattccctctggattggcggtgttcactcgattcgctctcaagacccttggccaggaaaccctgtgttctctgcaggaggctgattacgaagtggcgtcttatggactgcagcacaattgtcttggcattttaggcgaagatacagattatctgatctacgatacgtgcccatatttttctataagtgagctctgcttagaatcactcgacaccgttatgttgtgcagggagaaactgtgcgagtccctaggcctgtgtgtagctgacctgccactactggcatgcctgctcggcaacgatattattccagaaggtatgttcgaaagctttcgctacaaatgtctctcatcatacacatccgttaaagaaaattttgacaaaaagggcaacatcattttggcggtctcggaccatatcagcaaggtcctctacctctatcaaggagagaaaaagctagaggaaatcctccccctaggacccaataaggcactgttctacaaggggatggcttcatacctgctgcctggtcagaagagcccatggttttttcagaaacctaagggagtgatcacactggacaagcaagttatctccacatcatcagacgctgagtcccgcgaggaggtgccaatgtgttctgatgccgaatccaggcaggaagttccaatgtgtaccggacctgagtctcgacgagaagtcccggtatacacagattccgagcccagacaagaagtgccaatgtgtagtgaccccgaaccacggcaagaggtacctacatgtaccggtcctgaatctcgccgggaagtgccaatgtgctcagacccggagccgcgacaagaagtccctatgtgcaccggtccagaggccaggcaggaagtgcccatgtacacggatagcgagccacgacaggaagttccaatgtatacagatagcgagccgagacaggaggttccaatgtatacagggagtgagccaagacaggaggtgccaatgtatacaggccccgaaagtaggcaagaagttcctatgtatactggccccgagtccagacaagaggtgctgattcgcactgacccggaatcacggcaagagatcatgtgtacgggccacgaatcaaaacaggaagtgccaatctgcacagatcctatttcgaaacaggaagattccatgtgtactcacgcggagatcaaccagaaactgccagtggcaaccgactttgagttcaaactcgaggcccttatgtgcactaatcctgagattaagcaagaggatccgacaaatgtaggcccagaggtgaagcaacaagtgacgatggtgagcgacactgagatcctgaaagtagcacgtactcaccacgtgcaggcggaatcttaccttgtctataatatcatgagtagcggcgagatagagtgttctaataccctggaggacgagcttgaccaagccttgccatctcaggcatttatttaccgaccaattagacagcgggtttacagtttattgttggaagattgccaggacgtcacgtcaacatgccttgctgtgaaagaatggttcgtctacccaggaaatccactcagacatccggatctggtgcggccattacagatgactatcccaggagggacaccttctctgaagatcctgtggctgaaccaggagcctgaaatccaggtccgaaggcttgatacccttcttgcatgtttcaacctcagttcctcacgcgaggagctccaggccgtggaatctccctttcaggcactgtgttgcctgcttatttacttgttcgttcaggttgataccttatgtctcgaagacctgcacgcctttattgctcaggctctctgcctgcagggcaagagtacttcccagttagtaaacctgcagccagactatattaatcctcgcgcagtgcagctcggatctctcttggtgagaggattaacaacgctcgtactagtcaacagcgcttgcgggttcccgtggaagaccagcgacttcatgccttggaatgtgttcgacgggaaactgtttcaccagaaatacctgcagtcagagaagggttatgctgtagaggtgctgctcgaacagaaccgttcaagactgacaaagttccacaaccttaaagccgtcgtttgcaaggcctgcatgaaagagaacaggcggataacaggaagggcacactggggcagccaccatgcgggccgttggggacgtcagggcagctcttaccaccggacgggatctggatattcccgatccagtcagggccagccttggagggaccagggccctggttccaggcagtacgaacatgaccagtggagaaggtactag

SEQ ID NO: 104674 - DNA, 2733 bp, Artificial Sequence
  derived and/or modified sequence
atgggtgtacgcggactgcagggattcgttgggagcacatgcccacatatatgcacagttgtgaattttaaggaactcgctgaacatcatagatccaagtaccccggttgcacccctaccatcgtggtggacgcaatgtgttgccttagatattggtacacccctgagtcgtggatatgtggtggccagtggagagagtatttcagtgcactcagagattttgtgaagaccttcacggccgcaggaatcaagttaatcttctttttcgacggtatggtggagcaggacaaaagagatgaatgggtgaagagaaggctcaaaaacaaccgggaaatatcccgcattttccactacattaaatctcacaaagagcaacctggcagaaatatgttcttcattccaagcggcctggctgtgtttacaaggttcgccttgaaaaccctgggacaggagacgctgtgcagtctgcaggaggctgattatgaggtagctagctatggcctacagcacaattgcctgggaatactgggcgaggacaccgactatctgatctacgatacgtgtccctacttttcaattagcgaactctgtctggagagcctggatactgttatgctttgccgcgagaagttgtgcgagtcattgggcttgtgtgtggctgacctacccctgctagcctgtcttttgggaaacgacatcatccccgaagggatgttcgagagctttcgctataagtgcctgtccagctacacctctgtgaaagagaattttgacaagaagggcaatatcatcctggccgtgtccgatcatatcagtaaggtgctttatttataccagggcgaaaagaaactggaagaaatcttgcccctcggtccaaacaaggccctattctacaaaggaatggcaagctacttacttcccggtcagaagagcccctggttctttcaaaagccgaaaggagtcatcactctggacaagcaggttatttcaacatcgagtgacgctgagagccgggaggaggtcccaatgtgcagcgacgctgaaagtagacaggaagtgccaatgtgcaccgggccagagagcagacgagaggtcccggtttacacggattcagagcctcgtcaagaagtgccaatgtgcagcgaccccgaacccaggcaggaggtaccgacctgcactggcccagaatcccggagagaagtccccatgtgctccgatcccgaaccgcgacaggaagtaccaatgtgcaccgggccagaggccaggcaagaagtgccaatgtacaccgacagcgaacctcgtcaagaggtcccaatgtacaccgactcggagccccgtcaggaagtgcctatgtacaccggaagcgaaccgcgtcaagaagtccccatgtacaccggcccagagtcccggcaggaagttcctatgtataccggtcctgaatctcgtcaggaagtgctaattagaactgaccctgagtccagacaagagattatgtgcactgggcacgagtcaaaacaggaggtccccatctgcacagatccaatctccaagcaggaagactcaatgtgcacccacgcagagataaaccaaaagctgcctgtcgcgaccgactttgaattcaaactagaagccctgatgtgtaccaatccagagattaaacaggaggaccctaccaacgttggccctgaggtgaaacaacaggtgactatggtttccgacactgagatcctcaaagtagcacgaacccaccatgtgcaggccgagtcttacctggtctataacattatgagcagcggggagatcgagtgttcaaataccctcgaagacgagttggatcaggcacttccatcacaggctttcatctatagaccaatccggcagagggtgtattcactgctattggaagactgccaagatgtgactagcacatgcctagcagtcaaggagtggttcgtgtaccccggtaatccattgcgccaccccgacctggtcagacctcttcaaatgacaattccaggcggaacgccgtccctcaagatcctgtggctgaaccaagaaccagagatccaggtgcgtcgtctggacaccttgctggcatgtttcaatttgagctccagccgggaggagttacaggccgtcgagagtccattccaggccttgtgttgcctgctcatctatctttttgtgcaggttgacacgctctgcctcgaggacctccatgcttttatcgctcaggccttatgtctgcagggaaagtccacaagccaacttgtcaacttacaaccagactacattaaccccagggcagtccaactgggctccttactggtcagaggcctgacaaccctggtccttgttaattccgcctgcggttttccttggaaaacgtccgactttatgccatggaatgtattcgatggcaagctctttcaccagaaatacttgcagagtgaaaagggctatgccgtggaggtgctgctggaacagaacaggtctagacttacgaagtttcataacctgaaagctgtggtatgtaaggcctgtatgaaagagaaccgacgcatcactggcagggcccactggggctctcaccacgccggacggtggggccgacagggtagctcctatcacagaacgggaagtggctactctagaagctctcagggtcaaccttggcgggatcagggacccggaagccgacagtacgagcacgatcagtggagacggtattag

SEQ ID NO: 104675 - DNA, 2769 bp, Artificial Sequence
  derived and/or modified sequence
atggacaggcagatgatcctgtctagaagcagcgttatgggggttcgcggactccaagggtttgtgggctccacctgcccacatatctgtacggtggtgaacttcaaggaactcgctgaacaccatcggtcaaagtatccgggatgcactccgaccatcgtggtggatgcaatgtgttgtctgcgttactggtacacacctgagtcctggatctgcgggggtcagtggagagagtatttctccgctctgagagattttgtaaaaaccttcactgccgcagggattaaactcatattctttttcgatggaatggtggaacaggacaagcgtgatgagtgggttaaacgacgactgaaaaacaacagggaaatctcacgtatcttccactacattaagtcccacaaggagcagccgggtagaaatatgtttttcatcccctcaggactggctgtgttcactcggttcgccctgaagaccctgggacaagagacactttgtagcctgcaggaggccgactatgaggtggcatcgtacggtctgcagcacaactgcctggggatcctgggagaagatacagactacctcatctatgatacctgcccatacttcagcattagcgaactttgcctggaatctctggatacagtgatgctctgcagagagaagctctgcgagtctctgggcttgtgtgtggccgacttgccgctacttgcttgtcttttagggaatgatataataccagaaggcatgttcgagtcctttcgatacaagtgtctgagcagctataccagtgtcaaggagaatttcgacaagaaggggaatattattttggctgtatccgatcatataagcaaagtgctgtacctgtatcagggagagaagaaactcgaggagattctgcccctggggccaaataaagccctattctacaagggtatggctagctatctgttgcccggacaaaaatcaccatggttcttccagaaacccaagggggtgataaccctcgacaagcaggttatctccacttcttcggacgccgagtctagggaggaagtgcctatgtgtagcgacgcagagagtcggcaggaagtacctatgtgcaccgggccagagtcacggagggaggtgccagtttacaccgactccgaacctcgccaagaggtgcctatgtgtagtgatcccgaacccagacaagaggtgcccacctgcactggtccagagagtcggcgagaggtgccaatgtgttcagatcccgagcccaggcaagaggtacccatgtgtacgggaccggaagctagacaggaagtacctatgtatacagacagcgaaccacgacaggaggttcctatgtatacagactcagagccccgtcaggaggtacccatgtacacagggtcggaaccaagacaggaggtccccatgtacacagggcctgaaagcagacaggaggtccctatgtataccggccctgagtctcggcaagaggtgctgattagaactgatcctgaaagccggcaggaaatcatgtgcaccggtcatgaatccaaacaagaagtgcccatctgcaccgaccccatttctaagcaggaagatagcatgtgcacacacgccgagatcaatcaaaagttacccgtggccaccgactttgaattcaagttggaggcgctgatgtgcactaatcccgagattaaacaagaagaccctacgaatgttgggccagaagtcaaacagcaggtgaccatggtcagcgacaccgaaattctgaaggtcgcacgcacacatcatgtgcaagcagagagctatctggtctataatatcatgtcgtccggagagatcgaatgttctaatacgctggaagatgaactcgaccaagcactaccctcacaggcctttatttaccgtcctatcaggcagcgagtgtatagcctcctcctcgaggattgccaggacgtcaccagcacatgtctcgccgtgaaagagtggttcgtctaccccggaaatcccttaagacatcccgaccttgtgaggcccctgcagatgacaattcccggtggtaccccatcacttaagattctgtggctgaaccaggaacctgagatccaggtgcgcagactcgataccctgctggcctgctttaacctttcaagttcccgcgaagagctccaggcggtcgagtcaccatttcaagctctgtgttgtttactgatttatctgttcgtccaggtcgataccttgtgcctggaggacctgcacgcatttatcgcccaggcgctctgtctgcaggggaagtccacctctcagctcgttaacctccagcctgattatatcaatcctagagctgttcaactcggctctctgttagtacggggacttaccaccctcgtactggtaaactccgcctgcggcttcccctggaaaactagtgactttatgccgtggaacgtgttcgacggcaagctgttccaccagaagtacctccaaagcgagaaaggctatgccgtggaagtgctattggaacagaatagatcccggctgacaaagttccataacctgaaggctgtcgtgtgcaaagcttgcatgaaggagaataggcggatcaccggcagggctcattggggatctcatcacgcaggacggtggggacgacaggggtctagttatcatcggaccggcagcggttactcccgctccagtcagggccagccgtggcgggatcagggaccaggctctcggcagtacgaacacgaccagtggcggcgttactag

SEQ ID NO: 104676 - DNA, 2733 bp, Artificial Sequence
  derived and/or modified sequence
atgggcgtgagaggcctgcagggcttcgtgggcagcacctgcccccacatctgcaccgtggtgaacttcaaggagctggccgagcaccacagaagcaagtaccccggctgcacccccaccatcgtggtggacgccatgtgctgcctgagatactggtacacccccgagagctggatctgcggcggccagtggagagagtacttcagcgccctgagagacttcgtgaagaccttcaccgccgccggcatcaagctgatcttcttcttcgacggcatggtggagcaggacaagagagacgagtgggtgaagagaagactgaagaacaacagagagatcagcagaatcttccactacatcaagagccacaaggagcagcccggcagaaacatgttcttcatccccagcggcctggccgtgttcaccagattcgccctgaagaccctgggccaggagaccctgtgcagcctgcaggaggccgactacgaggtggccagctacggcctgcagcacaactgcctgggcatcctgggcgaggacaccgactacctgatctacgacacctgcccctacttcagcatcagcgagctgtgcctggagagcctggacaccgtgatgctgtgcagagagaagctgtgcgagagcctgggcctgtgcgtggccgacctgcccctgctggcctgcctgctgggcaacgacatcatccccgagggcatgttcgagagcttcagatacaagtgcctgagcagctacaccagcgtgaaggagaacttcgacaagaagggcaacatcatcctggccgtgagcgaccacatcagcaaggtgctgtacctgtaccagggcgagaagaagctggaggagatcctgcccctgggccccaacaaggccctgttctacaagggcatggccagctacctgctgcccggccagaagagcccctggttcttccagaagcccaagggcgtgatcaccctggacaagcaggtgatcagcaccagcagcgacgccgagagcagagaggaggtgcccatgtgcagcgacgccgagagcagacaggaggtgcccatgtgcaccggccccgagagcagaagagaggtgcccgtgtacaccgacagcgagcccagacaggaggtgcccatgtgcagcgaccccgagcccagacaggaggtgcccacctgcaccggccccgagagcagaagagaggtgcccatgtgcagcgaccccgagcccagacaggaggtgcccatgtgcaccggccccgaggccagacaggaggtgcccatgtacaccgacagcgagcccagacaggaggtgcccatgtacaccgacagcgagcccagacaggaggtgcccatgtacaccggcagcgagcccagacaggaggtgcccatgtacaccggccccgagagcagacaggaggtgcccatgtacaccggccccgagagcagacaggaggtgctgatcagaaccgaccccgagagcagacaggagatcatgtgcaccggccacgagagcaagcaggaggtgcccatctgcaccgaccccatcagcaagcaggaggacagcatgtgcacccacgccgagatcaaccagaagctgcccgtggccaccgacttcgagttcaagctggaggccctgatgtgcaccaaccccgagatcaagcaggaggaccccaccaacgtgggccccgaggtgaagcagcaggtgaccatggtgagcgacaccgagatcctgaaggtggccagaacccaccacgtgcaggccgagagctacctggtgtacaacatcatgagcagcggcgagatcgagtgcagcaacaccctggaggacgagctggaccaggccctgcccagccaggccttcatctacagacccatcagacagagagtgtacagcctgctgctggaggactgccaggacgtgaccagcacctgcctggccgtgaaggagtggttcgtgtaccccggcaaccccctgagacaccccgacctggtgagacccctgcagatgaccatccccggcggcacccccagcctgaagatcctgtggctgaaccaggagcccgagatccaggtgagaagactggacaccctgctggcctgcttcaacctgagcagcagcagagaggagctgcaggccgtggagagccccttccaggccctgtgctgcctgctgatctacctgttcgtgcaggtggacaccctgtgcctggaggacctgcacgccttcatcgcccaggccctgtgcctgcagggcaagagcaccagccagctggtgaacctgcagcccgactacatcaaccccagagccgtgcagctgggcagcctgctggtgagaggcctgaccaccctggtgctggtgaacagcgcctgcggcttcccctggaagaccagcgacttcatgccctggaacgtgttcgacggcaagctgttccaccagaagtacctgcagagcgagaagggctacgccgtggaggtgctgctggagcagaacagaagcagactgaccaagttccacaacctgaaggccgtggtgtgcaaggcctgcatgaaggagaacagaagaatcaccggcagagcccactggggcagccaccacgccggcagatggggcagacagggcagcagctaccacagaaccggcagcggctacagcagaagcagccagggccagccctggagagaccagggccccggcagcagacagtacgagcacgaccagtggagaagatactag

SEQ ID NO: 104677 - DNA, 2769 bp, Artificial Sequence
  derived and/or modified sequence
atggacagacagatgatcctgagcagaagcagcgtgatgggcgtgagaggcctgcagggcttcgtgggcagcacctgcccccacatctgcaccgtggtgaacttcaaggagctggccgagcaccacagaagcaagtaccccggctgcacccccaccatcgtggtggacgccatgtgctgcctgagatactggtacacccccgagagctggatctgcggcggccagtggagagagtacttcagcgccctgagagacttcgtgaagaccttcaccgccgccggcatcaagctgatcttcttcttcgacggcatggtggagcaggacaagagagacgagtgggtgaagagaagactgaagaacaacagagagatcagcagaatcttccactacatcaagagccacaaggagcagcccggcagaaacatgttcttcatccccagcggcctggccgtgttcaccagattcgccctgaagaccctgggccaggagaccctgtgcagcctgcaggaggccgactacgaggtggccagctacggcctgcagcacaactgcctgggcatcctgggcgaggacaccgactacctgatctacgacacctgcccctacttcagcatcagcgagctgtgcctggagagcctggacaccgtgatgctgtgcagagagaagctgtgcgagagcctgggcctgtgcgtggccgacctgcccctgctggcctgcctgctgggcaacgacatcatccccgagggcatgttcgagagcttcagatacaagtgcctgagcagctacaccagcgtgaaggagaacttcgacaagaagggcaacatcatcctggccgtgagcgaccacatcagcaaggtgctgtacctgtaccagggcgagaagaagctggaggagatcctgcccctgggccccaacaaggccctgttctacaagggcatggccagctacctgctgcccggccagaagagcccctggttcttccagaagcccaagggcgtgatcaccctggacaagcaggtgatcagcaccagcagcgacgccgagagcagagaggaggtgcccatgtgcagcgacgccgagagcagacaggaggtgcccatgtgcaccggccccgagagcagaagagaggtgcccgtgtacaccgacagcgagcccagacaggaggtgcccatgtgcagcgaccccgagcccagacaggaggtgcccacctgcaccggccccgagagcagaagagaggtgcccatgtgcagcgaccccgagcccagacaggaggtgcccatgtgcaccggccccgaggccagacaggaggtgcccatgtacaccgacagcgagcccagacaggaggtgcccatgtacaccgacagcgagcccagacaggaggtgcccatgtacaccggcagcgagcccagacaggaggtgcccatgtacaccggccccgagagcagacaggaggtgcccatgtacaccggccccgagagcagacaggaggtgctgatcagaaccgaccccgagagcagacaggagatcatgtgcaccggccacgagagcaagcaggaggtgcccatctgcaccgaccccatcagcaagcaggaggacagcatgtgcacccacgccgagatcaaccagaagctgcccgtggccaccgacttcgagttcaagctggaggccctgatgtgcaccaaccccgagatcaagcaggaggaccccaccaacgtgggccccgaggtgaagcagcaggtgaccatggtgagcgacaccgagatcctgaaggtggccagaacccaccacgtgcaggccgagagctacctggtgtacaacatcatgagcagcggcgagatcgagtgcagcaacaccctggaggacgagctggaccaggccctgcccagccaggccttcatctacagacccatcagacagagagtgtacagcctgctgctggaggactgccaggacgtgaccagcacctgcctggccgtgaaggagtggttcgtgtaccccggcaaccccctgagacaccccgacctggtgagacccctgcagatgaccatccccggcggcacccccagcctgaagatcctgtggctgaaccaggagcccgagatccaggtgagaagactggacaccctgctggcctgcttcaacctgagcagcagcagagaggagctgcaggccgtggagagccccttccaggccctgtgctgcctgctgatctacctgttcgtgcaggtggacaccctgtgcctggaggacctgcacgccttcatcgcccaggccctgtgcctgcagggcaagagcaccagccagctggtgaacctgcagcccgactacatcaaccccagagccgtgcagctgggcagcctgctggtgagaggcctgaccaccctggtgctggtgaacagcgcctgcggcttcccctggaagaccagcgacttcatgccctggaacgtgttcgacggcaagctgttccaccagaagtacctgcagagcgagaagggctacgccgtggaggtgctgctggagcagaacagaagcagactgaccaagttccacaacctgaaggccgtggtgtgcaaggcctgcatgaaggagaacagaagaatcaccggcagagcccactggggcagccaccacgccggcagatggggcagacagggcagcagctaccacagaaccggcagcggctacagcagaagcagccagggccagccctggagagaccagggccccggcagcagacagtacgagcacgaccagtggagaagatactag

SEQ ID NO: 104678 - protein, 933 aa, Artificial Sequence
  derived and/or modified sequence
MFGPRGSTSAGAGRKEILSRSSVMGVRGLQGFVGSTCPHICTVVNFKELAEHHRSKYPGCTPTIVVDAMCCLRYWYTPESWICGGQWREYFSALRDFVKTFTAAGIKLIFFFDGMVEQDKRDEWVKRRLKNNREISRIFHYIKSHKEQPGRNMFFIPSGLAVFTRFALKTLGQETLCSLQEADYEVASYGLQHNCLGILGEDTDYLIYDTCPYFSISELCLESLDTVMLCREKLCESLGLCVADLPLLACLLGNDIIPEGMFESFRYKCLSSYTSVKENFDKKGNIILAVSDHISKVLYLYQGEKKLEEILPLGPNKALFYKGMASYLLPGQKSPWFFQKPKGVITLDKQVISTSSDAESREEVPMCSDAESRQEVPMCTGPESRREVPVYTDSEPRQEVPMCSDPEPRQEVPTCTGPESRREVPMCSDPEPRQEVPMCTGPEARQEVPMYTDSEPRQEVPMYTDSEPRQEVPMYTGSEPRQEVPMYTGPESRQEVPMYTGPESRQEVLIRTDPESRQEIMCTGHESKQEVPICTDPISKQEDSMCTHAEINQKLPVATDFEFKLEALMCTNPEIKQEDPTNVGPEVKQQVTMVSDTEILKVARTHHVQAESYLVYNIMSSGEIECSNTLEDELDQALPSQAFIYRPIRQRVYSLLLEDCQDVTSTCLAVKEWFVYPGNPLRHPDLVRPLQMTIPGGTPSLKILWLNQEPEIQVRRLDTLLACFNLSSSREELQAVESPFQALCCLLIYLFVQVDTLCLEDLHAFIAQALCLQGKSTSQLVNLQPDYINPRAVQLGSLLVRGLTTLVLVNSACGFPWKTSDFMPWNVFDGKLFHQKYLQSEKGYAVEVLLEQNRSRLTKFHNLKAVVCKACMKENRRITGRAHWGSHHAGRWGRQGSSYHRTGSGYSRSSQGQPWRDQGPGSRQYEHDQWRRY

SEQ ID NO: 104679 - DNA, 3212 bp, Artificial Sequence
  derived and/or modified sequence
actcggttgccgcgcgtggacttacaagcccacgaagccatcgttcgtcacagcctggaaaagggagggggcatcgatctggtttatgtttggacctcgaggctccaccagcgctggcgcaggcaggaaggagatcctttcccggagttcagttatgggtgtgagaggtttgcaaggatttgtgggaagtacctgcccacatatatgtacagtagtaaatttcaaagaactggcagagcaccaccgaagcaagtatcctggatgtacccctaccattgtggttgatgccatgtgttgtctcagatattggtatactccagaatcttggatctgcggtggccagtggcgagaatacttttctgctttgcgagattttgttaaaacttttacggcagctgggatcaagttgatattcttctttgatggcatggtggagcaggataagagagatgaatgggtgaaacgaaggctcaagaacaacagggagatatccaggatttttcattacatcaagtcacacaaggagcagccaggcagaaatatgttcttcatcccctcagggctagctgtgtttacacgatttgctctaaagacactgggccaggaaactttgtgttctttgcaggaagcagattatgaggtagcttcctatggcctccagcataactgtcttgggattctgggggaagacactgattacctaatctatgacacttgtccctacttttcaattagcgagctctgcctagagagcctggacaccgtcatgctctgcagagagaagctctgtgagagtctgggcctctgtgtggccgaccttcctcttctggcctgcctccttggcaacgacataatcccagagggcatgtttgaaagctttaggtacaaatgcttatcgtcctacacctctgtaaaagagaactttgacaaaaaaggtaacatcatattagctgtgtcagaccatatatcgaaagttctttacttgtatcaaggtgagaaaaaattagaagagatattacctctgggaccaaacaaagctcttttttataaaggaatggcatcatatcttttaccaggacaaaaatctccatggtttttccaaaaacccaaaggtgtaataactttggacaaacaagtaatatccacgagttcagacgccgaatccagggaagaagttcccatgtgttcagatgctgaatccaggcaagaagttcccatgtgtacaggccctgaatccaggcgagaagttcccgtgtatacagattctgaacccaggcaagaagttcccatgtgttcagaccctgaacccaggcaagaagttcccacgtgtacaggccctgaatccaggcgagaagttcccatgtgttcagaccctgaacccaggcaagaagttcccatgtgtacaggccctgaagccaggcaagaagttcccatgtatacagactctgaacccaggcaagaagttcccatgtatacagactctgaacccaggcaagaagttcccatgtatacaggctctgaacccaggcaagaagttcccatgtatacaggccctgaatccaggcaagaagttcccatgtatacaggccctgaatccaggcaagaagttttaatacggacagaccctgaatctaggcaagaaattatgtgtacaggccatgaatccaaacaggaagttcccatatgtacagatcctatatccaagcaagaagactccatgtgtacacacgctgaaatcaatcaaaaattacctgtagcaacagattttgaatttaagctagaagctctcatgtgtacaaaccctgaaattaaacaagaagaccccacaaatgtggggcctgaagtaaagcaacaagtaaccatggtttcagacactgaaatcttaaaggttgctagaacacatcacgtccaagcagaaagctacctggtgtacaacatcatgagcagtggagagattgaatgcagcaacaccctagaagatgagcttgaccaggccttacccagccaggccttcatttaccgtcccattcgacagcgggtctactcactcttactggaggactgtcaagatgtcaccagcacctgcctagctgtcaaggagtggtttgtgtatcctgggaacccactgaggcacccggacctcgtcaggccgctgcagatgaccattccagggggaacgcctagtttgaaaatattatggctgaaccaagagccagaaatacaggttcggcgcttggacacactcctagcctgtttcaatctttcctcctcaagagaagagctgcaggctgtcgaaagcccatttcaagctttgtgctgcctcttgatctacctctttgtccaggtggacacgctttgcctggaggatttgcatgcgtttattgcgcaggccttgtgcctccaaggaaaatccacctcgcagcttgtaaatctacagcctgattacatcaaccccagagccgtgcagctgggctcccttctcgtccgcggcctcaccactctggttttagtcaacagcgcatgtggcttcccctggaagacgagtgatttcatgccctggaatgtatttgacgggaagctttttcatcagaagtacttgcaatctgaaaagggttatgctgtggaggttcttttagaacaaaatagatctcggctcaccaaattccacaacctgaaggcagtcgtctgcaaggcctgcatgaaggagaacagacgcatcactggccgagcccactggggctcacaccacgcagggaggtggggaagacagggctccagctaccacaggacgggctctgggtatagccgttccagtcagggacagccgtggagagaccagggaccaggaagcagacagtatgagcatgaccagtggagaaggtactagtcaacctccagaaagagtatggagagaaaaagaggcacacctggacgcagagccctgccagcgccctcctctgctgttgcagctgcaaggagaccatgcctgtgggagccaggcctcgcttgcatgaagaaggaacgatgcctttttcaatggtgtctccctcccattgtgcagaagagcttttgttggcttctctcccgagcttgtgcctgattctgtggcccaaaacaatcattgttaacatcttcatgtgtttcattctgatctttcattcatatatatgatgcctagctaatttcattttaaaataaatgggaatctgttg

SEQ ID NO: 104680 - DNA, 2802 bp, Artificial Sequence
  derived and/or modified sequence
atgtttgggccgcgcgggtctacgagtgcaggcgcaggccgaaaggagatcctgagccgttcttcagtgatgggcgtgagggggctccagggcttcgtgggatcaacttgcccacacatctgtaccgtggtcaactttaaggaactggccgagcaccataggagcaagtatccaggatgcacccccacaattgtggtggacgctatgtgttgcctgcgttattggtacactcccgagtcatggatctgcggagggcagtggagggagtatttttctgcactccgcgatttcgttaaaacatttacagccgctggaatcaagcttatctttttctttgatggaatggtggagcaggacaaacgagatgagtgggtgaagagacgactgaaaaacaatagggaaataagccggatctttcattatataaagagccataaggaacaacccggtcggaatatgttcttcatcccttccgggctcgccgtatttacacggttcgccctgaaaaccttgggccaggaaacattgtgttccctgcaggaagcagactacgaagttgcttcctacggattacagcacaattgtctcggaattttaggagaggacactgattatttgatctacgatacgtgcccgtattttagcatctctgagctgtgccttgaaagcctggacacagtcatgctatgcagagagaaattgtgcgagtcactgggactgtgtgtcgctgatctcccacttctggcgtgtctgcttggaaacgacatcattcctgaaggcatgtttgaatcattccgctacaagtgcctgagttcctacacaagcgtgaaggagaacttcgataaaaagggtaatataatcttagctgtgagcgatcatatctctaaagtgctgtacctttatcaaggcgagaagaaactggaggagatcctgcctttgggacccaacaaagccctattttacaaagggatggcaagttatcttctaccaggacaaaaatccccctggttttttcagaagcccaaaggagtgatcacactcgacaaacaggtgatctccacaagtagcgatgcagaaagcagggaggaagtgcccatgtgcagcgatgctgagtcccggcaagaagtcccaatgtgcactggtcccgagagccggagagaggtgcccgtatacacagattccgagccaaggcaggaggttccaatgtgcagtgacccagaacccaggcaagaggtacctacatgcactggcccagaatccagaagagaagtgcccatgtgctccgacccagagccacgtcaagaagtgcctatgtgcactgggcccgaagcgcggcaggaggtgcctatgtacaccgacagtgaaccccggcaggaggtaccaatgtacacagactccgagccaagacaggaggtgcctatgtacactggctccgagcctaggcaggaagtgcctatgtatactggaccggagtcccggcaggaggtgccgatgtataccgggccagagagccgccaggaagtgctgattcggactgaccctgaatctcgtcaggaaatcatgtgcacaggacatgaaagcaaacaagaggtcccaatctgtacagaccccatcagcaaacaagaggactccatgtgtacacatgcggagattaaccaaaaattgcctgtcgcaaccgacttcgaatttaagcttgaagctctaatgtgtactaatccagagatcaaacaagaggacccgacaaatgtgggacctgaagtgaagcagcaggtgactatggtttctgacacagagatattgaaggtggcaagaactcaccatgtacaggcagagtcataccttgtttacaatatcatgagctctggtgagatcgaatgctccaatacgctggaagatgaactggatcaggctttaccctctcaggcctttatctatagaccaatccggcagagagtgtattccctgctccttgaggactgtcaggacgttacctctacctgcctggcagtcaaagagtggtttgtctaccccggaaatccattgaggcaccctgacctggtgaggcctttgcagatgacaatccccggggggacgcctagcctcaagatcttgtggctgaaccaggagcctgaaatccaagtgcggcgcctcgatactctgcttgcctgcttcaatctgagttcatcccgggaagagctccaggctgtcgaatccccgtttcaggctttgtgttgtttactgatttacctttttgtccaggttgatactctttgcctggaggacctccacgccttcatcgctcaggcactttgcctgcagggaaagagtacgagtcagctcgttaatctacagcccgattacataaatcctcgagctgtgcaacttgggtctctcctggtgcggggcctgacaacccttgtcttggtcaacagtgcctgcggctttccatggaagacctcagactttatgccttggaatgtgttcgacggcaaactgtttcaccaaaagtaccttcaatccgaaaaagggtacgctgtggaggtgctgctggagcagaaccggagtaggctgacaaaatttcacaatttgaaggcagtggtgtgtaaagcctgtatgaaggagaatcgcagaattactggtagggcccactggggctcccaccatgccgggcgctggggccgccaggggagcagttaccaccgaaccggctctggctacagtagatcttcccagggacagccgtggcgcgaccagggccccgggtctcgtcagtacgagcacgaccagtggcggaggtactag

SEQ ID NO: 104681 - DNA, 2802 bp, Artificial Sequence
  derived and/or modified sequence
atgtttggcccccggggcagcaccagcgctggggccggcaggaaggagatcctgagccgcagctctgtgatgggcgtgcggggcctgcagggctttgtgggcagcacctgcccccacatctgcaccgtggtgaacttcaaggagctggccgagcaccacaggagcaagtacccaggctgcacccccaccatcgtggtggatgccatgtgctgcctgcgctactggtacaccccagagagctggatctgtggcggccagtggagggagtacttcagcgccctgcgggactttgtgaagaccttcaccgctgctggcatcaagctgatcttcttctttgatggcatggtggagcaggacaagagagatgagtgggtgaagaggcggctgaagaacaaccgggagatcagccgcatcttccactacatcaagagccacaaggagcagcctggaagaaacatgttcttcatccccagcggcctggccgtgttcaccaggtttgccctgaagaccctgggccaggagaccctgtgcagcctgcaggaggccgactatgaggtggccagctatggcctgcagcacaactgcctgggcatcctgggggaggacacagactacctgatctatgacacctgcccctacttcagcatcagcgagctgtgcctggagagcctggacacagtgatgctgtgccgggagaagctgtgtgagagcctgggcctgtgtgtggccgacctgcccctgctggcctgcctgctgggcaatgacatcatccctgagggcatgtttgagagcttccgctacaagtgcctgagcagctacacctctgtgaaggagaactttgacaagaagggcaacatcatcctggccgtgtctgaccacatcagcaaggtgctgtacctgtaccagggcgagaagaagctggaggagatcctgcccctgggccccaacaaggccctcttctacaagggcatggccagctacctgctgcccggccagaagagcccctggttcttccagaagcccaagggcgtcatcaccctggacaagcaggtgatcagcaccagcagtgatgctgagagccgggaggaggtgcccatgtgcagtgatgctgagagccggcaggaggtgcccatgtgcaccggccctgagagcagaagagaggtgcctgtgtacacagacagcgagccccggcaggaggtgcccatgtgcagcgaccctgagccccggcaggaggtgcccacctgcaccggccctgagagcagaagagaggtgcccatgtgcagcgaccctgagccccggcaggaggtgcccatgtgcaccggccctgaggcccggcaggaggtgcccatgtacacagacagcgagccccggcaggaggtgcccatgtacacagacagcgagccccggcaggaggtgcccatgtacacaggcagcgagccccggcaggaggtgcccatgtacacaggccctgagagccggcaggaggtgcccatgtacacaggccctgagagccggcaggaggtgctgatcagaacagatcctgagagccggcaggagatcatgtgcaccggccacgagagcaagcaggaggtgcccatctgcacagaccccatcagcaagcaggaggacagcatgtgcacccatgctgagatcaaccagaagctgcctgtggccacagactttgagttcaagctggaggccctgatgtgcaccaaccctgagatcaagcaggaggaccccaccaacgtgggccctgaggtgaagcagcaggtgaccatggtgtctgacacagagatcctgaaggtggcccggacccaccacgtgcaggccgagagctacctggtgtacaacatcatgagcagtggagaaattgaatgtagcaacaccctggaggatgagctggaccaggccctgcccagccaggccttcatctaccggcccatccggcagagggtgtacagcctgctgctggaggactgccaggatgtgaccagcacctgcctggccgtgaaggagtggtttgtgtacccaggcaaccccctgcggcacccagacctggtgcggcccctgcagatgaccatccctgggggcacccccagcctgaagatcctgtggctgaaccaggagcctgagatccaggtgcggcggctggacaccctgctggcctgcttcaacctgagcagcagccgggaggagctgcaggccgtggagagccccttccaggccctgtgctgcctgctgatctacctgtttgtgcaggtggacaccctgtgcctggaggacctgcacgccttcatcgcccaggccctgtgcctgcagggcaagagcaccagccagctggtgaacctgcagcctgactacatcaaccccagggctgtgcagctgggcagcctgctggtgcggggcctgaccaccctggtgctggtgaacagcgcctgtggcttcccctggaagaccagtgacttcatgccctggaatgtgtttgatggcaagctgttccaccagaagtacctgcagagcgagaagggctatgctgtggaggtgctgctggagcagaacagaagccggctgaccaagttccacaacctgaaggctgtggtgtgcaaggcctgcatgaaggagaacagacgcatcaccggccgggcccactggggcagccaccacgccggccgctggggccggcagggcagcagctaccacaggacaggcagcggctacagccgcagcagccagggccagccctggagggaccagggccctggcagccggcagtatgaacatgaccagtggaggcgctactag

SEQ ID NO: 104682 - DNA, 2802 bp, Artificial Sequence
  derived and/or modified sequence
atgttcggcccccggggcagcaccagcgccggcgccggccggaaggaaatcctgagccggtcaagcgtgatgggcgtccggggtttgcaaggatttgtgggatcaacctgcccccacatctgtacagtggtgaacttcaaggagcttgccgagcaccaccgaagtaagtacccgggctgcacgccaacaatagtcgtcgatgccatgtgctgcctccgatactggtacactcctgaatcatggatctgcggcggacagtggagggaatatttcagcgctctcagggacttcgtgaagacattcactgctgccgggatcaagctgatcttcttctttgacggtatggtggaacaggataagcgggacgagtgggtgaagagaaggcttaaaaataaccgggagatctcacggatcttccattatatcaaatcgcataaagagcagccaggcaggaacatgttttttatacccagtgggctcgccgtgttcacgagattcgcgctcaaaaccctgggccaagagacactgtgttcacttcaggaggccgactacgaggtagccagttacggattgcagcataactgcctggggatccttggagaagacacagactatctgatttacgatacgtgtccatacttttcaatcagcgaactatgtcttgagtctctggatacagttatgctctgtcgcgagaagctgtgcgagagtctgggactgtgcgttgccgacctccccctgctggcctgtctgcttgggaacgatatcattccagagggaatgttcgaatcattccgctacaagtgcctgtcctcctacacctctgtgaaggaaaacttcgacaaaaagggcaatataatactggcggtttcggaccacatcagtaaggtcttgtatctgtaccaaggtgaaaagaagcttgaggaaatcctcccccttggccccaacaaggctctgttctacaaaggaatggctagttatctgttaccaggtcagaaaagcccctggtttttccagaaaccaaaaggggtaatcacgctggataaacaggtgatctccacatcatctgatgctgagtctagagaggaggttcctatgtgttcagacgcagagtctcggcaagaagtgccaatgtgtacagggcctgaatcccggcgcgaagtgcccgtatacaccgactccgagccgcgacaggaggtgccaatgtgttccgacccggaacctcgccaggaggtgcctacttgtacgggacccgagagccggcgtgaggtgcctatgtgctcagaccccgaacctcgccaggaagtccccatgtgcacaggccctgaggcccggcaggaggtgcctatgtataccgactccgaacctcggcaagaagtgcccatgtacactgactcagagccacggcaggaggttccgatgtacaccggctccgagcctagacaggaagtgccaatgtacactgggccagagtcgcggcaagaggttcccatgtacaccggccctgagtcccgacaggaggtgctcatacgcacagatcctgagtcccggcaggagatcatgtgcactgggcacgagagtaagcaggaggttcctatttgcactgatcctatttccaaacaggaagacagtatgtgcacacacgctgaaattaaccagaagttaccagtggccaccgatttcgaatttaagctcgaggccttaatgtgcacaaatcccgaaattaaacaggaagatcccaccaatgtgggccccgaggtgaaacagcaggtgacaatggtaagtgataccgagatcctcaaagtagctaggacgcatcatgtgcaggcagagtcctacctggtttataatatcatgagctccggagaaatcgaatgttcgaacacactggaagacgaactcgaccaggcacttccctcacaggctttcatctacaggcccattagacaacgggtgtactcactgcttttggaggattgccaggacgtgacttctacttgcctcgcagtaaaggaatggttcgtgtatccaggaaatccgctgaggcaccccgatttggtgcggccattgcagatgactatacccggtggcacgccctcactgaagatcttatggctgaatcaggagcccgagatccaggtgaggcgactcgatactcttctggcctgtttcaatctctcatccagccgcgaggagctgcaggccgtggagtccccgttccaggctctctgttgtctacttatttatctgtttgtccaagtggatacactctgcctggaggatttacatgccttcatcgcacaggctctttgcctccaaggcaaaagcacatcccagctcgttaatctccagcctgactatatcaacccccgagcagttcagctcggaagcctcctcgtgagaggtttaacaacgctggttttggtcaattccgcatgcggcttcccctggaagacaagtgatttcatgccttggaacgttttcgacgggaagctctttcaccagaaatacctacaaagcgagaagggttacgcagtggaggttttactcgaacaaaaccgctctaggctcaccaagtttcacaatctgaaagcagtggtctgcaaggcttgcatgaaagagaatagacgcattacaggacgcgcgcactgggggtctcaccacgccggacgctggggaagacagggatcctcctaccacagaaccggctccgggtactctaggtcttcccagggacaaccatggagggatcagggacccggctccagacagtatgaacacgatcagtggcgcaggtactag

SEQ ID NO: 104683 - DNA, 2802 bp, Artificial Sequence
  derived and/or modified sequence
atgtttggacccagaggcagtacttctgcaggtgcagggcgtaaagagattctgagtcgatcctctgtcatgggcgttaggggtctgcagggctttgtggggagcacctgcccccacatatgtaccgtggtgaatttcaaagagcttgcggagcaccacagaagcaagtacccaggctgtacaccaacaattgttgtggatgcgatgtgctgcttgcggtactggtacacacccgaatcatggatttgcggtggacagtggcgggagtactttagtgccctgcgggattttgtgaagactttcaccgccgctggcattaagctcatttttttttttgatggaatggtggagcaagacaagagagatgagtgggttaaacgaagactgaaaaacaatcgtgaaatctcccgaatctttcattacattaagagtcacaaggaacagcccggtcggaatatgttcttcattccatctggtctcgcagtgtttacacgcttcgccctgaaaacacttggccaggagaccctgtgctctctgcaggaagctgactatgaagtcgcttcctatggcctgcaacataactgcttggggatcctgggggaagacaccgactacctgatctacgatacatgtccatattttagtatctcagaattgtgcctagagtctctagacactgtgatgctgtgtcgggagaaattgtgcgagtctttgggtttgtgcgtcgccgacctcccactccttgcatgtcttttagggaatgacataatacccgaagggatgtttgagtcattccgttacaagtgtctgtcaagctacacctcggtgaaagaaaatttcgataaaaaaggtaatattattttggccgtcagcgaccacatctcgaaagtgctgtacctgtatcagggtgagaagaagctcgaagagatcctcccactgggacccaacaaggccctgttctataaagggatggcctcatacttgctccccggtcagaaatccccttggttctttcagaagcctaagggggtgattacgttggacaagcaggtaatctccaccagctcggacgccgaatctagagaagaggttcctatgtgttccgacgctgagtcacgccaggaggtgccaatgtgtactggcccagaaagccgcagagaagtaccagtatacaccgactcagagcctcgccaggaggtgcctatgtgcagtgatcctgagcctaggcaggaagtgcctacatgcactgggccagagtctcgtcgggaggtacctatgtgctccgaccctgaacccaggcaggaggtccccatgtgtacagggcctgaggcaaggcaagaggtgcctatgtatacagattctgaaccgaggcaggaggttccaatgtacaccgactccgaacctcgccaggaagttcccatgtatactggcagtgagcctcgtcaggaagtgccgatgtacactggacccgaaagtcggcaggaggtgccaatgtacaccggtcccgaaagtcgccaggaagtgctcatccggacggaccccgaatctaggcaggagatcatgtgcaccgggcatgaaagtaaacaggaggtgccaatttgcacagaccccatcagtaaacaagaggactctatgtgcactcatgcggaaatcaatcagaagctgccagtggcaacagatttcgagttcaaactggaagctctcatgtgcaccaatcctgagatcaaacaggaagatcctactaatgtgggcccagaagttaagcagcaggttacgatggtgagcgacactgagattctgaaggtagccaggacccaccacgtgcaggcagaatcctacctggtttacaacattatgtccagcggagagattgagtgcagcaatacgcttgaagatgagctagatcaggcactaccttcccaggcgttcatatacaggcctatccgccaaagagtgtattccctgctcctggaagactgtcaggacgttacctcaacctgcttggccgttaaggagtggtttgtgtacccagggaatcctctgagacacccagacctcgtacgaccactacaaatgacaatcccaggcggtacaccgagtctaaagatcctctggctaaaccaagaacctgagatccaggttaggagactggacaccctgctggcttgcttcaatctgagttcgtccagagaggaacttcaggccgtggagtctcctttccaagccctctgttgcctccttatctacctctttgtgcaagtggacacattatgcctggaggaccttcatgctttcatcgctcaggctctgtgcctgcagggaaaatccacttctcagctcgtgaatctgcagcccgattacatcaacccacgggctgtgcaattgggcagtttgttggttcgagggttgaccaccctcgtgcttgtgaactccgcctgcggttttccatggaagacctcagatttcatgccgtggaacgtctttgatggcaaactatttcatcagaaataccttcaaagcgaaaaggggtacgccgttgaagtcctactagagcagaatcgcagcagactgaccaaattccataaccttaaggccgtggtgtgcaaggcctgcatgaaggagaaccggcgaataacaggtcgagcacactgggggagtcaccatgcgggacgctggggccgtcagggctcctcgtaccacagaacaggcagtgggtattctaggtcatcccagggccaaccttggcgagaccagggacccggatcacgacagtatgagcacgatcaatggagaaggtattag

SEQ ID NO: 104684 - DNA, 2802 bp, Artificial Sequence
  derived and/or modified sequence
atgttcggccccagaggcagcaccagcgccggcgccggcagaaaggagatcctgagcagaagcagcgtgatgggcgtgagaggcctgcagggcttcgtgggcagcacctgcccccacatctgcaccgtggtgaacttcaaggagctggccgagcaccacagaagcaagtaccccggctgcacccccaccatcgtggtggacgccatgtgctgcctgagatactggtacacccccgagagctggatctgcggcggccagtggagagagtacttcagcgccctgagagacttcgtgaagaccttcaccgccgccggcatcaagctgatcttcttcttcgacggcatggtggagcaggacaagagagacgagtgggtgaagagaagactgaagaacaacagagagatcagcagaatcttccactacatcaagagccacaaggagcagcccggcagaaacatgttcttcatccccagcggcctggccgtgttcaccagattcgccctgaagaccctgggccaggagaccctgtgcagcctgcaggaggccgactacgaggtggccagctacggcctgcagcacaactgcctgggcatcctgggcgaggacaccgactacctgatctacgacacctgcccctacttcagcatcagcgagctgtgcctggagagcctggacaccgtgatgctgtgcagagagaagctgtgcgagagcctgggcctgtgcgtggccgacctgcccctgctggcctgcctgctgggcaacgacatcatccccgagggcatgttcgagagcttcagatacaagtgcctgagcagctacaccagcgtgaaggagaacttcgacaagaagggcaacatcatcctggccgtgagcgaccacatcagcaaggtgctgtacctgtaccagggcgagaagaagctggaggagatcctgcccctgggccccaacaaggccctgttctacaagggcatggccagctacctgctgcccggccagaagagcccctggttcttccagaagcccaagggcgtgatcaccctggacaagcaggtgatcagcaccagcagcgacgccgagagcagagaggaggtgcccatgtgcagcgacgccgagagcagacaggaggtgcccatgtgcaccggccccgagagcagaagagaggtgcccgtgtacaccgacagcgagcccagacaggaggtgcccatgtgcagcgaccccgagcccagacaggaggtgcccacctgcaccggccccgagagcagaagagaggtgcccatgtgcagcgaccccgagcccagacaggaggtgcccatgtgcaccggccccgaggccagacaggaggtgcccatgtacaccgacagcgagcccagacaggaggtgcccatgtacaccgacagcgagcccagacaggaggtgcccatgtacaccggcagcgagcccagacaggaggtgcccatgtacaccggccccgagagcagacaggaggtgcccatgtacaccggccccgagagcagacaggaggtgctgatcagaaccgaccccgagagcagacaggagatcatgtgcaccggccacgagagcaagcaggaggtgcccatctgcaccgaccccatcagcaagcaggaggacagcatgtgcacccacgccgagatcaaccagaagctgcccgtggccaccgacttcgagttcaagctggaggccctgatgtgcaccaaccccgagatcaagcaggaggaccccaccaacgtgggccccgaggtgaagcagcaggtgaccatggtgagcgacaccgagatcctgaaggtggccagaacccaccacgtgcaggccgagagctacctggtgtacaacatcatgagcagcggcgagatcgagtgcagcaacaccctggaggacgagctggaccaggccctgcccagccaggccttcatctacagacccatcagacagagagtgtacagcctgctgctggaggactgccaggacgtgaccagcacctgcctggccgtgaaggagtggttcgtgtaccccggcaaccccctgagacaccccgacctggtgagacccctgcagatgaccatccccggcggcacccccagcctgaagatcctgtggctgaaccaggagcccgagatccaggtgagaagactggacaccctgctggcctgcttcaacctgagcagcagcagagaggagctgcaggccgtggagagccccttccaggccctgtgctgcctgctgatctacctgttcgtgcaggtggacaccctgtgcctggaggacctgcacgccttcatcgcccaggccctgtgcctgcagggcaagagcaccagccagctggtgaacctgcagcccgactacatcaaccccagagccgtgcagctgggcagcctgctggtgagaggcctgaccaccctggtgctggtgaacagcgcctgcggcttcccctggaagaccagcgacttcatgccctggaacgtgttcgacggcaagctgttccaccagaagtacctgcagagcgagaagggctacgccgtggaggtgctgctggagcagaacagaagcagactgaccaagttccacaacctgaaggccgtggtgtgcaaggcctgcatgaaggagaacagaagaatcaccggcagagcccactggggcagccaccacgccggcagatggggcagacagggcagcagctaccacagaaccggcagcggctacagcagaagcagccagggccagccctggagagaccagggccccggcagcagacagtacgagcacgaccagtggagaagatactag

SEQ ID NO: 104685 - DNA, 729 bp, Artificial Sequence
  derived and/or modified sequence
atgaccatcccaggcggcactccttccttgaaaatcctgtggctgaatcaagagccggagattcaggtacggcgtttggacactcttctagcttgtttcaatttgtcctctagcagggaggaactgcaggcggtggagtctccattccaagcactgtgctgcctcctgatttatttgttcgtgcaagtggacacactgtgcctggaggacttgcatgcatttatagcacaggcactgtgtctccaaggcaaatcaacttctcaattagtgaatttacagccagattacataaaccctcgcgccgtgcagcttggctcattgttggtgcgaggtctcaccaccctcgttctggtgaactcagcctgcggatttccctggaaaacatccgacttcatgccatggaacgtcttcgacggaaagctgtttcaccagaagtacctccagagcgaaaaagggtacgcggtggaagttctattggaacagaatagatcgcggctcaccaaattccacaacttgaaagctgttgtctgtaaggcatgtatgaaagagaaccggaggattactggtcgagctcactggggatcccaccatgctggcagatgggggcggcagggctcttcgtatcatcgcaccgggagcggttatagtaggagcagtcagggccagccttggcgtgaccaaggccccgggagcaggcaatacgagcatgaccagtggcgaagatactag

SEQ ID NO: 104686 - DNA, 729 bp, Artificial Sequence
  derived and/or modified sequence
atgaccatccctgggggcacccccagcctgaagatcctgtggctgaaccaggagcctgagatccaggtgcggcggctggacaccctgctggcctgcttcaacctgagcagcagccgggaggagctgcaggccgtggagagccccttccaggccctgtgctgcctgctgatctacctgtttgtgcaggtggacaccctgtgcctggaggacctgcacgccttcatcgcccaggccctgtgcctgcagggcaagagcaccagccagctggtgaacctgcagcctgactacatcaaccccagggctgtgcagctgggcagcctgctggtgcggggcctgaccaccctggtgctggtgaacagcgcctgtggcttcccctggaagaccagtgacttcatgccctggaatgtgtttgatggcaagctgttccaccagaagtacctgcagagcgagaagggctatgctgtggaggtgctgctggagcagaacagaagccggctgaccaagttccacaacctgaaggctgtggtgtgcaaggcctgcatgaaggaaaatcgccgcatcaccggccgggcccactggggcagccaccacgccggccgctggggccggcagggcagcagctaccacaggactggaagtggctacagccgcagcagccagggccagccctggagggaccagggccctggcagccggcagtatgaacatgaccagtggaggcgctactag

SEQ ID NO: 104687 - DNA, 729 bp, Artificial Sequence
  derived and/or modified sequence
atgaccatccccggcggcacccccagcctgaagatcctgtggctgaaccaggagcctgagattcaggttaggcggttagatacgctcttagcttgtttcaatctgtcttctagtcgggaagagctgcaggcagtcgagtcccccttccaagctctgtgctgcttgctcatttatctattcgtacaagtggacaccctgtgcctggaggacctgcacgccttcattgcccaggcgttgtgtttacaagggaaaagtacttcccagctcgttaatctgcagccagattacataaacccaagagccgttcaattaggtagtctactggtgaggggactcactaccttggtgcttgttaacagcgcttgtgggttcccgtggaagactagcgacttcatgccatggaacgtgttcgacggaaagttattccaccagaagtatctgcagtcagagaaagggtatgcagtcgaagtgttgctggagcagaacagaagtagactgacgaaatttcataatctgaaggccgtggtctgcaaggcttgtatgaaggagaaccggcggattacgggtagggctcattggggttctcatcacgctggacgatggggtaggcaaggctcctcctaccatcgaaccggatctggctattccagaagcagtcaggggcaaccctggcgcgatcagggccccggtagcaggcagtacgaacacgatcagtggcgcagatactag

SEQ ID NO: 104688 - DNA, 729 bp, Artificial Sequence
  derived and/or modified sequence
atgaccattcccggaggaaccccatcactaaagatcctctggcttaatcaggaaccggaaattcaagttaggagactcgacacactgctcgcatgttttaacctgtcgagtagtcgcgaagagcttcaggctgtggaaagtcccttccaagctctgtgctgcctattgatttacttattcgtgcaagtggatactctgtgtttggaggacctccacgcctttatcgcccaggcactctgtcttcagggcaagagcacctctcaactggtcaacctgcagccagactatatcaatcccagggccgtgcagctgggttctctgctcgtgaggggcctgaccacactcgtcctggtcaattccgcgtgtggattcccatggaagaccagtgatttcatgccttggaatgtcttcgacgggaagctgtttcatcagaaataccttcagtcagagaaaggatacgccgttgaggtgctgctggagcaaaaccgtagcagactcactaagttccataatttgaaagccgtcgtatgcaaggcctgcatgaaggaaaatagaaggatcacggggagagcccactggggatctcaccacgcaggacgctggggtaggcaggggtccagctaccaccgaaccggctctggctacagtcggtccagccagggccagccctggcgcgatcagggccctggatcccggcagtacgagcacgatcagtggaggagatactag

SEQ ID NO: 104689 - DNA, 729 bp, Artificial Sequence
  derived and/or modified sequence
atgaccatccccggcggcacccccagcctgaagatcctgtggctgaaccaggagcccgagatccaggtgagaagactggacaccctgctggcctgcttcaacctgagcagcagcagagaggagctgcaggccgtggagagccccttccaggccctgtgctgcctgctgatctacctgttcgtgcaggtggacaccctgtgcctggaggacctgcacgccttcatcgcccaggccctgtgcctgcagggcaagagcaccagccagctggtgaacctgcagcccgactacatcaaccccagagccgtgcagctgggcagcctgctggtgagaggcctgaccaccctggtgctggtgaacagcgcctgcggcttcccctggaagaccagcgacttcatgccctggaacgtgttcgacggcaagctgttccaccagaagtacctgcagagcgagaagggctacgccgtggaggtgctgctggagcagaacagaagcagactgaccaagttccacaacctgaaggccgtggtgtgcaaggcctgcatgaaggagaacagaagaatcaccggcagagcccactggggcagccaccacgccggcagatggggcagacagggcagcagctaccacagaaccggcagcggctacagcagaagcagccagggccagccctggagagaccagggccccggcagcagacagtacgagcacgaccagtggagaagatactag

SEQ ID NO: 104690 - protein, 211 aa, Artificial Sequence
  derived and/or modified sequence
MKQQQWCGMTAKMGTVLSGVFTIMAVDMYLIFEQKHLGNGSCTEITPKYRGASNIINNFIICWSFKIVLFLSFITILISCFLLYSVYAQIFRGLVIYIVWIFFYETANVVIQILTNNDFDIKEVRIMRWFGLVSRTVMHCFWMFFVINYAHITYKNRSQGNIISYKRRISTAEILHSRNKRLSISSGFSGSHLESQYFERQRRCSGKTSIK

SEQ ID NO: 104691 - DNA, 636 bp, Artificial Sequence
  derived and/or modified sequence
atgaagcagcagcagtggtgcggcatgaccgccaagatgggcaccgtgctgagcggcgtgttcaccatcatggccgtggacatgtacctgatcttcgagcagaagcacctgggcaacggcagctgcaccgagatcacccccaagtacagaggcgccagcaacatcatcaacaacttcatcatctgctggagcttcaagatcgtgctgttcctgagcttcatcaccatcctgatcagctgcttcctgctgtacagcgtgtacgcccagatcttcagaggcctggtgatctacatcgtgtggatcttcttctacgagaccgccaacgtggtgatccagatcctgaccaacaacgacttcgacatcaaggaggtgagaatcatgagatggttcggcctggtgagcagaaccgtgatgcactgcttctggatgttcttcgtgatcaactacgcccacatcacctacaagaacagaagccagggcaacatcatcagctacaagagaagaatcagcaccgccgagatcctgcacagcagaaacaagagactgagcatcagcagcggcttcagcggcagccacctggagagccagtacttcgagagacagagaagatgcagcggcaagaccagcatcaagtag

SEQ ID NO: 104692 - DNA, 636 bp, Artificial Sequence
  derived and/or modified sequence
atgaagcagcaacagtggtgtgggatgaccgccaagatgggaactgttctcagcggagttttcacaatcatggctgtggacatgtacctgatatttgagcaaaaacatcttgggaacggctcctgcacagagattactcctaagtaccggggagcttcaaatattataaataacttcattatctgttggagcttcaaaatcgtactgtttctgtctttcataaccatcttaattagctgcttcctcctgtactcagtatatgcacagattttccgaggactggtgatttacattgtttggatttttttctatgagacggcaaatgtggtcattcagattctcactaacaacgacttcgacattaaggaagtgaggattatgaggtggtttggcttagtgtcaaggaccgttatgcactgcttctggatgttttttgtcattaactatgcccatatcacctataaaaataggtcacagggtaacattatatcttataaaaggcgcatttccacagcagagatcctacattctaggaataagcgtctctccatctccagcggattttccggtagtcacctggagagccagtacttcgaacggcagcgtaggtgttcaggaaagacatcgataaagtag

SEQ ID NO: 104693 - DNA, 636 bp, Artificial Sequence
  derived and/or modified sequence
atgaagcagcagcagtggtgtggcatgacagccaagatgggcaccgtgctgagcggggtcttcaccatcatggctgtggacatgtacctgatctttgagcagaagcacctgggcaatggcagctgcacagagatcacccccaagtacagaggagccagcaacatcatcaacaacttcatcatctgctggagcttcaagatcgtgctcttcctgtccttcatcaccatcctgatcagctgcttcctgctgtacagcgtgtatgcccagatcttccggggcctggtgatctacatcgtgtggatcttcttctatgaaacagccaacgtggtgatccagatcctgaccaacaatgactttgacatcaaggaggtgcgcatcatgcgctggtttggcctggtgtccaggacagtgatgcactgcttctggatgttctttgtgatcaactatgcccacatcacctacaagaacagaagccagggcaacatcatctcctacaagaggcgcatcagcacagctgagatcctgcacagcaggaacaagaggctgagcatcagcagcggcttcagcggcagccacctggagagccagtactttgagcggcagaggcgctgcagcggcaagaccagcatcaagtag

SEQ ID NO: 104694 - DNA, 636 bp, Artificial Sequence
  derived and/or modified sequence
atgaagcagcagcagtggtgcggcatgaccgccaagatgggcaccgtgctcagcggtgtcttcaccatcatggccgttgacatgtatctgatttttgaacagaagcacctggggaatgggagttgtactgagatcaccccgaagtatcggggggctagcaatattattaacaacttcatcatctgttggtcgttcaagatcgtcttattcctgtcctttattaccatccttattagctgtttcctcctatattctgtgtatgctcaaatcttccgggggcttgtgatttacatcgtctggatcttcttttacgagaccgccaacgttgtgatacaaatccttactaacaacgattttgatattaaggaggtgcggatcatgaggtggttcggtctggtctccagaacagtgatgcactgtttctggatgttttttgttatcaactatgcccatataacatataaaaatagatcacaaggcaacattattagttataaaaggcggatatccacagcagagatccttcactcccggaataagaggctgtccatcagcagcgggttttccggcagccatttggagtcccagtatttcgaacgccaaaggcgctgctctggcaagacatccatcaagtag

SEQ ID NO: 104695 - DNA, 636 bp, Artificial Sequence
  derived and/or modified sequence
atgaagcagcagcagtggtgcgggatgaccgccaagatgggaactgtgttatctggcgtgtttacaatcatggccgtggatatgtacttgatctttgagcagaaacacctcgggaacggctcttgtacagaaatcacacctaagtatagaggtgcttccaacatcattaacaattttatcatttgttggagcttcaagatcgtcctcttcctgtcatttatcacaattctcatttcatgtttccttctttactccgtgtacgcccagatcttcagagggctggttatttacatcgtctggatattcttttatgagaccgccaatgtcgttatacagattctcaccaacaatgacttcgacattaaggaagtccgcatcatgagatggtttggtcttgtgagtagaactgtgatgcactgcttctggatgttttttgtgatcaattacgcacatatcacttataagaaccgaagtcagggaaacatcatctcctataaacgacggatctctaccgccgagattctccacagcaggaacaaaagattgagcattagctccgggttcagtggatcacacctggagtcgcagtattttgaacgtcaaagaagatgctctggaaagacctccatcaaatag

SEQ ID NO: 104696 - DNA, 1489 bp, Artificial Sequence
  derived and/or modified sequence
ttggacgagccgagaggcggggctcaaagttcctacccgcgagagggaagaagcaggaggtctcagcatgaaacagcagcagtggtgtgggatgactgccaaaatgggcaccgtgttgtcaggggtcttcaccatcatggccgtagacatgtatctcatctttgaacagaagcacctagggaatggcagttgcactgagatcacaccaaagtacaggggtgcaagtaacatcataaataacttcatcatctgctggagttttaaaatcgtcctcttcctgtctttcatcaccatcctcatcagctgcttcctcctgtactcagtgtatgcccagatcttcaggggcctggtcatctacattgtctggatttttttctatgaaactgcaaacgtcgtaatacaaatcctcaccaacaatgactttgacattaaagaggtcagaatcatgcgctggtttggcttggtgtctcgtacagtcatgcactgtttctggatgttctttgtcatcaactatgcccacataacctacaaaaaccggagccagggcaatataatttcctacaagagacgaatttctacagcggagattctccacagcagaaataaaagattatcaatttcgagtgggttcagtggctcacacctggaatcccagtactttgagaggcagaggaggtgctctggtaaaacaagtataaaatgaatgtcaggatgttctccctcatggtgggcatcttctctgtccttaataccacccagttcttcatctttgacctgaaccagaagacacacatttgctatgaggccaagttcagcatctacgtggactcaaagtcggagctagtcacttggaccctgttccacagggctaatatcagcactggcctctccctcaccaccatcatcatcggctgcttcctcttttattgtatccacaagaatatctacatggggctgctgatctatgccatgtggatcatcacttacgagctcatcaacttctccatagtcctgctcctcaacgggatcatcaaagatcacttcaagacgctgagttatttgcactggatcttccaaatctcacacatgctcctgcactttttctgtctgcccttcatcgtcaagcatgcatacaacctttacaaggaatcccagactgtgggcaggaaacgccgccacaggctctgctccaccattgcagtgaactcatgactacctgtccgtctgggaatgttgtaccggaagttaaactgaaccatgccagatgccaggaaaggtgggagggaatggtgttcctcaacaatggaaccctccctaccctgcctgtcttctgttgatgctgcttggtttgtcagggcttttgagttttacgcactgaggaatgattctcgggagagggcaggttgtgcggatcaattattttacagatgtgttgtgtgacttgttttagcagttaatgatatgtggccttgtgcttacttaaccatct

SEQ ID NO: 104697 - protein, 546 aa, Artificial Sequence
  derived and/or modified sequence
MRCLAPRPAGSYLSEPQGSSQCATMELGPLEGGYLELLNSDADPLCLYHFYDQMDLAGEEEIELYSEPDTDTINCDQFSRLLCDMEGDEETREAYANIAELDQYVFQDSQLEGLSKDIFKHIGPDEVIGESMEMPAEVGQKSQKRPFPEELPADLKHWKPVPFSSSSLSCLNLPEGPIQFVPTISTLPHGLWQISEAGTGVSSIFIYHGEVPQASQVPPPSGFTVHGLPTSPDRPGSTSPFAPSATDLPSMPEPALTSRANMTEHKTSPTQCPAAGEVSNKLPKWPGLAWSPCLGLRPSLHRAALSDTVALWESLQQHGETKLLQAAEEKFTIEPFKAKSLKDVEDLGKLVQTQRTRSSSEDTAGELPAVRDLKKLEFALGPVSGPQAFPKLVRILTAFSSLQHLDLDALSENKIGDEGVSQLSATFPQLKSLETLNLSQNNITDLGAYKLAEALPSLAASLLRLSLYNNCICDVGAESLARVLPDMVSLRVMDVQYNKFTAAGAQQLAASLRRCPHVETLAMWTPTIPFSVQEHLQQQDSRISLR

SEQ ID NO: 104698 - DNA, 1641 bp, Artificial Sequence
  derived and/or modified sequence
atgcgctgcctggcccccagaccagccggatcctatctctcggaacctcagggatcttcgcagtgcgcaactatggagttaggtccactcgaaggtgggtatttggaattattgaacagcgatgcagatccgctgtgtctgtaccacttctatgaccagatggacctggccggagaggaagagatcgagctctattcagagcccgacactgataccatcaattgtgatcagttcagccggttattgtgcgacatggagggcgatgaagagactagagaagcctacgccaacattgcggagctggatcagtatgtgttccaggattctcagctggaggggttaagtaaagacatattcaagcacataggccccgacgaggtcatcggcgagtcaatggaaatgcctgccgaggtcggtcagaagtctcagaaacggccttttcctgaggagctcccagccgacttgaaacattggaagcccgtccctttttcaagctcatcactctcttgtctgaacctgccagagggcccaatccaattcgtgcctaccatctcaacacttccacatggcctgtggcaaatttcagaggcaggaacgggcgtgagcagcatcttcatataccatggcgaggtcccccaagccagtcaagttccaccaccctcagggttcacagtgcacggactacccacttctcctgaccgccccggtagtacatccccatttgctccttcagctaccgatctgccctctatgcccgagcccgccttaaccagtcgcgctaacatgaccgagcacaaaacaagccctacacaatgcccagcagctggggaggtctccaataaactgcccaagtggcctggactggcctggtccccttgtcttggactcagaccgagcctgcaccgagcagcactgagcgacactgtagctttatgggagagcctacagcagcacggggaaactaagctgctacaagctgccgaagagaaattcacaatcgaaccttttaaagctaagtcactcaaagatgttgaagatttggggaagcttgttcagactcagaggacccgaagcagttccgaagatacagcaggggaactgccagcagttagagatctgaagaaactggagtttgctctggggcccgtttccggcccccaggcattcccaaagctcgtgcgcatcctaacggctttttctagcttgcagcatctagacctcgacgctctgtcggaaaacaaaatcggcgacgagggcgtgtcccaactgtccgcaacctttcctcagcttaaatccttagaaacgctgaatctatctcagaataacatcactgatctgggagcctataaactggctgaagctctaccctcactggctgccagcttgctccgattatcactctataacaactgcatttgcgatgttggcgccgagtctctggctcgtgtgctgcccgacatggtgtcactgagggtcatggatgtgcagtacaacaaattcacagcagctggcgcacaacaattggccgcttcgcttcgccgatgcccccacgtggagactcttgctatgtggactcctactattccattttcagttcaggagcatctgcagcagcaggattcccgaatctcactgagatag

SEQ ID NO: 104699 - DNA, 1641 bp, Artificial Sequence
  derived and/or modified sequence
atgcgctgcctggcccccaggcctgctggcagctacctgtctgagccccagggcagcagccagtgtgccaccatggagctgggccccctggagggcggctacctggagctgctgaacagtgatgctgaccccctgtgcctgtaccacttctatgaccagatggacctggccggggaggaggagattgagctgtacagcgagccagacacagacaccatcaactgtgaccagttcagccggctgctgtgtgacatggagggagatgaggagacccgggaggcctatgccaacattgctgagctggaccagtatgtgttccaggacagccagctggagggcctgagcaaggacatcttcaagcacatcggcccagatgaagtcatcggggagagcatggagatgcctgctgaggtgggccagaagagccagaagaggcccttccctgaggagctgcctgctgacctgaagcactggaagcctgtgcccttcagcagcagcagcctgagctgcctgaacctgcctgagggccccatccagtttgtgcccaccatcagcaccctgccccacggcctgtggcagatcagcgaggccggcactggagtgagcagcatcttcatctaccacggggaggtgccccaggccagccaggtgcccccaccttctggcttcaccgtgcacggcctgcccaccagcccagacaggcctggcagcaccagcccctttgcccccagcgccacagacctgcccagcatgcctgagcccgccctgaccagccgggccaacatgacagagcacaagaccagccccacccagtgcccagctgctggggaggtgagcaacaagctgcccaagtggccaggcctggcctggagcccctgcctgggcctgcggcccagcctgcacagagctgccctgagtgacacagtggccctgtgggagagcctgcagcagcacggggagaccaagctgctgcaggccgctgaggagaagttcaccatcgagcccttcaaggccaagagcctgaaggatgtggaggacctgggcaagctggtgcagacccagaggaccaggagcagcagcgaggacacagctggggagctgcctgctgtgcgggacctgaagaagctggagtttgccctgggccctgtgtctggcccccaggccttccccaagctggtgcgcatcctgacagccttcagcagcctgcagcacctggacctggatgccctgtctgagaacaagattggagatgaaggagtgtcccagctgagcgccaccttcccccagctgaagagcctggagaccctgaacctgagccagaacaacatcacagacctgggcgcctacaagctggccgaggccctgcccagcctggccgccagcctgctgcggctgagcctgtacaacaactgcatctgtgatgtgggcgctgagagcctggcccgggtgctgcctgacatggtgtccctgcgggtgatggatgtgcagtacaacaagttcaccgctgctggggcccagcagctggccgccagcctgcggcgctgcccccacgtggagaccctggccatgtggacccccaccatccccttctctgtgcaggagcacctgcagcagcaggacagccgcatcagcctgaggtag

SEQ ID NO: 104700 - DNA, 1641 bp, Artificial Sequence
  derived and/or modified sequence
atgcggtgcctggccccccggcccgccggcagctacctgagcgagccacagggaagttcacagtgtgctacaatggaactgggccctctggaaggagggtacttggaactcctgaactccgacgctgacccgctgtgtctttatcacttctacgaccagatggacctcgcgggagaggaggagatcgagctatacagtgagcctgatacggacactattaactgcgatcagttcagccgactgctgtgtgatatggagggggacgaagagacgcgtgaggcttatgccaatatagccgaactcgaccaatatgtgttccaagactcgcagcttgagggtttaagtaaggatattttcaaacatattggtcctgacgaagtcattggagaatcgatggagatgccagccgaggtgggacagaaaagtcaaaagcggccattccccgaggaactaccggcagatttaaagcactggaaacccgtgcccttttccagcagcagcctcagttgcctgaacctccccgaaggaccaatacaattcgtccctacaatttctaccctcccacacggcctctggcaaatctccgaagcaggcacaggggtgagcagcatattcatttaccacggagaagtgccgcaggccagccaagtccctccacctagtggtttcacagtccacggcctcccaaccagccccgaccgccctggctcaacttctccattcgcgccctcggctaccgatctgccctctatgcccgagccagccctgacctcgagagcaaatatgaccgagcacaagacgtctccaacacagtgccccgcagctggagaggtgagtaataaactgcccaagtggcccgggctggcctggagtccttgtctcgggctgaggccttctctgcatcgagctgccctctccgatacggtcgctctttgggagtctcttcagcagcatggagaaaccaagcttctgcaggctgcggaggaaaaatttacaattgagccgtttaaggccaagtcgcttaaagacgtggaggatcttggtaaactggtgcagacacagcgaacaagatcaagttcggaggacactgctggagagctccccgccgtccgggacctgaagaagttggagttcgctttgggcccagtttccggaccccaagcgtttcccaaactcgtcaggatcctgacagcctttagcagtctccaacatctggacttagacgccttgtcggagaacaaaatcggagacgaaggtgtgtctcaattgtccgcgaccttccctcagttgaagtcattagagactcttaacctgagccagaataacataaccgatctcggtgcatataaactagctgaagctcttcctagcctggcagccagcctattaagactcagtctctacaacaactgcatctgcgatgttggagcagaaagcttagctcgagtcctgccagacatggtgtccctgagggttatggacgtgcaatataacaaatttacagcagctggagcgcaacaattggccgcatccctgcgccgctgcccccatgtggagactctagcgatgtggacgcccacaattccttttagcgttcaagagcacctacagcagcaagacagtagaattagcctccggtag

SEQ ID NO: 104701 - DNA, 1641 bp, Artificial Sequence
  derived and/or modified sequence
atgcggtgtctggctccaaggcctgccggatcctacctgtccgagccccaaggatcctctcaatgcgccaccatggagttagggcctttggaaggcggataccttgaacttttgaattctgacgccgaccccctatgcctctaccacttctatgaccagatggatctggccggtgaggaagaaatcgagctgtattcagagcccgataccgatactatcaattgtgaccagttcagcaggctactttgcgatatggagggagacgaggaaactagggaggcttatgcaaatatagcagagcttgatcagtatgtgtttcaagactcacagcttgagggactctcaaaggatatctttaagcacataggacctgatgaggtgatcggggaatctatggagatgcctgcagaagtcggccagaaatcccaaaaacgacctttcccggaggaacttcctgctgatctcaagcattggaaacccgtgccctttagctcctccagcctgagctgcctgaacctcccagagggacctattcagttcgtcccaacaattagcactctcccgcatggactgtggcagatctcagaagctgggacgggggtgtcctccatctttatctatcatggcgaggtgcctcaagcttcacaggttccaccaccctccggttttacagtccacggcctgccgaccagccccgaccggccaggctccactagccctttcgccccttcagcgacagacctcccttctatgcccgaacctgccctgaccagcagagcaaatatgaccgagcacaagaccagccctacacaatgtcccgcagccggagaggtttccaataaactccccaagtggccgggtctcgcttggtctccttgcctcggcctgagaccttccctgcaccgtgccgctttgagcgacactgtggccttgtgggagtctctgcagcagcacggggaaactaagttgctccaggccgctgaggaaaagtttaccatagaacctttcaaggcaaagtctttaaaggatgtggaggatcttggtaagctggtgcagacacagcgaactcggtcctccagcgaggacaccgccggagaattaccagcggttcgagacctcaagaagctggagttcgccttggggcctgtcagcggcccacaggcttttccaaagctggtaagaatcctcacagcctttagcagtttgcagcatctcgaccttgatgcactcagtgagaacaagatcggggatgagggtgtgagccagctttcagcaacgttcccccagttaaagagcttggagacattgaatttgtctcagaacaacatcaccgatttgggcgcttacaagcttgctgaagcacttcctagcttagccgcatcccttctgagattatccctttacaacaattgtatctgcgacgtgggggctgaatccctggctagagtactacctgacatggtcagtctaagagtgatggacgtacagtacaataagttcaccgcagctggcgctcaacagttggcagcctctctgcgcagatgtccccatgtcgaaacccttgcaatgtggacacccaccattcctttttcagtgcaggaacatctgcagcaacaagatagccgaatctccctccgctag

SEQ ID NO: 104702 - DNA, 2346 bp, Artificial Sequence
  derived and/or modified sequence
gaggctagtgatgaggctgtgtgcttctgagctgggcatccgaaggcatccttggggaagctgagggcacgaggaggggctgccagactccgggagctgctgcctggctgggattcctacacaatgcgttgcctggctccacgccctgctgggtcctacctgtcagagccccaaggcagctcacagtgtgccaccatggagttggggcccctagaaggtggctacctggagcttcttaacagcgatgctgaccccctgtgcctctaccacttctatgaccagatggacctggctggagaagaagagattgagctctactcagaacccgacacagacaccatcaactgcgaccagttcagcaggctgttgtgtgacatggaaggtgatgaagagaccagggaggcttatgccaatatcgcggaactggaccagtatgtcttccaggactcccagctggagggcctgagcaaggacattttcaagcacataggaccagatgaagtgatcggtgagagtatggagatgccagcagaagttgggcagaaaagtcagaaaagacccttcccagaggagcttccggcagacctgaagcactggaagccagtgcctttctccagttcctcgttgagctgcctgaatctccctgagggacccatccagtttgtccccaccatctccactctgccccatgggctctggcaaatctctgaggctggaacaggggtctccagtatattcatctaccatggtgaggtgccccaggccagccaagtaccccctcccagtggattcactgtccacggcctcccaacatctccagaccggccaggctccaccagccccttcgctccatcagccactgacctgcccagcatgcctgaacctgccctgacctcccgagcaaacatgacagagcacaagacgtcccccacccaatgcccggcagctggagaggtctccaacaagcttccaaaatggcctggtctagcctggtcaccgtgcctgggtctgaggccctccctccacagggctgccttgagcgacacggtggcgctgtgggagtccctgcagcagcatggggagaccaagctacttcaggcagcagaggagaagttcaccatcgagcctttcaaagccaagtccctgaaggatgtggaagacctgggaaagcttgtgcagactcagaggacgagaagttcctcggaagacacagctggggagctccctgctgttcgggacctaaagaaactggagtttgcgctgggccctgtctcaggcccccaggctttccccaaactggtgcggatcctcacggccttttcctccctgcagcatctggacctggatgcgctgagtgagaacaagatcggggacgagggtgtctcgcagctctcagccaccttcccccagctgaagtccttggaaaccctcaatctgtcccagaacaacatcactgacctgggtgcctacaaactcgccgaggccctgccttcgctcgctgcatccctgctcaggctaagcttgtacaataactgcatctgcgacgtgggagccgagagcttggctcgtgtgcttccggacatggtgtccctccgggtgatggacgtccagtacaacaagttcacggctgccggggcccagcagctcgctgccagccttcggaggtgtcctcatgtggagacgctggcgatgtggacgcccaccatcccattcagtgtccaggaacacctgcaacaacaggattcacggatcagcctgagatgatcccagctgtgctctggacaggcatgttctctgaggacactaaccacgctggaccttgaactgggtacttgtggacacagctcttctccaggctgtatcccatgagcctcagcatcctggcacccggcccctgctggttcagggttggcccctgcccggctgcggaatgaaccacatcttgctctgctgacagacacaggcccggctccaggctcctttagcgcccagttgggtggatgcctggtggcagctgcggtccacccaggagccccgaggccttctctgaaggacattgcggacagccacggccaggccagagggagtgacagaggcagccccattctgcctgcccaggcccctgccaccctggggagaaagtacttctttttttttatttttagacagagtctcactgttgcccaggctggcgtgcagtggtgcgatctgggttcactgcaacctccgcctcttgggttcaagcgattcttctgcttcagcctcccgagtagctgggactacaggcacccaccatcatgtctggctaatttttcatttttagtagagacagggttttgccatgtt

SEQ ID NO: 104703 - DNA, 1641 bp, Artificial Sequence
  derived and/or modified sequence
atgagatgcctggcccccagacccgccggcagctacctgagcgagccccagggcagcagccagtgcgccaccatggagctgggccccctggagggcggctacctggagctgctgaacagcgacgccgaccccctgtgcctgtaccacttctacgaccagatggacctggccggcgaggaggagatcgagctgtacagcgagcccgacaccgacaccatcaactgcgaccagttcagcagactgctgtgcgacatggagggcgacgaggagaccagagaggcctacgccaacatcgccgagctggaccagtacgtgttccaggacagccagctggagggcctgagcaaggacatcttcaagcacatcggccccgacgaggtgatcggcgagagcatggagatgcccgccgaggtgggccagaagagccagaagagacccttccccgaggagctgcccgccgacctgaagcactggaagcccgtgcccttcagcagcagcagcctgagctgcctgaacctgcccgagggccccatccagttcgtgcccaccatcagcaccctgccccacggcctgtggcagatcagcgaggccggcaccggcgtgagcagcatcttcatctaccacggcgaggtgccccaggccagccaggtgcccccccccagcggcttcaccgtgcacggcctgcccaccagccccgacagacccggcagcaccagccccttcgcccccagcgccaccgacctgcccagcatgcccgagcccgccctgaccagcagagccaacatgaccgagcacaagaccagccccacccagtgccccgccgccggcgaggtgagcaacaagctgcccaagtggcccggcctggcctggagcccctgcctgggcctgagacccagcctgcacagagccgccctgagcgacaccgtggccctgtgggagagcctgcagcagcacggcgagaccaagctgctgcaggccgccgaggagaagttcaccatcgagcccttcaaggccaagagcctgaaggacgtggaggacctgggcaagctggtgcagacccagagaaccagaagcagcagcgaggacaccgccggcgagctgcccgccgtgagagacctgaagaagctggagttcgccctgggccccgtgagcggcccccaggccttccccaagctggtgagaatcctgaccgccttcagcagcctgcagcacctggacctggacgccctgagcgagaacaagatcggcgacgagggcgtgagccagctgagcgccaccttcccccagctgaagagcctggagaccctgaacctgagccagaacaacatcaccgacctgggcgcctacaagctggccgaggccctgcccagcctggccgccagcctgctgagactgagcctgtacaacaactgcatctgcgacgtgggcgccgagagcctggccagagtgctgcccgacatggtgagcctgagagtgatggacgtgcagtacaacaagttcaccgccgccggcgcccagcagctggccgccagcctgagaagatgcccccacgtggagaccctggccatgtggacccccaccatccccttcagcgtgcaggagcacctgcagcagcaggacagcagaatcagcctgagatag

SEQ ID NO: 104704 - protein, 411 aa, Artificial Sequence
  derived and/or modified sequence
MDKLDANVSSEEGFGSVEKVVLLTFLSTVILMAILGNLLVMVAVCWDRQLRKIKTNYFIVSLAFADLLVSVLVMPFGAIELVQDIWIYGEVFCLVRTSLDVLLTTASIFHLCCISLDRYYAICCQPLVYRNKMTPLRIALMLGGCWVIPTFISFLPIMQGWNNIGIIDLIEKRKFNQNSNSTYCVFMVNKPYAITCSVVAFYIPFLLMVLAYYRIYVTAKEHAHQIQMLQRAGASSESRPQSADQHSTHRMRTETKAAKTLCIIMGCFCLCWAPFFVTNIVDPFIDYTVPGQVWTAFLWLGYINSGLNPFLYAFLNKSFRRAFLIILCCDDERYRRPSILGQTVPCSTTTINGSTHVLSSGTETDRKKLWNKEEKIDQTIQMPKRKRKKKASLSYEDLILLGRKSCFREGK

SEQ ID NO: 104705 - DNA, 1236 bp, Artificial Sequence
  derived and/or modified sequence
atggacaaacttgacgccaatgttagctctgaggaggggtttggctctgtggagaaggtggttctccttacatttctctcgaccgtgattctcatggcgatcttgggcaacctgcttgtgatggtggccgtatgctgggaccgccagctgagaaaaattaagaccaactatttcattgtgagtttggcattcgcggatctgttagtgagtgtgttggtgatgccctttggagcgattgagctagttcaggacatctggatctatggtgaggtgttttgcttagttcgcacaagtctcgacgtgctactgactaccgcttccatcttccacctttgttgtattagcctggaccggtattatgccatttgttgtcaaccccttgtgtaccgtaataagatgactcctctgcggatcgctctgatgctcggaggctgctgggtgatcccaacctttatctccttcttacccattatgcagggttggaataacataggtatcattgacctgatcgaaaagcggaagttcaatcagaactccaatagcacctattgcgtgtttatggtaaacaaaccatatgcaatcacctgttcagtggtggccttttacattccctttctgctgatggtgctggcatactaccgcatctacgtgaccgcgaaggagcatgcccaccaaatacaaatgctacagagggcgggcgcctcatctgaatcaaggccacaatcggccgaccaacacagcacacatcgaatgcgaaccgagaccaaagctgcaaaaacactatgcattatcatgggatgtttctgtctatgctgggctcccttctttgtgacaaacattgtggatccattcatcgactataccgtgccgggccaagtttggactgcctttctatggttaggctatataaattccggtcttaatcccttcctgtacgccttcttgaataagtctttccgccgcgcattcctgataattctgtgctgcgatgacgagcgctatcgacggcccagcatcctcgggcagaccgttccttgctcaactacgaccatcaacggctctacccatgtgctgagcagtgggacagaaacagaccgcaagaaactgtggaataaggaggagaaaatcgaccagacaatccagatgccaaaacgaaagaggaagaagaaagcctcattatcttacgaggatctcattctgctggggcgcaagtcctgtttcagagaggggaagtag

SEQ ID NO: 104706 - DNA, 1236 bp, Artificial Sequence
  derived and/or modified sequence
atggacaagctggatgccaacgtgagcagcgaggagggcttcggctctgtggagaaggtggtgctgctgaccttcctgagcaccgtcatcctgatggccatcctgggcaacctgctggtgatggtggccgtgtgctgggaccggcagctgaggaagatcaagaccaactacttcatcgtgtccctggcctttgctgacctgctggtgtctgtgctggtgatgccctttggagccatcgagctggtgcaggacatctggatctacggggaggtgttctgcctggtgaggaccagcctggatgtgctgctgaccacagccagcatcttccacctgtgctgcatcagcctggaccgctactatgccatctgctgccagcccctggtgtacagaaacaagatgacccccctgcgcatcgccctgatgctgggcggctgctgggtgatccccaccttcatctccttcctgcccatcatgcagggctggaacaacatcggcatcatcgacctgattgagaagaggaagttcaaccagaacagcaacagcacctactgtgtgttcatggtgaacaagccctatgccatcacctgcagcgtggtggccttctacatccccttcctgctgatggtgctggcctactaccgcatctacgtgacagccaaggagcacgcccaccagatccagatgctgcagagagctggggccagcagcgagagccggccccagagcgctgaccagcacagcacccacaggatgaggacagagaccaaggccgccaagaccctgtgcatcatcatgggctgcttctgcctgtgctgggcccccttctttgtgaccaacatcgtggaccccttcatcgactacacagtgcccggccaggtgtggacagccttcctgtggctgggctacatcaacagcggcctgaaccccttcctgtatgccttcctgaacaagagcttccggcgggccttcctgatcatcctgtgctgtgatgatgagcgctacagaagacccagcatcctgggccagacagtgccctgcagcaccaccaccatcaatggcagcacccacgtgctgagcagcggcacagaaacagacaggaagaagctgtggaacaaggaggagaagattgaccagaccatccagatgcccaagaggaagaggaagaagaaggccagcctgtcctatgaggacctgatcctgctgggcaggaagagctgcttccgggagggcaagtag

SEQ ID NO: 104707 - DNA, 1236 bp, Artificial Sequence
  derived and/or modified sequence
atggacaagctggacgccaacgtgagcagcgaggagggcttcggcagcgtagaaaaggtcgtgctactgactttcttaagtactgtaattctgatggctattctgggcaacctgttagtaatggtggctgtttgctgggacaggcagctgcgcaaaatcaaaaccaactatttcattgtcagtctcgcgtttgccgacctcctggtcagcgtgctcgtcatgccatttggcgccatcgaacttgtgcaggacatctggatttacggagaggtgttctgccttgtgagaacctctttggatgtgttattgactacggcctctatcttccatctttgctgtatcagtttggaccgctattatgcgatttgttgccagcctttggtgtaccggaacaaaatgactcccctgcgcatagcccttatgctcggcggctgctgggtgatccctacttttatctccttcctgcccattatgcaagggtggaataatatcggtatcatagatttaattgaaaagaggaaatttaatcagaattctaacagcacatactgtgtgttcatggtcaataagccttacgcgattacctgttctgtagtggcgttttacatccccttcctacttatggtcctcgcttattatcgcatctatgtgacagccaaggagcacgcccatcagatccagatgctacaacgagctggggcatcctcggagtcccgcccacagagcgccgaccagcactcaacacataggatgcgcacagaaaccaaagcggctaaaacactatgtatcattatgggctgtttctgcttgtgctgggcacctttcttcgtgactaatatagtagatccttttatagactacacagtgccaggccaggtgtggacagcttttctatggctgggatacatcaattctgggctgaatccattcttatatgctttcttgaacaagtcttttcgacgggcctttttgattattctgtgctgcgatgacgagcgataccggcggcctagcatcctcggccagacagtcccctgcagcaccactaccattaatggatccacacacgttctctcctcagggaccgagaccgaccgcaaaaaattatggaacaaggaggaaaagattgaccaaactatccaaatgccaaaacgaaagcgtaagaagaaggcctcactatcctacgaagacctgattctcctgggcaggaaatcatgtttccgggaggggaagtag

SEQ ID NO: 104708 - DNA, 1236 bp, Artificial Sequence
  derived and/or modified sequence
atggataagttggatgctaacgtgtcatcagaagaagggtttggctctgtggagaaggttgtgctgttaactttcttgagcaccgtgatcctgatggccatactgggtaacttactggtaatggtggccgtttgctgggaccggcagctgcgcaagattaaaacgaactatttcatagtgagcttagctttcgcggacttgttggtcagcgttctggtcatgccattcggcgctatcgagctggtgcaggatatttggatatatggggaggtattctgcctcgttcggacttccctggatgtgctgctaactaccgcctctattttccatctctgttgcatcagtttggacagatattatgccatctgctgtcagccactcgtttacagaaacaagatgaccccactcagaattgctctcatgttaggaggctgctgggtaatccccacctttatctcctttctgcctatcatgcagggctggaataatatcgggattattgacctcattgagaaaaggaagttcaatcaaaactcaaattcaacatattgcgtctttatggtgaataagccgtacgctattacgtgctcggttgtcgcattttacatcccatttctcctcatggtgctcgcatattaccgtatctatgtaaccgccaaagagcatgctcatcagatccagatgctacagagagccggagccagctccgagagccgcccacagtcagccgatcaacatagcacccatcgaatgcgcacagagaccaaagctgccaagaccctgtgcataattatggggtgcttctgcttgtgctgggctccctttttcgtaactaatattgttgatccttttatcgactatacggtgccaggtcaggtctggacggcttttctgtggctgggatacatcaattccgggctcaacccattcttgtatgctttccttaacaagagctttcggagggctttcctcattattctgtgttgcgatgatgaaaggtacaggcgcccatcaatcctgggccagactgtgccctgtagtacaactaccatcaacgggagcacccatgtactgagctcgggcaccgagactgacaggaaaaagttgtggaacaaagaggaaaagattgaccagaccattcagatgccaaagcgcaagaggaaaaaaaaagcctcccttagctatgaagacttaattctgctgggaaggaaatcctgctttcgagagggcaagtag

SEQ ID NO: 104709 - DNA, 1236 bp, Artificial Sequence
  derived and/or modified sequence
atggacaaacttgatgctaatgtgagttctgaggagggtttcgggtcagtggagaaggtggtgctgctcacgtttctctcgacggttatcctgatggccatcttggggaacctgctggtgatggtggctgtgtgctgggacaggcagctcaggaaaataaaaacaaattatttcattgtatctcttgcttttgcggatctgctggtttcggtgctggtgatgccctttggtgccattgagctggttcaagacatctggatttatggggaggtgttttgtcttgttcggacatctctggacgtcctgctcacaacggcatcgatttttcacctgtgctgcatttctctggataggtattacgccatctgctgccagcctttggtctataggaacaagatgacccctctgcgcatcgcattaatgctgggaggctgctgggtcatccccacgtttatttcttttctccctataatgcaaggctggaataacattggcataattgatttgatagaaaagaggaagttcaaccagaactctaactctacgtactgtgtcttcatggtcaacaagccctacgccatcacctgctctgtggtggccttctacatcccatttctcctcatggtgctggcctattaccgcatctatgtcacagctaaggagcatgcccatcagatccagatgttacaacgggcaggagcctcctccgagagcaggcctcagtcggcagaccagcatagcactcatcgcatgaggacagagaccaaagcagccaagaccctgtgcatcatcatgggttgcttctgcctctgctgggcaccattctttgtcaccaatattgtggatcctttcatagactacactgtccctgggcaggtgtggactgctttcctctggctcggctatatcaattccgggttgaacccttttctctacgccttcttgaataagtcttttagacgtgccttcctcatcatcctctgctgtgatgatgagcgctaccgaagaccttccattctgggccagactgtcccttgttcaaccacaaccattaatggatccacacatgtactaagttctggaactgaaaccgacaggaagaaactttggaataaggaagagaagattgaccaaaccatccaaatgccaaaaagaaaaagaaaaaaaaaagcctctctgtcctatgaagacttaattctgttggggagaaagtcatgttttagggaaggaaaatag

SEQ ID NO: 104710 - DNA, 1236 bp, Artificial Sequence
  derived and/or modified sequence
atggacaagctggacgccaacgtgagcagcgaggagggcttcggcagcgtggagaaggtggtgctgctgaccttcctgagcaccgtgatcctgatggccatcctgggcaacctgctggtgatggtggccgtgtgctgggacagacagctgagaaagatcaagaccaactacttcatcgtgagcctggccttcgccgacctgctggtgagcgtgctggtgatgcccttcggcgccatcgagctggtgcaggacatctggatctacggcgaggtgttctgcctggtgagaaccagcctggacgtgctgctgaccaccgccagcatcttccacctgtgctgcatcagcctggacagatactacgccatctgctgccagcccctggtgtacagaaacaagatgacccccctgagaatcgccctgatgctgggcggctgctgggtgatccccaccttcatcagcttcctgcccatcatgcagggctggaacaacatcggcatcatcgacctgatcgagaagagaaagttcaaccagaacagcaacagcacctactgcgtgttcatggtgaacaagccctacgccatcacctgcagcgtggtggccttctacatccccttcctgctgatggtgctggcctactacagaatctacgtgaccgccaaggagcacgcccaccagatccagatgctgcagagagccggcgccagcagcgagagcagaccccagagcgccgaccagcacagcacccacagaatgagaaccgagaccaaggccgccaagaccctgtgcatcatcatgggctgcttctgcctgtgctgggcccccttcttcgtgaccaacatcgtggaccccttcatcgactacaccgtgcccggccaggtgtggaccgccttcctgtggctgggctacatcaacagcggcctgaaccccttcctgtacgccttcctgaacaagagcttcagaagagccttcctgatcatcctgtgctgcgacgacgagagatacagaagacccagcatcctgggccagaccgtgccctgcagcaccaccaccatcaacggcagcacccacgtgctgagcagcggcaccgagaccgacagaaagaagctgtggaacaaggaggagaagatcgaccagaccatccagatgcccaagagaaagagaaagaagaaggccagcctgagctacgaggacctgatcctgctgggcagaaagagctgcttcagagagggcaagtag

SEQ ID NO: 104711 - DNA, 1927 bp, Artificial Sequence
  derived and/or modified sequence
atggaatctacctgcgggccttctgcacagggctggattctgttttgcagccttatcgccaagcactgcttgatttggaacaagagttcctgggtgatccccatctctccatatcacatgtcaactacttcctagaccagttccagcttctttttccctctgtgatggttgtagtagaacaaattaaaagtcaaaagattcatggttgtcaaatcctggaaacagtctacaaacacagctgtggggggttgcctcctgttcgaagtgcactggaaaaaatcctggccgtttgtcatggggtcatgtataaacagctctcagcctggatgctccatggactcctcttggaccagcatgaagaattctttatcaaacaggggccatcttctggtaatgtcagtgcccagccagaagaggacgaggaggatctgggcattgggggactgacaggaaaacaactgagagaactgcaggacttgcgcctgattgaggaagagaacatgctggcaccatctctgaagcagttttccctacgagtggagattttgccatcctacattccagtgagggttgctgaaaaaatcctatttgttggagaatctgtccagatgtttgagaatcaaaatgtgaacctgactagaaaaggatccattttgaaaaaccaggaagacacttttgctgcagagctgcaccgtctcaagcagcagccactcttcagcttggtggactttgaacaggtggtggatcgcattcgcagcactgtggctgagcatctctggaagttgatggtagaagaatccgatttactgggtcagctgaagatcattaaagacttttaccttctgggacgtggagaactgtttcaggccttcattgacacagctcaacacatgttgaaaacaccacccactgcagtaactgagcatgatgtgaatgtggcctttcaacagtcagcacacaaggtattgctagatgatgacaaccttctccctctgttgcacttgacaatcgagtatcacggaaaggagcacaaagcagatgctactcaggcaagagaagggccttctcgggaaacttctccccgggaagcccctgcatctggctgggcagccctaggtctttcctacaaagtacagtggccactacatattctcttcaccccagctgtcctggaaaaaaatagacaattttaaaaaccaaacagaatgggactgtcttctgcaagcctacctacaaacaggtacaatgttgtttttaagtacttactgagtgtgcgccgggtgcaagctgagctgcagcactgctgggccctacaaatgcagcgcaagcacctcaagtcgaaccagactgatgcaatcaagtggcgcctaagaaatcacatggcatttttggtggataatcttcagtactatctccaggtagatgtgttggagtctcagttctcccagctgcttcatcagatcaattctacccgagactttgaaagcatccgattggctcatgaccacttcctgagcaatttgctggctcaatcctttatcctattgaaacctgtgtttcactgcctgaatgaaatcctagatctctgtcacagtttttgttcgctggtcagtcagaacctaggcccactggatgagcgtggagccgcccagctgagcattctcgtgaagggctttagccgccagtcttcactcctgttcaagattctctccagtgttcggaatcatcagatcaactcagatttggctcaactactgttacgactagattataacaaatactatacccaggctggtggaactctgggcagtttcgggatgtgaaaatttctggctcataaattgaaataacagccacgttcccaaggttgtaacagaagattcaaaacatcccattctagccacacacaaataaatatctgcggctt

SEQ ID NO: 104712 - protein, 141 aa, Artificial Sequence
  derived and/or modified sequence
MSEEKPKEGVKTENDHINLKVAGQDGSVVQFKIKRHTPLSKLMKAYCERQVRHLAPPQSLPVCALVLCVPGIPRARASRGWTQMQLPEGLSMRQIRFRFDGQPINETDTPAQLEMEDEDTIDVFQQQTGGVPESSLAGHSF

SEQ ID NO: 104713 - DNA, 426 bp, Artificial Sequence
  derived and/or modified sequence
atgagtgaggagaagccaaaagaaggagtcaaaaccgagaacgatcatatcaaccttaaggttgctggccaggatggtagcgtagtgcagtttaagatcaagcgtcacaccccattatctaagctgatgaaggcctattgcgagcggcaggtccgccacctggcccctcctcagtccctcccagtgtgcgctctggtactgtgcgtgccaggaattccgcgggctcgggcctccaggggctggacccaaatgcagctccctgaaggcctgtcgatgcgccagatcaggtttcgcttcgacggccagcctattaacgagaccgatactcctgcccaactggaaatggaggacgaagataccatcgacgtattccagcagcagacaggcggcgtaccagagagcagcctggccggacactcattttag

SEQ ID NO: 104714 - DNA, 426 bp, Artificial Sequence
  derived and/or modified sequence
atgtctgaggagaagcccaaggagggcgtgaagacagaaaatgaccacatcaacctgaaggtggccggccaggacggctctgtggtgcagttcaagatcaagaggcacacccccctgagcaagctgatgaaggcctactgtgagcggcaggtgcgccacctggccccaccccagagcctgcctgtgtgtgccctggtgctgtgtgtgcccggcatcccccgggcccgggccagccggggctggacccagatgcagctgcctgagggcctgtccatgaggcagatccgcttccgctttgatggccagcccatcaatgaaacagacaccccagcccagctggagatggaggatgaggacaccattgatgtgttccagcagcagacaggaggagtgcctgagagcagcctggccggccacagcttctag

SEQ ID NO: 104715 - DNA, 426 bp, Artificial Sequence
  derived and/or modified sequence
atgagcgaggagaagcccaaggagggcgtgaagaccgagaacgaccatatcaacctcaaggttgcaggacaggacggatccgtcgtgcagtttaagataaaaagacacaccccactatctaagctcatgaaagcctactgtgaacggcaagttcggcatctggcccccccacaaagccttccggtgtgcgctctggtgctttgcgtgccgggaatccctcgggctagagctagtaggggctggactcagatgcagctccctgagggtctgtcaatgcgtcagattcggtttaggtttgatggacagccaatcaacgaaacagatacacctgcccaactcgaaatggaggacgaggacactatcgacgtattccaacagcaaactggaggtgtgcccgagagtagtctggccgggcactcattttag

SEQ ID NO: 104716 - DNA, 426 bp, Artificial Sequence
  derived and/or modified sequence
atgtcagaggaaaagcctaaagagggcgtgaagaccgaaaatgatcacatcaatttaaaggtggcgggtcaggatggctccgttgtgcagtttaaaatcaagcggcacacccctttgtccaaactcatgaaggcttattgtgagcgacaggttagacatctcgctcctccacagtccctccccgtgtgcgctctggtcttgtgcgtacctggcatacccagggccagggctagtagggggtggacacaaatgcagctgcccgagggtttgtccatgaggcaaattcggttccgctttgatggccaacccattaatgagaccgacacacctgctcagctggagatggaggacgaagacactatcgatgtatttcagcagcagacaggcggagtgcctgaatcttccttagctggtcattccttctag

SEQ ID NO: 104717 - DNA, 831 bp, Artificial Sequence
  derived and/or modified sequence
ataaagcgcggccccgcgcacagttgcggcgggagagcggcggggccgagagcgtgactcgcccgctccgcgctgcttcccccgcgccgcctccccgcgccgctcgcgcagccatgtccgaggagaagcccaaggagggtgtgaagacagagaatgaccacatcaacctgaaggtggccgggcaggacggctccgtggtgcagttcaagatcaagaggcacacgccgctgagcaagctgatgaaggcctactgcgagaggcaggtgcggcaccttgctcccccgcagagcctccccgtgtgcgcactggtcctgtgcgttccaggcatccccagagcacgagcgtctcggggctggacccagatgcagctgcccgagggcttgtcaatgaggcagatcagattcaggttcgacgggcagccaatcaatgaaactgacactccagcacagctggagatggaggacgaggacaccatcgacgtgttccagcagcagacgggaggtgtgccggagagcagcctggcagggcacagtttctagagggcccgtccccagcccgggccgtccatcctcgcattgctgttgaatggtgagcacgtgaccatgccgaccacaaaggtgtctgcggaaactcgaggacattcaccacgatgattttcctctctttgatgtacttcaagtgcaactcaaaactatatctgcagggatgaatctgtaacttaaattgggccaatcagaattgttatctttgttcaggtaaaatgagttgcaagatattgtgggtacttttgtgtgctcatttgtgttttccccccctcctacaacatttttt

SEQ ID NO: 104718 - DNA, 426 bp, Artificial Sequence
  derived and/or modified sequence
atgagcgaggagaagcccaaggagggcgtgaagaccgagaacgaccacatcaacctgaaggtggccggccaggacggcagcgtggtgcagttcaagatcaagagacacacccccctgagcaagctgatgaaggcctactgcgagagacaggtgagacacctggcccccccccagagcctgcccgtgtgcgccctggtgctgtgcgtgcccggcatccccagagccagagccagcagaggctggacccagatgcagctgcccgagggcctgagcatgagacagatcagattcagattcgacggccagcccatcaacgagaccgacacccccgcccagctggagatggaggacgaggacaccatcgacgtgttccagcagcagaccggcggcgtgcccgagagcagcctggccggccacagcttctag

SEQ ID NO: 104719 - protein, 574 aa, Artificial Sequence
  derived and/or modified sequence
MAHNKIPPRWLNCPRRGQPVAGRFLPLKTMLGPRYDSQVAEENRFHPSMLSNYLKSLKVKMGLLVDLTNTSRFYDRNDIEKEGIKYIKLQCKGHGECPTTENTETFIRLCERFNERNPPELIGVHCTHGFNRTGFLICAFLVEKMDWSIEAAVATFAQARPPGIYKGDYLKELFRRYGDIEEAPPPPLLPDWCFEDDEDEDEDEDGKKESEPGSSASFGKRRKERLKLGAIFLEGVTVKGVTQVTTQPKLGEVQQKCHQFCGWEGSGFPGAQPVSMDKQNIKLLDLKPYKVSWKADGTRYMMLIDGTNEVFMIDRDNSVFHVSNLEFPFRKDLRMHLSNTLLDGEMIIDRVNGQAVPRYLIYDIIKFNSQPVGDCDFNVRLQCIEREIISPRHEKMKTGLIDKTQEPFSVRNKPFFDICTSRKKYKPGRCDDILKWKPPSLNSVDFRLKITRMGGEGLLPQNVGLLYVGGYERPFAQIKVTKELKQYDNKIIECKFENNSWVFMRQRTDKSFPNAYNTAMAVCNSISNPVTKEMLFEFIDRCTAASQGQKRKHHLDPDTELMPPPPPKRPRPLT

SEQ ID NO: 104720 - DNA, 1725 bp, Artificial Sequence
  derived and/or modified sequence
atggcccacaacaaaatacccccgaggtggttaaactgtccacgtcgcggccagcctgtggctggtcgatttcttccccttaaaaccatgctcggcccacggtacgatagccaagtggctgaagagaatcgctttcaccccagcatgttatcgaactatctgaaaagcttgaaagtaaagatgggcctgctggtggatctgaccaacacatctcgcttctatgaccgcaatgacattgagaaggaaggtatcaagtatatcaaactacaatgtaagggacatggcgagtgccccaccaccgaaaacactgaaaccttcattcggctgtgtgaaaggttcaacgagagaaacccgccagaactgattggtgttcactgcactcacgggttcaatcggacagggtttctcatctgtgcgttcctggtggaaaagatggactggtctatcgaagcagcagttgccaccttcgctcaggcccgtcctcccggaatatataaaggagactatctgaaagagctgttccgaagatacggtgacatcgaagaggctccaccccctcccctgttgcccgactggtgcttcgaagatgacgaagatgaagacgaggatgaggatgggaaaaaggaatccgagcctggaagttcagctagctttggcaaaagacggaaggagagactgaaactcggtgctatatttctggagggggttaccgtgaaaggagtgacccaagtgacgactcaaccgaaactgggcgaagtccagcagaagtgtcatcagttttgcgggtgggagggctcgggattcccgggcgctcagcccgtttccatggacaagcagaacattaagttgctggatctgaaaccatataaagtcagttggaaagccgatgggaccaggtacatgatgctgatcgacgggacaaacgaggtgttcatgattgatcgcgacaacagtgtttttcacgtatccaacttggaattcccatttagaaaagacttaaggatgcatttgtctaacactctgctagacggggaaatgatcatagatcgcgtcaacggccaagcggtccctagatatctgatctatgatataataaaattcaactcgcagcctgttggggattgtgactttaacgttagacttcagtgcatcgagcgtgagatcatcagcccccgacacgaaaagatgaagacaggtttgattgataagactcaggagcctttttccgtccggaacaaaccttttttcgatatttgtacaagccggaagaagtataagcccggacggtgtgatgatatactcaaatggaaaccgccctctttgaattctgttgactttcggctcaagatcacacggatggggggggaagggctgttgccacagaacgttggacttctttatgtcggaggatacgagagaccattcgcccagatcaaagtgactaaggaactcaaacagtacgacaacaaaatcatcgaatgtaagttcgagaataattcctgggtgttcatgcgccagagaaccgacaagagctttcctaatgcatataacaccgctatggctgtgtgcaactctattagcaacccagtaacaaaagaaatgctctttgaatttattgatagatgcaccgctgcatctcagggccagaagagaaaacatcacttagatccagacacggagttgatgcccccaccgcctccaaaaagacctaggccattgacctag

SEQ ID NO: 104721 - DNA, 1725 bp, Artificial Sequence
  derived and/or modified sequence
atggcccacaacaagatccccccacgctggctgaactgcccccggcggggccagcctgtggccggccgcttcctgcccctgaagaccatgctgggccccaggtatgacagccaggtggccgaggagaaccgcttccaccccagcatgctgagcaactacctgaagagcctgaaggtgaagatgggcctgctggtggacctgaccaacaccagccgcttctatgacagaaatgacatcgagaaggagggcatcaagtacatcaagctgcagtgcaagggccacggggagtgccccaccacagaaaatacagagaccttcatccggctgtgtgagcgcttcaatgaaagaaaccccccagagctgattggagtgcactgcacccacggcttcaacagaacaggcttcctgatctgtgccttcctggtggagaagatggactggagcattgaagctgctgtggccacctttgcccaggcccggcccccaggcatctacaagggggactacctgaaggagctgttcagaagatatggagacatcgaggaggcccctcctccacccctgctgcctgactggtgctttgaagatgatgaagatgaagatgaagatgaagatggcaagaaggagagcgagcccggcagcagcgccagctttgggaagaggaggaaggagcggctgaagctgggcgccatcttcctggagggcgtgacagtgaagggcgtgacccaggtgaccacccagcccaagctgggggaggtgcagcagaagtgccaccagttctgtggctgggagggcagcggcttccctggggcccagcctgtgtccatggacaagcagaacatcaagctgctggacctgaagccctacaaggtgtcctggaaggcagatggcacccgctacatgatgctgattgatggcaccaatgaggtgttcatgattgaccgggacaacagcgtcttccacgtgagcaacctggagttccccttcaggaaggacctgaggatgcacctgagcaacaccctgctggatggagagatgatcatcgacagagtgaatggccaggccgtgccccgctacctgatctatgacatcatcaagttcaacagccagcctgtgggggactgtgacttcaacgtgcggctgcagtgcatcgagcgggagatcatcagccccaggcatgagaagatgaagacaggcctgattgacaagacccaggagcccttctctgtgaggaacaagcccttctttgacatctgcaccagcaggaagaagtacaagccaggccgctgtgatgacatcctgaagtggaagccacccagcctgaacagcgtggacttccggctgaagatcaccaggatgggcggggagggcctgctgccccagaatgtgggcctgctgtatgtgggcggctatgagcggccctttgcccagatcaaggtgaccaaggagctgaagcagtatgacaacaagatcatcgagtgcaagtttgagaacaacagctgggtgttcatgaggcagaggacagacaagagcttccccaatgcctacaacacagccatggctgtgtgcaacagcatcagcaaccctgtgaccaaggagatgctgtttgagttcatcgaccgctgcacagctgccagccagggccagaagaggaagcaccacctggaccctgacacagagctgatgcctcctcctccacccaagaggccccggcccctgacctag

SEQ ID NO: 104722 - DNA, 1725 bp, Artificial Sequence
  derived and/or modified sequence
atggcccacaacaagatccccccccggtggctgaactgcccccggcgcggtcaacctgtcgcaggtcgcttcctacctctaaagacaatgctaggaccccggtacgattctcaggtagccgaagagaaccgtttccacccgagcatgctctccaattatctgaagtcgctgaaggtcaaaatgggtcttctcgtggacttaacaaatacgagccggttctacgaccggaatgatattgagaaggaaggtataaagtacatcaaacttcagtgcaaaggacacggggaatgcccaacaaccgaaaacacggagacttttattagactttgcgagcgcttcaacgagcgcaatccccctgaactgataggggttcattgcacccacggctttaatcgtactgggtttctcatttgcgcattcctggtcgagaagatggactggtcaattgaggccgccgtggcaacatttgcacaggcccgcccccctggaatttacaaaggcgattatcttaaggaattgttccggcgatatggtgacattgaagaggccccccctccccccctgctgcccgattggtgcttcgaagatgacgaagacgaagatgaagatgaagatgggaaaaaggaatccgaacccggttcatcagcctcctttgggaagcgccgcaaggaacgactgaaactgggtgccatcttccttgagggcgtgacagtcaaaggcgtgacccaggtaaccacgcagcccaaactgggagaagtccaacagaagtgccaccaattttgcggatgggaggggagcggctttcctggggctcagcctgtctcaatggataaacaaaatattaagctgctggatcttaagccttacaaagtgagctggaaggcagacggtactaggtatatgatgctgatagatggcacgaacgaggtttttatgatagacagggataacagcgttttccatgtgtccaatttggaattccccttcaggaaagacctgcggatgcatttaagtaatacacttctggatggggagatgataattgacagagtaaacggtcaggcagtccctcgatacctgatttatgacattatcaagttcaactcgcaacccgtgggagactgtgatttcaatgttcggcttcaatgcattgaaagggagatcattagtccgcgtcatgaaaagatgaagacaggcttaattgacaaaacgcaggagccttttagtgtacgcaataagccctttttcgacatttgtacctcaaggaagaagtataagcccggccgctgtgacgacatcctcaaatggaaacctccctctcttaacagcgtggatttcagactgaagataacaagaatgggcggcgagggactactgccccagaacgttggcctcttatacgtgggaggatacgagcgcccctttgcccagatcaaggtgaccaaagagttaaagcaatatgataacaagattattgaatgcaagttcgagaacaatagctgggtgttcatgcggcaacgaacagataagtccttccccaacgcctacaacaccgccatggcggtttgtaactccatttcaaaccctgttactaaggagatgcttttcgagttcattgataggtgtacagcagcttctcagggccagaagagaaagcatcatctcgaccccgacacagaactgatgcccccccctccacctaagagaccgcggcccctgacctag

SEQ ID NO: 104723 - DNA, 1725 bp, Artificial Sequence
  derived and/or modified sequence
atggcgcataataaaattccgcctcggtggctcaattgtccgcgtcgtgggcagcccgtggccggtcgcttcttacccctgaaaactatgcttggtccacggtatgactcccaagtagctgaggagaacagattccatccaagcatgttgtccaactatttaaagtccctcaaagtcaagatgggcttgttagtggacctgactaatacttcacggttctacgacaggaacgacattgagaaggagggaattaagtacataaagcttcaatgcaagggtcatggtgaatgccccactactgagaacacagagacctttatacggctgtgcgagcggttcaatgagaggaacccacccgaactgattggagtgcattgtacccatggcttcaaccgcacagggttcctgatctgtgcattcctggttgaaaaaatggactggtccattgaagcggcagttgctacattcgcccaggcaaggcctccgggtatctacaagggcgattacttgaaggaactgttcagaagatacggcgatattgaagaggccccaccaccaccattgttgcccgattggtgctttgaggacgacgaagatgaagatgaggacgaggacggaaaaaaggagtcagagccaggcagctctgctagctttggaaaacgacggaaagagcgacttaagctgggtgccatctttttggaaggggtcaccgtaaaaggtgtcacccaggttactacccaacctaagctcggggaggtgcagcaaaaatgccaccagttttgcggctgggagggtagcggatttcctggggctcagcccgtatccatggataagcagaatatcaagctgctggatctcaagccatacaaagtgagctggaaagctgacgggaccagatacatgatgctgatcgacggtacgaatgaggtgttcatgattgatcgggacaacagtgtcttccatgtgtccaatctagaatttcccttccgtaaagatctgcggatgcacctgtccaatactctcttggatggggaaatgattattgaccgcgtaaacggtcaggccgtgcctagatatcttatctatgatataatcaagttcaactcacagcctgtgggagactgcgattttaatgtgagactacaatgtattgaaagagagatcatttcaccacgacacgaaaagatgaagaccggattgatcgacaaaacgcaagagccattcagcgtgagaaataagccattcttcgacatttgcacctccaggaaaaagtacaaacccggtcgctgtgatgatattctgaaatggaaacctcctagtttaaacagtgtagattttcggttaaaaataactcggatgggcggtgagggccttttacctcagaacgtaggactgttgtacgttggaggctatgaaaggccttttgcgcagattaaagtgactaaagagctcaagcaatacgataataagatcatcgaatgtaagttcgaaaacaactcatgggtattcatgcgacagcgcactgataaaagcttcccaaatgcctataacaccgccatggccgtgtgcaacagtatctcgaaccccgtcactaaagaaatgctctttgaattcattgatagatgcacagccgctagtcagggacagaaacggaaacatcatctggatcctgacacagagctgatgcctcccccacctccaaaaagaccacgacccttaacttag

SEQ ID NO: 104724 - DNA, 4394 bp, Artificial Sequence
  derived and/or modified sequence
gaagttgcggtgcattgtgggttctcctggagctgtggagttgatcctgaatgaaagtggcgcgccgcccctgacgttacccggatcggagaggttggaattcagattacggctgcgattcgggtgtctcggaccccggtgtgcaccggaccacggggaggcggctccaaaggcgcggtgaacgttggtgagggagggcagctctgcgcagccccaagacatggctcacaacaagatcccgccgcggtggctgaactgtccccggcgcggccagccggtggcaggaagattcttacctctgaagacaatgttaggaccaagatatgatagtcaagttgctgaagaaaatcggttccatcccagcatgctctcaaattacctaaagagcctaaaggttaaaatgggcttgttggtggacctgacaaatacttcaaggttctatgaccgaaatgacatagaaaaagaaggaatcaaatatataaaacttcagtgtaaaggacatggtgagtgccctaccactgagaatactgagacctttattcgtctgtgtgagcggtttaatgaaagaaatccacctgaacttataggtgttcattgtactcatggcttcaatcgcactggtttcctcatatgtgcctttttggtggagaaaatggattggagtatcgaagcagcagttgctacttttgcccaagccagaccaccaggaatctacaagggtgattatttgaaggaactttttcgtcggtatggtgacatagaggaagcaccacccccacctctattgccagattggtgttttgaggatgatgaagacgaagatgaggatgaggatggaaagaaggaatcagaacccgggtcaagtgcttcttttggcaaaaggagaaaagaacggttaaaactgggcgctattttcttggaaggtgttactgttaaaggtgtaactcaagtaacaacacaaccaaagttaggagaggtacagcagaagtgtcatcaattctgtggctgggaagggtctggattccctggagcacagcctgtttccatggacaagcaaaatattaaacttttagacctgaagccatacaaagtaagctggaaagcagatggtactcggtacatgatgttgattgatggcacaaatgaagtttttatgattgatagagacaattcagtatttcatgtttcaaatctggaatttccatttcgtaaagatcttcgtatgcatttatcaaatactctcttggatggcgagatgattattgacagagtaaatggacaggctgttcctagatatttgatatatgacataattaaattcaattcacagcccgttggagattgtgattttaatgttcgtctgcagtgtatagaacgagaaattataagtcctcgacacgaaaaaatgaagactgggctcattgacaaaacacaggaaccatttagcgtcagaaataagccgttttttgacatctgtacttcaagaaagaaatacaaacctggtcgatgtgatgatattttgaaatggaagcctcccagtctgaattctgtggattttcgtctaaaaataacaagaatgggaggagaagggttacttcctcagaatgttggcctcctgtatgttggaggttatgaaagaccctttgcacaaatcaaggtgacaaaagagctgaaacagtatgacaacaaaattatagaatgcaaatttgagaacaacagctgggtcttcatgagacagagaacagacaaaagttttcctaatgcctacaacactgccatggctgtgtgtaacagcatctcaaaccctgtcaccaaggagatgctgtttgagttcatcgacagatgtactgcagcttctcaaggacagaagcgaaaacatcatctggaccctgacacggagctcatgccaccaccacctcccaaaagaccacgccctttaacctaagacctgcctgtgacttgagggttaagaagaaagaggaatgaggaaaaaacgctgttgcccatttttgtagccagagaaattgaaaaacgactgtggcttgatgttgatacacatttgaattttttttaaaaaaagaaagttatcgtagccagcctgtaaatacttgatgcattcgtttcctcagtgctgcaatacatcgtggacttaaacatcttatttatctgataaactcagccttaccttgtggaatctgaagattgaaatatccaaaggtttaaacaagatggaaatcaatgaaaaagaggccttgtttatatatgggtagcttcacatttaatttataaagttaacaatctggaaactgtgagcccataaaacagtattttttagaagttgtgttacaactgtagcaaattttccttttaaaaaatccaggcaatggcattaaacattcttgctatcatttaccatggatttcctacatttctgagatccctgtattcaaaaacaaatgacagggttgttaagttgtactatattaaacaacttggtctggtttatatcattttaacaagttttttggaaatgtaaaagaaaaaagtaaagctccatttttgtgaattgcattgtttctaaaggaagtattttgagtattttcatctgtttgtattgtttcgactatgatatcagatatccagtgtgtccattctggcagtggttttgagttacttcatggaacttggacatacaccaccaggtcctttatgtgttgttctcctgggagacttctttttttaaatgccagggctacttctgctttacctcagtggtatcagcacattgtaaattacgttaaaacacacaactcactgtgatctatgggagtgatatcaaatacaaacgatgttgtgttccttctctcgaacaaaacagcaaagggaatgccagctaacttctttgattagaaggtaatgtcatggaatagaatgctgtcaccagaaaatgctctcccactgctagataaatgcagaggcaaagtgtagacatctgtaggaactaaatatcaaggaaatcaagacatttattttcaaagcgagaattctatctacattctattctgcggatgttatttctgttatacatctgaattttaaaatgtttactgatagataatggatttaaagggcggctaattgattgtctgccattgttgataaactgttctaattggtttgtgaaagaactctgagaattagctaaatggaggctagtgtatttatttttagaggtacatgttttaagtaaatgtatttaaaacaaattttcatggtctgaattgtatatgtaaatgcatatctgtgtaagtatatgcaagtgtatattcttctactgattcagtcagacacgaaatccaactgaattacccggtagactgaatatctgacgggatttctatatggacatagcacagatgaaccaaaaatgtatttatattcacctgagttttaatgtttttaaacaaagttttctcctgcagtgcttttctatatgaaatagttgagtcaagcttgggcttttttcttcgttgttcccaagtcatgtaatgtatagtgaatttatccaaaacgccattgtaacgttttttactagagtgtttttgcacatttgggcgctaaagggattaaaacaactgatgccacaatgactattgaaggagggaaaattctcaaggttccatagtatcttttacaaaatggattaaaaaaaaaatgcctatgcaacttcaaatagtctgatgcctgcttccccaggacgagtgactcttccacggtgtgctgctttccctccgagcctgtggaaaggcagagcccttttgcagatacgaaagcaagcttttgccaatgatctttaatggagttaaaatgtttatggtaattgtaacctttcaaatgagttacgtgaaaagagcatctcacttttaatacacccagatattttcttcaagtctttgtgcattttagcaggacttaattttcttaatttattctttcctttcaattatagtgacatagagtagttggccttataagtagatcccatttagcccctgaacataataccatctgcagtattataaaagtcatttagaaggtcagggggataatctagaggcaggattttggacattgtgaaggaaatgtgctccttctcagctcacttcaataactattttctgagactgaagttttttagacaagaataagaaaactttgctttcttcagttatcacatgtgaaagcttttgctttttgttaggaaaaggtgtggatgactctactgcgtggatggttacatttgctttccgtgaaatgctcagaaaatgtcaggacattccttttccaattgtgtgtcagtgcgtattgtaataaaactactgatttaaattagc

SEQ ID NO: 104725 - DNA, 2180 bp, Artificial Sequence
  derived and/or modified sequence
gcattgtgggttctcctggagctgtggagttgatcctgaatgaaagtggcgcgccgcccctgacgttacccggatcggagaggttggaattcagattacggctgcgattcgggtgtctcggaccccggtgtgcaccggaccacggggaggcggctccaaaggcgcggtgaacgttggtgagggagggcagctctgcgcagccccaagacatggctcacaacaagatcccgccgcggtggctgaactgtccccggcgcggccagccggtggcaggttaaaatgggcttgttggtggacctgacaaatacttcaaggttctatgaccgaaatgacatagaaaaagaaggaatcaaatatataaaacttcagtgtaaaggacatggtgagtgccctaccactgagaatactgagacctttattcgtctgtgtgagcggtttaatgaaagaaatccacctgaacttataggtgttcattgtactcatggcttcaatcgcactggtttcctcatatgtgcctttttggtggagaaaatggattggagtatcgaagcagcagttgctacttttgcccaagccagaccaccaggaatctacaagggtgattatttgaaggaactttttcgtcggtatggtgacatagaggaagcaccacccccacctctattgccagattggtgttttgaggatgatgaagacgaagatgaggatgaggatggaaagaaggaatcagaacccgggtcaagtgcttcttttggcaaaaggagaaaagaacggttaaaactgggcgctattttcttggaaggtgttactgttaaaggtgtaactcaagtaacaacacaaccaaagttaggagaggtacagcagaagtgtcatcaattctgtggctgggaagggtctggattccctggagcacagcctgtttccatggacaagcaaaatattaaacttttagacctgaagccatacaaagtaagctggaaagcagatggtactcggtacatgatgttgattgatggcacaaatgaagtttttatgattgatagagacaattcagtatttcatgtttcaaatctggaatttccatttcgtaaagatcttcgtatgcatttatcaaatactctcttggatggcgagatgattattgacagagtaaatggacaggctgttcctagatatttgatatatgacataattaaattcaattcacagcccgttggagattgtgattttaatgttcgtctgcagtgtatagaacgagaaattataagtcctcgacacgaaaaaatgaagactgggctcattgacaaaacacaggaaccatttagcgtcagaaataagccgttttttgacatctgtacttcaagaaagaaatacaaacctggtcgatgtgatgatattttgaaatggaagcctcccagtctgaattctgtggattttcgtctaaaaataacaagaatgggaggagaagggttacttcctcagaatgttggcctcctgtatgttggaggttatgaaagaccctttgcacaaatcaaggtgacaaaagagctgaaacagtatgacaacaaaattatagaatgcaaatttgagaacaacagctgggtcttcatgagacagagaacagacaaaagttttcctaatgcctacaacactgccatggctgtgtgtaacagcatctcaaaccctgtcaccaaggagatgctgtttgagttcatcgacagatgtactgcagcttctcaaggacagaagcgaaaacatcatctggaccctgacacggagctcatgccaccaccacctcccaaaagaccacgccctttaacctaagacctgcctgtgacttgagggttaagaagaaagaggaatgaggaaaaaacgctgttgcccatttttgtagccagagaaattgaaaaacgactgtggcttgatgttgatacacatttgaattttttttaaaaaaagaaagttatcgtagccagcctgtaaatacttgatgcattcgtttcctcagtgctgcaatacatcgtggacttaaacatcttatttatctgataaactcagccttaccttgtggaatctgaagattgaaatatccaaaggtttaaacaagatggaaatcaatgaaaaagaggccttgtttatatatgggtagcttcacatttaatttataaagttaacaatct

SEQ ID NO: 104726 - DNA, 1725 bp, Artificial Sequence
  derived and/or modified sequence
atggcccacaacaagatcccccccagatggctgaactgccccagaagaggccagcccgtggccggcagattcctgcccctgaagaccatgctgggccccagatacgacagccaggtggccgaggagaacagattccaccccagcatgctgagcaactacctgaagagcctgaaggtgaagatgggcctgctggtggacctgaccaacaccagcagattctacgacagaaacgacatcgagaaggagggcatcaagtacatcaagctgcagtgcaagggccacggcgagtgccccaccaccgagaacaccgagaccttcatcagactgtgcgagagattcaacgagagaaacccccccgagctgatcggcgtgcactgcacccacggcttcaacagaaccggcttcctgatctgcgccttcctggtggagaagatggactggagcatcgaggccgccgtggccaccttcgcccaggccagaccccccggcatctacaagggcgactacctgaaggagctgttcagaagatacggcgacatcgaggaggccccccccccccccctgctgcccgactggtgcttcgaggacgacgaggacgaggacgaggacgaggacggcaagaaggagagcgagcccggcagcagcgccagcttcggcaagagaagaaaggagagactgaagctgggcgccatcttcctggagggcgtgaccgtgaagggcgtgacccaggtgaccacccagcccaagctgggcgaggtgcagcagaagtgccaccagttctgcggctgggagggcagcggcttccccggcgcccagcccgtgagcatggacaagcagaacatcaagctgctggacctgaagccctacaaggtgagctggaaggccgacggcaccagatacatgatgctgatcgacggcaccaacgaggtgttcatgatcgacagagacaacagcgtgttccacgtgagcaacctggagttccccttcagaaaggacctgagaatgcacctgagcaacaccctgctggacggcgagatgatcatcgacagagtgaacggccaggccgtgcccagatacctgatctacgacatcatcaagttcaacagccagcccgtgggcgactgcgacttcaacgtgagactgcagtgcatcgagagagagatcatcagccccagacacgagaagatgaagaccggcctgatcgacaagacccaggagcccttcagcgtgagaaacaagcccttcttcgacatctgcaccagcagaaagaagtacaagcccggcagatgcgacgacatcctgaagtggaagccccccagcctgaacagcgtggacttcagactgaagatcaccagaatgggcggcgagggcctgctgccccagaacgtgggcctgctgtacgtgggcggctacgagagacccttcgcccagatcaaggtgaccaaggagctgaagcagtacgacaacaagatcatcgagtgcaagttcgagaacaacagctgggtgttcatgagacagagaaccgacaagagcttccccaacgcctacaacaccgccatggccgtgtgcaacagcatcagcaaccccgtgaccaaggagatgctgttcgagttcatcgacagatgcaccgccgccagccagggccagaagagaaagcaccacctggaccccgacaccgagctgatgcccccccccccccccaagagacccagacccctgacctag

SEQ ID NO: 104727 - protein, 514 aa, Artificial Sequence
  derived and/or modified sequence
MGLLVDLTNTSRFYDRNDIEKEGIKYIKLQCKGHGECPTTENTETFIRLCERFNERNPPELIGVHCTHGFNRTGFLICAFLVEKMDWSIEAAVATFAQARPPGIYKGDYLKELFRRYGDIEEAPPPPLLPDWCFEDDEDEDEDEDGKKESEPGSSASFGKRRKERLKLGAIFLEGVTVKGVTQVTTQPKLGEVQQKCHQFCGWEGSGFPGAQPVSMDKQNIKLLDLKPYKVSWKADGTRYMMLIDGTNEVFMIDRDNSVFHVSNLEFPFRKDLRMHLSNTLLDGEMIIDRVNGQAVPRYLIYDIIKFNSQPVGDCDFNVRLQCIEREIISPRHEKMKTGLIDKTQEPFSVRNKPFFDICTSRKKYKPGRCDDILKWKPPSLNSVDFRLKITRMGGEGLLPQNVGLLYVGGYERPFAQIKVTKELKQYDNKIIECKFENNSWVFMRQRTDKSFPNAYNTAMAVCNSISNPVTKEMLFEFIDRCTAASQGQKRKHHLDPDTELMPPPPPKRPRPLT

SEQ ID NO: 104728 - DNA, 1545 bp, Artificial Sequence
  derived and/or modified sequence
atgggactgcttgtggacctgaccaacacgtcacgcttctatgaccgcaacgacatagagaaagagggcattaagtacatcaaattgcagtgtaaggggcacggggagtgtccgactaccgagaacacggaaacctttatacgtttatgtgagcgcttcaacgagcgaaacccaccagagctgattggagtccactgtacacatggttttaaccggactgggttccttatttgcgctttcttggtggagaaaatggactggtccattgaggctgccgttgcgacatttgcccaggccagaccaccaggtatttataaaggagactatttgaaggaactcttcagacggtatggggacattgaagaggccccaccgcctccgctgttgccggactggtgctttgaagacgacgaggacgaagacgaagatgaggacggaaagaaggaaagcgagccaggatcaagcgcatcctttggcaaacgcagaaaggagcggttaaagctaggcgccatctttttggagggtgtcactgtgaaaggggttacccaggtcacaactcagccaaaacttggcgaggtgcagcagaaatgccatcagttctgtggttgggagggtagcggctttcctggagcccagcccgtttccatggacaagcaaaatatcaagctgcttgacctgaagccatacaaggtttcctggaaggccgacggcactcgttacatgatgcttattgacggcaccaacgaggtttttatgatcgacagagacaactccgtctttcatgtgtcgaacttagagttcccattcaggaaagaccttaggatgcatctgtctaatacactgcttgatggtgaaatgattattgatcgcgtgaacggccaggctgtacccaggtaccttatatacgacattatcaagtttaattcccaacccgtcggagattgcgacttcaacgtccggctccagtgtattgaacgtgagattatcagtccccgccacgaaaagatgaaaaccggcctcatagataaaacacaggagcctttttccgtacgaaacaaaccgttttttgatatttgtactagtaggaagaagtacaaaccagggcggtgcgatgatatcctgaagtggaagcctcctagtctgaactccgtggacttcagactaaaaattacgcgaatgggaggggagggtcttctcccccagaacgttgggctcttgtacgtgggcggttacgaacggcctttcgcgcagatcaaagttacaaaagagctcaagcagtacgataataaaattattgagtgcaagtttgaaaacaacagctgggtgttcatgcgccaaagaaccgacaaaagtttccccaacgcgtataatactgctatggccgtgtgcaactccatcagcaacccagtgaccaaggagatgcttttcgagttcatcgaccggtgtactgccgcatcgcaggggcaaaaacgcaagcaccacttagatcctgacacagagctcatgcctccacctccccccaaacggccaaggcctctgacctag

SEQ ID NO: 104729 - DNA, 1545 bp, Artificial Sequence
  derived and/or modified sequence
atgggcctgctggtggacctgaccaacaccagccgcttctatgacagaaatgacatcgagaaggagggcatcaagtacatcaagctgcagtgcaagggccacggggagtgccccaccacagaaaatacagagaccttcatccggctgtgtgagcgcttcaatgaaagaaaccccccagagctgattggagtgcactgcacccacggcttcaacagaacaggcttcctgatctgtgccttcctggtggagaagatggactggagcattgaagctgctgtggccacctttgcccaggcccggcccccaggcatctacaagggggactacctgaaggagctgttcagaagatatggagacatcgaggaggcccctcctccacccctgctgcctgactggtgctttgaagatgatgaagatgaagatgaagatgaagatggcaagaaggagagcgagcccggcagcagcgccagctttgggaagaggaggaaggagcggctgaagctgggcgccatcttcctggagggcgtgacagtgaagggcgtgacccaggtgaccacccagcccaagctgggggaggtgcagcagaagtgccaccagttctgtggctgggagggcagcggcttccctggggcccagcctgtgtccatggacaagcagaacatcaagctgctggacctgaagccctacaaggtgtcctggaaggcagatggcacccgctacatgatgctgattgatggcaccaatgaggtgttcatgattgaccgggacaacagcgtcttccacgtgagcaacctggagttccccttcaggaaggacctgaggatgcacctgagcaacaccctgctggatggagagatgatcatcgacagagtgaatggccaggccgtgccccgctacctgatctatgacatcatcaagttcaacagccagcctgtgggggactgtgacttcaacgtgcggctgcagtgcatcgagcgggagatcatcagccccaggcatgagaagatgaagacaggcctgattgacaagacccaggagcccttctctgtgaggaacaagcccttctttgacatctgcaccagcaggaagaagtacaagccaggccgctgtgatgacatcctgaagtggaagccacccagcctgaacagcgtggacttccggctgaagatcaccaggatgggcggggagggcctgctgccccagaatgtgggcctgctgtatgtgggcggctatgagcggccctttgcccagatcaaggtgaccaaggagctgaagcagtatgacaacaagatcatcgagtgcaagtttgagaacaacagctgggtgttcatgaggcagaggacagacaagagcttccccaatgcctacaacacagccatggctgtgtgcaacagcatcagcaaccctgtgaccaaggagatgctgtttgagttcatcgaccgctgcacagctgccagccagggccagaagaggaagcaccacctggaccctgacacagagctgatgcctcctcctccacccaagaggccccggcccctgacctag

SEQ ID NO: 104730 - DNA, 1545 bp, Artificial Sequence
  derived and/or modified sequence
atgggcctgctggtggacctgaccaacaccagccggttctacgaccggaatgacattgagaaggaagggataaaatatataaaacttcagtgcaagggtcacggggagtgcccaaccacagagaataccgagacttttatcagactgtgtgagaggtttaatgagcgcaaccctcctgagctgatcggggtccattgcacacatggatttaacaggaccggcttcctgatatgcgcttttctggtagaaaagatggattggagcattgaagctgcagtggccacctttgctcaggcccgacctcctggtatttacaagggagattacctgaaggaactgtttcgcagatatggcgatatagaggaagccccgccaccgcccttgcttcccgactggtgttttgaagacgatgaggatgaggatgaggatgaggacgggaagaaggagtctgagcccggatccagtgcttccttcgggaagagaaggaaagagcggcttaaactcggtgctatatttttggagggcgtgacggtgaaaggggtcactcaagtaaccacccagcccaagctaggagaggtccagcagaagtgccaccagttttgcggatgggaggggtctggattccctggcgcccagcctgtttctatggacaaacagaacattaagctactagacctgaaaccttataaagtgtcatggaaagccgacggtacacgctatatgatgttaatcgatggaacgaacgaagtgtttatgatcgatcgcgacaattccgtattccatgtgtccaatctcgagtttccttttagaaaggacctgaggatgcatctctccaataccctactcgacggcgagatgatcattgatcgtgtgaatgggcaggcggtgccaaggtacctgatatacgacattatcaagttcaattcccagcccgtaggagactgcgatttcaacgtgcgcctccagtgtattgagagggaaataataagtcccaggcacgagaagatgaagacgggcttgatcgataagacacaagaaccctttagcgtcagaaacaaaccttttttcgatatatgcacttctcggaaaaaatataagcctgggcggtgtgatgacatcctgaaatggaaacccccgagcctaaattctgtggactttcgcctcaaaatcaccaggatgggtggggaaggcctcctgccccagaacgttggcctgttgtacgtgggcggatacgaacgaccttttgctcagatcaaagtgacaaaggagctcaagcagtacgacaataagataatcgagtgcaaattcgagaataatagctgggtgttcatgagacagagaacagataagagttttcccaacgcttataataccgcaatggcggtctgtaatagcatctctaatccagtcactaaagagatgctgttcgagtttatcgacagatgcaccgctgcatctcaaggccagaagcgcaaacatcacctggatccggataccgagttgatgccgcctcccccccccaaacgcccccggcccctgacttag

SEQ ID NO: 104731 - DNA, 1545 bp, Artificial Sequence
  derived and/or modified sequence
atgggcctgctggtggacctgacaaatacttctaggttttacgatcgaaacgacatcgagaaagaaggtattaagtacattaaactccagtgcaaggggcacggcgaatgtcccactaccgagaacacagagacatttatacggctctgcgagaggtttaatgaacggaaccccccagaactgatcggagtgcattgtacccacggttttaaccggactgggttccttatttgcgctttcctggttgaaaagatggactggtccattgaggcagccgttgctacctttgcacaggcacgcccacccggaatttataagggagactatttgaaagagctgtttcgccgttatggcgacattgaagaggcgcctccacctcctctactgcctgattggtgcttcgaggacgatgaagacgaggacgaggatgaggacggaaaaaaggagtctgagccgggtagctccgcatcctttggtaaacgaaggaaagaacggctgaagctgggggcaattttccttgagggggtgaccgtgaagggggtgactcaagtgacaacacagccaaagctcggtgaggtccaacagaaatgccaccaattttgcggttgggaaggatcgggattcccaggggctcaaccagtgtccatggataagcagaatataaaactcttagacctcaagccatataaggttagctggaaagctgacggcacaaggtatatgatgcttatagatggcactaatgaagtttttatgattgatagggataacagtgtctttcatgttagcaaccttgagtttccgtttcgcaaggatcttcggatgcacctgagcaataccctgttagacggggaaatgatcatcgatagggtcaacggacaagctgttcctcgttatttgatatatgacatcataaaatttaactcccagcctgtgggtgactgtgactttaacgttaggttgcagtgtattgaacgcgaaattatttcccctcgtcatgagaaaatgaaaacggggctcatcgataagacccaggagccattttccgtgcgcaataagcccttcttcgacatctgcacctccaggaagaagtacaaacctgggcgatgtgatgacattcttaagtggaaaccaccatctttaaactctgtcgactttaggctgaaaataacccgcatggggggtgagggcctcctgcctcaaaacgtcggtttactctatgtagggggatacgaacgacctttcgcccagatcaaggtaaccaaagaacttaaacagtacgataacaagatcatcgaatgtaaatttgaaaataacagctgggttttcatgagacagagaacagataaaagtttccccaacgcctataataccgcaatggccgtctgcaactctatctcaaaccctgtgaccaaggagatgctattcgagttcatagaccgctgtactgctgcatcacagggtcaaaagagaaaacaccatttggaccccgacacagagcttatgccccctccaccacctaaacgcccacggccactgacatag

SEQ ID NO: 104732 - DNA, 1545 bp, Artificial Sequence
  derived and/or modified sequence
atgggcctgctggtggacctgaccaacaccagcagattctacgacagaaacgacatcgagaaggagggcatcaagtacatcaagctgcagtgcaagggccacggcgagtgccccaccaccgagaacaccgagaccttcatcagactgtgcgagagattcaacgagagaaacccccccgagctgatcggcgtgcactgcacccacggcttcaacagaaccggcttcctgatctgcgccttcctggtggagaagatggactggagcatcgaggccgccgtggccaccttcgcccaggccagaccccccggcatctacaagggcgactacctgaaggagctgttcagaagatacggcgacatcgaggaggccccccccccccccctgctgcccgactggtgcttcgaggacgacgaggacgaggacgaggacgaggacggcaagaaggagagcgagcccggcagcagcgccagcttcggcaagagaagaaaggagagactgaagctgggcgccatcttcctggagggcgtgaccgtgaagggcgtgacccaggtgaccacccagcccaagctgggcgaggtgcagcagaagtgccaccagttctgcggctgggagggcagcggcttccccggcgcccagcccgtgagcatggacaagcagaacatcaagctgctggacctgaagccctacaaggtgagctggaaggccgacggcaccagatacatgatgctgatcgacggcaccaacgaggtgttcatgatcgacagagacaacagcgtgttccacgtgagcaacctggagttccccttcagaaaggacctgagaatgcacctgagcaacaccctgctggacggcgagatgatcatcgacagagtgaacggccaggccgtgcccagatacctgatctacgacatcatcaagttcaacagccagcccgtgggcgactgcgacttcaacgtgagactgcagtgcatcgagagagagatcatcagccccagacacgagaagatgaagaccggcctgatcgacaagacccaggagcccttcagcgtgagaaacaagcccttcttcgacatctgcaccagcagaaagaagtacaagcccggcagatgcgacgacatcctgaagtggaagccccccagcctgaacagcgtggacttcagactgaagatcaccagaatgggcggcgagggcctgctgccccagaacgtgggcctgctgtacgtgggcggctacgagagacccttcgcccagatcaaggtgaccaaggagctgaagcagtacgacaacaagatcatcgagtgcaagttcgagaacaacagctgggtgttcatgagacagagaaccgacaagagcttccccaacgcctacaacaccgccatggccgtgtgcaacagcatcagcaaccccgtgaccaaggagatgctgttcgagttcatcgacagatgcaccgccgccagccagggccagaagagaaagcaccacctggaccccgacaccgagctgatgcccccccccccccccaagagacccagacccctgacctag

SEQ ID NO: 104733 - protein, 219 aa, Artificial Sequence
  derived and/or modified sequence
MFVSYLILTLLHVQTAVLARPGGESIGCDDYLGSDKVVDKCGVCGGDNTGCQVVSGVFKHALTSLGYHRVVEIPEGATKINITEMYKSNKKKSHLKPATRGSQFSSVKVCSVPAACKLLGTPGRARQPVPAPRELEHDKNSPHCAYLSLYLTSLAQSSWRVFSLFSYVLIYLFSKYLAFNTLFALKRMALQRDRKEKTRAWCIFIKLCGREIQILPGPV

SEQ ID NO: 104734 - protein, 658 aa, Artificial Sequence
  derived and/or modified sequence
MFVSYLILTLLHVQTAVLARPGGESIGCDDYLGSDKVVDKCGVCGGDNTGCQVVSGVFKHALTSLGYHRVVEIPEGATKINITEMYKSNNYLALRSRSGRSIINGNWAIDRPGKYEGGGTMFTYKRPNEISSTAGESFLAEGPTNEILDVYMIHQQPNPGVHYEYVIMGTNAISPQVPPHRRPGEPFNGQMVTEGRSQEEGEQKGRNEEKEDLRGEAPEMFTSESAQTFPVRHPDRFSPHRPDNLVPPAPQPPRRSRDHNWKQLGTTECSTTCGKGSQYPIFRCVHRSTHEEAPESYCDSSMKPTPEEEPCNIFPCPAFWDIGEWSECSKTCGLGMQHRQVLCRQVYANRSLTVQPYRCQHLEKPETTSTCQLKICSEWQIRTDWTSCSVPCGVGQRTRDVKCVSNIGDVVDDEECNMKLRPNDIENCDMGPCAKSWFLTEWSERCSAECGAGVRTRSVVCMTNHVSSLPLEGCGNNRPAEATPCDNGPCTGKVEWFAGSWSQCSIECGSGTQQREVICVRKNADTFEVLDPSECSFLEKPPSQQSCHLKPCGAKWFSTEWSMCSKSCQGGFRVREVRCLSDDMTLSNLCDPQLKPEERESCNPQDCVPEVDENCKDKYYNCNVVVQARLCVYNYYKTACCASCTRVANRQTGFLGSR

SEQ ID NO: 104735 - DNA, 660 bp, Artificial Sequence
  derived and/or modified sequence
atgttcgtatcatacctgatactgacccttctccacgtgcagactgccgtcctcgccagacctggtggcgagagcatcggatgcgatgactatttgggaagtgataaggtggttgataagtgtggcgtctgcggtggtgataataccggttgtcaggtagtcagcggggtgtttaagcacgccttaacttcacttgggtaccatagggttgtcgaaattccagagggtgccacgaagatcaacattacggaaatgtacaagtccaacaagaaaaagagccacttaaagcctgcgaccagaggatcccagttctcttcggtaaaagtttgcagcgtgcctgccgcttgtaagttgcttggtactcccggtcgcgcaaggcagcctgtgccggcacccagggaattagaacacgacaagaatagtccccattgtgcctatctttcgttatacttaacctctctcgctcagagcagctggcgggtgtttagtttattcagctatgtgctcatctatttgttttcaaagtacctggccttcaacacgctatttgcattaaaacggatggcgctgcagagagacaggaaagagaagactcgagcatggtgtatatttattaagctctgcggtagggagatccagatcttacccggacctgtgtag

SEQ ID NO: 104736 - DNA, 1977 bp, Artificial Sequence
  derived and/or modified sequence
atgttcgttagctatctgatcctaacgctgctacatgttcagaccgctgttttggcacggccagggggagaaagtatcggctgtgacgactaccttggttccgataaagttgtggacaagtgtggagtgtgcggaggcgacaacaccggttgccaagttgtctccggtgtgtttaaacacgccttgacctcgctcggctatcatagagtcgtcgaaattccagaaggtgctaccaagataaatattaccgagatgtataagtcgaacaattacctcgctttgaggtcccgtagtgggagatccatcattaatggcaactgggcgattgaccggccaggtaagtatgaaggagggggaaccatgtttacatataagcggcctaatgaaataagttctactgcgggagagtcctttcttgccgaggggccaaccaacgagatcctggacgtatacatgatacaccaacagcccaatcctggcgtgcactacgagtacgttatcatgggcactaacgccatctcacctcaggtgccccctcacaggcggccaggagagccgtttaacggccagatggtcacggagggcaggagtcaggaggaaggcgaacaaaagggaaggaatgaagagaaagaagacctcagaggggaagcccctgaaatgttcacatctgaatccgcgcagacattcccagtgagacaccccgatcggttctcccctcatcgtccggataacttggtgccacctgctccacagcctccacgcagaagtcgagaccataactggaagcagcttggtaccacagagtgttcaactacgtgcgggaaggggtcacagtaccccatcttcagatgtgttcatagatcaacccatgaggaggccccagagtcttattgtgactcctccatgaagcctactccggaggaggagccttgtaacatcttcccttgtcccgctttctgggacattggggagtggtccgagtgtagcaagacctgtggtcttggcatgcaacaccggcaagtgctatgtcggcaggtgtacgcaaatcggtcactgactgtgcagccttacaggtgtcaacacttggaaaagcccgagaccacctccacctgccagctcaaaatctgttccgagtggcaaattagaaccgactggacttcatgctctgtgccttgcggagtgggacagcgaactagagacgttaaatgtgtctcgaacataggcgacgtagtcgatgacgaggagtgtaacatgaagcttcgacctaacgacatagagaattgcgatatgggcccttgtgccaaatcatggttccttactgagtggtctgaacgatgttcggccgaatgcggcgcaggggtgcgaaccagatctgttgtctgtatgacaaaccacgtaagcagccttccgctggaggggtgtgggaataataggcccgctgaagccacaccttgtgacaacggtccttgtactggcaaggttgaatggtttgctggatcctggagtcagtgttcaattgaatgcgggtcaggcacccagcaacgggaagtgatttgcgtgagaaaaaacgccgatactttcgaggtgttagatccgtcagagtgctcctttctggagaagccgccatcccagcaatcgtgccatttgaaaccctgtggcgctaagtggttctccaccgagtggtcaatgtgttcaaagagctgccagggtggctttagggtgcgggaagtacgctgtttgagtgacgatatgacacttagtaacctgtgcgatccccagctaaaaccggaagaaagagaatcgtgcaacccgcaggactgcgtgcctgaggtcgatgaaaattgtaaggataagtactacaactgcaacgtggttgtccaggcaaggctctgcgtatataactattacaagaccgcatgttgcgcctcttgtacccgggtcgctaacagacagaccggattcctgggttcccggtag

SEQ ID NO: 104737 - DNA, 660 bp, Artificial Sequence
  derived and/or modified sequence
atgttcgtaagctacctcattctcactctcctccacgttcaaacagcagtgctggcgaggccaggcggagaatctatcggctgtgacgattacctcggaagtgacaaggtggtggataaatgcggcgtgtgtggaggcgataatacaggctgccaagtcgtgtccggggtgtttaagcacgccttaacaagcttggggtatcaccgtgtcgtcgaaataccagagggagcgaccaagattaatatcaccgagatgtataagagcaacaagaagaagtcccatctcaaaccagctacaaggggatcacaattcagctctgtgaaggtttgctcagtgcctgccgcgtgcaaactccttggaaccccaggtagagccagacagccagttccagcccccagagaacttgagcatgacaagaactccccccattgtgcctatttgtcactgtacctcacatcactcgcacagtcatcttggcgcgtgttctccttgttctcctatgtgctgatctatttattcagcaagtacctggcctttaatactctgtttgcattgaagcggatggccctgcagagagaccgtaaagagaagacacgcgcatggtgtatttttattaagctgtgtggaagggagatccagatcctaccagggcccgtctag

SEQ ID NO: 104738 - DNA, 1977 bp, Artificial Sequence
  derived and/or modified sequence
atgttcgtgtcttacctgatacttaccctacttcatgtgcagacagccgtcctcgcccgtcccggcggagaaagcatcggttgtgatgattatctagggtcagacaaggtcgtggataagtgtggggtgtgcggaggggataataccggctgccaggtggtgtctggagtcttcaagcacgcacttacctcactggggtaccacagggtcgtggaaatccccgagggagccaccaaaatcaacataaccgagatgtacaagagtaacaactatctcgctctccgatctcgttcaggcagatcaattatcaacgggaattgggcaattgatcggcccggaaaatatgagggaggcggcacaatgttcacttataaacgacctaacgagatatcttccacagctggagagagttttttagcagaggggcccaccaatgagatactagacgtgtatatgatccaccagcagcccaaccccggcgtccactacgaatatgttatcatgggaacaaacgcaatatcgccccaggtgccaccccacagacgtcctggcgaaccatttaacggacagatggtgaccgaaggtaggtcacaagaagagggcgagcaaaaaggacgtaatgaggaaaaagaggaccttcggggggaggcccctgagatgttcacatctgaatccgctcagacatttcccgtccgacaccctgataggttttcaccacatagaccagataatctggtgccacctgcaccccagccaccccgccggtcacgggatcacaattggaaacagctgggcaccacagagtgttctacaacatgcggaaaaggaagtcagtatcctatctttcggtgtgtacaccgatcgacacatgaagaagcaccggagagctactgtgattcatccatgaaacccacacccgaagaagagccatgtaatatttttccttgcccggcattctgggatattggcgagtggtccgaatgctctaagacttgtggcctagggatgcagcatcgccaggtcttgtgccgccaggtctacgctaaccgttcactgactgtgcagccgtacagatgccaacatttagagaaaccggaaaccaccagcacttgccagctgaagatttgctctgagtggcagattaggacagattggacctcctgttcagtgccctgtggagttgggcaaagaacccgggacgtcaaatgtgtgtccaatattggtgacgtggtcgacgatgaggagtgcaatatgaagctgaggccaaacgacattgagaactgtgatatgggtccttgcgccaagagctggttcctaaccgaatggtcagagcggtgttctgccgaatgtggtgctggggtgcggaccagatccgtggtttgtatgacgaaccacgtgtcctctctcccactggaaggctgtggcaacaaccgccccgcagaggccacaccctgtgacaacggcccatgcacaggaaaggtggaatggtttgctgggtcctggtcacagtgctcaattgaatgcggcagtggtacacagcagagggaagttatctgcgtgagaaagaacgccgataccttcgaagttctggaccccagtgaatgtagcttcctggaaaaaccaccatcccagcaatcttgccatttgaaaccttgtggggctaaatggttctctacagaatggtccatgtgtagcaagtcctgccagggcgggttcagggtacgcgaagtgcgctgtcttagcgatgacatgaccctgtcaaacctctgcgacccacaactaaagcccgaagaacgggagtcctgtaatccccaagattgtgttccggaagtagatgaaaactgtaaagataagtactataactgcaatgtagttgtccaagcacgtttatgtgtgtacaattactacaaaacagcatgttgtgcctcttgcacgcgtgtggctaacaggcaaaccgggttcctaggaagccgttag

SEQ ID NO: 104739 - DNA, 660 bp, Artificial Sequence
  derived and/or modified sequence
atgttcgtaagctacctcattctcactctcctccacgttcaaacagcagtgctggcgaggccaggcggagaatctatcggctgtgacgattacctcggaagtgacaaggtggtggataaatgcggcgtgtgtggaggcgataatacaggctgccaagtcgtgtccggggtgtttaagcacgccttaacaagcttggggtatcaccgtgtcgtcgaaataccagagggagcgaccaagattaatatcaccgagatgtataagagcaacaagaagaagtcccatctcaaaccagctacaaggggcagccagttcagcagcgtgaaagtgtgttcagtcccggccgcttgcaaactcttagggacccccggtagagccaggcaaccggttcctgcaccccgtgagctggagcacgacaaaaattctccacattgtgcctatctgtctctttatttaacgtcattagcccagtctagttggcgcgtcttctcgctgttttcttatgtcctgatctacttattctctaaatacctcgcctttaatacgctgtttgctctgaagaggatggcccttcagcgagacagaaaggagaaaactcgcgcatggtgtattttcattaagttatgtggacgagaaattcagatcctcccaggccctgtgtag

SEQ ID NO: 104740 - DNA, 1977 bp, Artificial Sequence
  derived and/or modified sequence
atgttcgtttcttacctaattctcactctgttgcacgtacagaccgctgtgctggcccgcccaggtggcgaatctattggatgcgatgattacctcggcagtgacaaggtggtcgataaatgtggagtttgcggtggcgataatacaggatgccaagtcgtaagcggagtgttcaagcacgccctgacaagtcttggttatcatcgcgtcgttgagatacctgaaggcgccactaagattaatattaccgagatgtataaaagcaataactatctcgcgctgcgtagccgctctggaaggtcaattatcaacgggaattgggcaattgatcggcccggaaaatatgagggaggcggcacaatgttcacttataaacgacctaacgagatatcttccacagctggagagagttttttagcagaggggcccaccaatgagatactagacgtgtatatgatccaccagcagcccaaccccggcgtccactacgaatatgttatcatgggaacaaacgcaatatcgccccaggtgccaccccacagacgtcctggcgaaccatttaacggacagatggtgaccgaaggtaggtcacaagaagagggcgaacagaaagggcggaatgaggaaaaggaggacttgcgtggcgaagcaccggaaatgttcacctctgaaagcgcacaaacctttccagtcagacacccagacaggttttccccacatcgaccagacaatcttgtacccccagctccacagccacctcgcaggtccagagaccataactggaagcagcttgggaccactgaatgttctacaacctgtggaaagggatcccaataccccatctttcgctgcgtgcacaggtctacacacgaggaagcacccgaatcttactgtgattcctctatgaagcccacaccagaagaggaaccatgcaatatttttccatgtccggccttttgggacatcggagaatggtcggaatgcagcaagacctgcggactgggaatgcaacataggcaggtgctgtgtcgtcaggtgtatgcgaaccgttctcttaccgtgcagccgtaccgttgtcagcatctggaaaagcccgaaacaacgtccacctgtcagctcaagatatgttctgaatggcagatccggactgattggacatcttgcagcgtaccctgtggagtaggacagagaaccagagacgtaaagtgcgtgtcgaatataggtgacgtcgtggatgacgaagaatgtaacatgaaactgagaccaaacgacatagagaattgtgatatgggaccctgcgcgaaatcctggttcctgaccgaatggtcggagaggtgttcagccgaatgtggcgctggggttcgaacccgtagcgtagtttgtatgaccaatcatgtttcttccctgcctcttgagggctgtggcaataatcgtcccgctgaagccacaccatgcgataacggcccttgtactggtaaggtcgaatggttcgccggtagctggagccagtgcagtattgagtgcgggagcggcacacagcaaagagaagttatttgtgtgaggaagaacgccgatacatttgaagttctagatcccagcgagtgttctttcctggaaaagccgccgtctcagcagagttgtcatctaaagccatgcggtgcaaaatggtttagtaccgaatggtcaatgtgtagtaaaagttgtcaaggcggatttagggtacgagaagtcagatgtttgtccgacgatatgacgttaagtaatctctgtgacccacaactgaaacctgaagagcgagagagctgcaatccacaggattgtgtgcctgaggtggacgaaaactgcaaggacaaatattataattgcaacgtggttgttcaggctcgactttgtgtatacaattattacaaaactgcctgctgcgcatcttgtacaagagtggcaaacagacaaacaggatttttaggatccagatag

SEQ ID NO: 104741 - DNA, 660 bp, Artificial Sequence
  derived and/or modified sequence
atgttcgtgagctacctgatcctgaccctgctgcacgtgcagaccgccgtgctggccagacccggcggcgagagcatcggctgcgacgactacctgggcagcgacaaggtggtggacaagtgcggcgtgtgcggcggcgacaacaccggctgccaggtggtgagcggcgtgttcaagcacgccctgaccagcctgggctaccacagagtggtggagatccccgagggcgccaccaagatcaacatcaccgagatgtacaagagcaacaagaagaagagccacctgaagcccgccaccagaggcagccagttcagcagcgtgaaggtgtgcagcgtgcccgccgcctgcaagctgctgggcacccccggcagagccagacagcccgtgcccgcccccagagagctggagcacgacaagaacagcccccactgcgcctacctgagcctgtacctgaccagcctggcccagagcagctggagagtgttcagcctgttcagctacgtgctgatctacctgttcagcaagtacctggccttcaacaccctgttcgccctgaagagaatggccctgcagagagacagaaaggagaagaccagagcctggtgcatcttcatcaagctgtgcggcagagagatccagatcctgcccggccccgtgtag

SEQ ID NO: 104742 - DNA, 1977 bp, Artificial Sequence
  derived and/or modified sequence
atgttcgtgagctacctgatcctgaccctgctgcacgtgcagaccgccgtgctggccagacccggcggcgagagcatcggctgcgacgactacctgggcagcgacaaggtggtggacaagtgcggcgtgtgcggcggcgacaacaccggctgccaggtggtgagcggcgtgttcaagcacgccctgaccagcctgggctaccacagagtggtggagatccccgagggcgccaccaagatcaacatcaccgagatgtacaagagcaacaactacctggccctgagaagcagaagcggcagaagcatcatcaacggcaactgggccatcgacagacccggcaagtacgagggcggcggcaccatgttcacctacaagagacccaacgagatcagcagcaccgccggcgagagcttcctggccgagggccccaccaacgagatcctggacgtgtacatgatccaccagcagcccaaccccggcgtgcactacgagtacgtgatcatgggcaccaacgccatcagcccccaggtgcccccccacagaagacccggcgagcccttcaacggccagatggtgaccgagggcagaagccaggaggagggcgagcagaagggcagaaacgaggagaaggaggacctgagaggcgaggcccccgagatgttcaccagcgagagcgcccagaccttccccgtgagacaccccgacagattcagcccccacagacccgacaacctggtgccccccgccccccagccccccagaagaagcagagaccacaactggaagcagctgggcaccaccgagtgcagcaccacctgcggcaagggcagccagtaccccatcttcagatgcgtgcacagaagcacccacgaggaggcccccgagagctactgcgacagcagcatgaagcccacccccgaggaggagccctgcaacatcttcccctgccccgccttctgggacatcggcgagtggagcgagtgcagcaagacctgcggcctgggcatgcagcacagacaggtgctgtgcagacaggtgtacgccaacagaagcctgaccgtgcagccctacagatgccagcacctggagaagcccgagaccaccagcacctgccagctgaagatctgcagcgagtggcagatcagaaccgactggaccagctgcagcgtgccctgcggcgtgggccagagaaccagagacgtgaagtgcgtgagcaacatcggcgacgtggtggacgacgaggagtgcaacatgaagctgagacccaacgacatcgagaactgcgacatgggcccctgcgccaagagctggttcctgaccgagtggagcgagagatgcagcgccgagtgcggcgccggcgtgagaaccagaagcgtggtgtgcatgaccaaccacgtgagcagcctgcccctggagggctgcggcaacaacagacccgccgaggccaccccctgcgacaacggcccctgcaccggcaaggtggagtggttcgccggcagctggagccagtgcagcatcgagtgcggcagcggcacccagcagagagaggtgatctgcgtgagaaagaacgccgacaccttcgaggtgctggaccccagcgagtgcagcttcctggagaagccccccagccagcagagctgccacctgaagccctgcggcgccaagtggttcagcaccgagtggagcatgtgcagcaagagctgccagggcggcttcagagtgagagaggtgagatgcctgagcgacgacatgaccctgagcaacctgtgcgacccccagctgaagcccgaggagagagagagctgcaacccccaggactgcgtgcccgaggtggacgagaactgcaaggacaagtactacaactgcaacgtggtggtgcaggccagactgtgcgtgtacaactactacaagaccgcctgctgcgccagctgcaccagagtggccaacagacagaccggcttcctgggcagcagatag

SEQ ID NO: 104743 - DNA, 660 bp, Artificial Sequence
  derived and/or modified sequence
atgttcgtgtcctatctgattctgactctgttacatgtgcagacagccgtactcgccagacccggcggggaaagtatagggtgcgacgattacctgggaagcgacaaagtggttgataagtgtggggtgtgtgggggggataatactgggtgtcaagtggtgagcggcgtattcaagcacgcattgacttctctaggataccaccgagtcgtcgagattccagagggtgctaccaagatcaacattaccgagatgtataaatctaacaaaaagaaatctcacctgaagccggcaacacgcggttctcagttctctagcgtgaaagtatgctccgtgcctgcggcatgcaagctattagggacacccgggcgggcccgccagccggtgccggccccaagagagctcgaacatgataagaattctcctcattgcgcttatctgagtctgtatcttacttcacttgctcagtccagttggcgtgtattctcactgttctcttacgtgctaatatatctcttcagcaagtatttagccttcaatacactttttgcattgaagcggatggctctacagagagatcgtaaggaaaagacacgcgcatggtgcatttttattaaactgtgtgggagggagatccagatcctgcccgggcctgtgtag

SEQ ID NO: 104744 - DNA, 1977 bp, Artificial Sequence
  derived and/or modified sequence
atgttcgtgagttatttgattctgaccctgctgcacgtgcaaaccgccgttctggctcgccccggcggagaatctataggatgtgacgactacttgggctccgataaggtggtggacaagtgcggtgtctgcggcggggacaacaccggctgccaggtggtgagcggtgtattcaaacacgcgctgacctctcttggctatcacagagttgttgaaattcctgagggggccaccaaaatcaacatcactgagatgtacaaaagtaacaattacctggcactgcgctcacggtctggccggtcaattataaacggaaattgggcaattgacagaccgggaaaatatgaagggggaggcaccatgtttacatacaagaggccgaatgagattagtagtacggctggagaatcatttttggccgagggccctacgaacgagattttagacgtgtacatgatccatcaacaacctaaccccggtgtgcattatgagtacgtgattatgggaaccaacgccatttcaccacaggtgcccccccatcggagacctggggagcctttcaacggccaaatggtgaccgagggacgctcacaggaagaaggcgagcaaaaaggacgaaacgaagagaaagaggacctgcgaggggaggcaccggaaatgttcacatctgagagtgcccagaccttccctgtgcggcacccagatcgcttcagccctcatagacccgataatttggtaccccccgcccctcagcctccaaggagatctagggatcacaactggaagcagctgggcaccaccgaatgtagtacaacctgtgggaagggcagccagtaccccatctttagatgtgtccatcgctcgactcacgaagaagcccccgaaagctattgtgactcctctatgaagcccactccggaggaggaaccttgcaacatatttccctgtccagccttctgggacataggcgaatggtcagagtgctctaaaacctgcggcctcggaatgcaacacaggcaggtcctctgcagacaagtttatgctaacaggagtttgactgtgcagccgtaccggtgccagcatctggagaaaccagagactacatcaacgtgtcagctcaagatctgttcagagtggcagatcaggaccgattggacatcatgctccgttccctgcggagtgggccagagaactcgagacgttaaatgtgtgtcaaatatcggcgatgtagtggacgatgaggagtgtaacatgaaattgcgacctaatgacatcgagaattgtgacatggggccctgcgcgaagtcatggttcctcacagaatggtccgagagatgctccgccgagtgtggggccggggtccgaactcgaagtgtcgtgtgtatgacaaatcacgtgtcctctttgcctttggaagggtgcgggaacaaccggcccgccgaagccaccccctgcgacaatgggccctgcacagggaaagtggagtggtttgccggttcctggtcccaatgctccatagaatgcggcagcggcacacagcagcgtgaagtgatttgtgtccgaaaaaacgctgacacctttgaggtgcttgacccttctgaatgctccttcctcgaaaagcccccgtcacagcagagctgccatttgaagccttgtggggcgaagtggttctcaacagagtggagcatgtgtagcaaatcttgccagggcggatttagggtgcgtgaggtccgttgcctaagcgacgatatgaccctgagtaacctgtgtgatccccagttgaagccagaggagagagagagctgcaatccccaagactgcgtgccagaagtagatgagaactgcaaggacaaatattacaattgcaacgtggtcgtccaggctcggctgtgtgtctacaactattacaaaaccgcttgttgtgcttcttgcaccagggtggctaaccggcagacgggatttctgggtagcaggtag

SEQ ID NO: 104745 - DNA, 834 bp, Artificial Sequence
  derived and/or modified sequence
agaacagaggctgagctcgaagcgccgggcagtacagtgagggagagccgagggaaccagcgcggtgcctagcggaactccagggctggaatcccgagacacaagtgcatctgctagctgttagcacttggcagacggagttctcctctagggtagttctaactttgggtaataatgtttgtcagctacctgatattaacattgctccacgttcaaacagcagtgttagcaagacctgggggagagagcattggctgtgatgactacttaggctccgacaaagtcgtggacaaatgtggggtgtgtggaggagacaacacgggctgtcaggttgtgtcgggcgtgtttaagcatgccctcaccagcctgggctaccaccgcgtcgtggagattcccgagggagccacgaaaatcaacatcacggagatgtacaagagcaacaaaaaaaaaagccatttaaagccagccactagagggagtcagttcagttccgtaaaggtatgctcagtgcccgctgcctgcaagctgttggggaccccagggagggcaaggcagcctgtccccgcccccagggaactagaacatgacaagaattctccgcactgtgcctacctgtccctttaccttacctctctggcccagagttcttggagggttttttctttattttcttatgtactcatctacttattctcaaagtatttagcattcaacactctttttgctttaaaaagaatggccttacaaagggacagaaaagagaagacacgagcttggtgtattttcatcaagttatgtggcagagaaatccagatattaccaggacctgtctaa

SEQ ID NO: 104746 - DNA, 3403 bp, Artificial Sequence
  derived and/or modified sequence
agaacagaggctgagctcgaagcgccgggcagtacagtgagggagagccgagggaaccagcgcggtgcctagcggaactccagggctggaatcccgagacacaagtgcatctgctagctgttagcacttggcagacggagttctcctctagggtagttctaactttgggtaataatgtttgtcagctacctgatattaacattgctccacgttcaaacagcagtgttagcaagacctgggggagagagcattggctgtgatgactacttaggctccgacaaagtcgtggacaaatgtggggtgtgtggaggagacaacacgggctgtcaggttgtgtcgggcgtgtttaagcatgccctcaccagcctgggctaccaccgcgtcgtggagattcccgagggagccacgaaaatcaacatcacggagatgtacaagagcaacaactatttggccctgagaagtcgttctggacgctccatcatcaatgggaactgggcaattgatcgaccaggaaaatacgagggcggagggaccatgttcacctacaagcgtccaaatgagatttcgagcactgccggagagtcctttttggcggaaggtcccaccaacgagatcttggatgtctacatgatacaccagcagccaaacccaggcgtgcactacgagtacgtgatcatggggaccaacgccatcagcccccaggtgccaccccacaggagaccaggggaacccttcaatggccagatggtgacagaaggcaggagccaggaggagggagaacagaaagggaggaacgaggagaaggaagacttgcgtggggaggcccctgagatgttcacctcagaatcggcacagaccttcccagtcaggcatccagacagattttctccccatcgaccggacaacttggtgccaccagcaccgcagcccccacggcgcagccgggatcacaactggaagcagcttgggacaacagaatgttccacgacctgtgggaaaggatcgcagtaccctattttccgctgtgtgcacagaagcactcatgaagaggctcctgagagttactgtgactccagcatgaagccgacccccgaggaggagccctgcaacatcttcccttgcccagccttctgggacatcggggagtggtctgagtgcagcaagacctgtggcctgggcatgcagcaccgccaggttctgtgccgccaggtgtacgccaaccgcagcctgacggtgcagccctaccgctgccagcacctggagaaacctgagaccaccagcacctgccaactcaagatctgcagcgagtggcagatccggaccgactggacctcgtgctcggtgccctgcggcgtgggacagaggacccgtgatgtgaagtgtgtgagcaacattggggatgtggttgacgatgaggaatgcaacatgaagctccggccgaatgacattgagaactgcgacatgggaccctgtgccaagagctggttcctcaccgagtggagcgaaaggtgctcagcggagtgtggggccggagtgcggacacgctcggtggtgtgcatgaccaaccatgtcagcagcctgcccctggagggctgtgggaacaaccggccggcagaggccaccccatgtgacaacggaccctgcacgggcaaggtggagtggtttgccgggagctggagtcagtgttccatcgagtgtgggagcgggacgcaacagagggaggtgatttgtgttagaaagaatgcagacacctttgaagtgttggacccctctgaatgttctttcctggagaaaccccccagccagcaatcctgccacctcaagccttgcggagccaaatggtttagcaccgaatggagcatgtgttccaagagctgccagggtggctttcgggtccgggaagtgcggtgtctgtctgatgacatgactctaagtaacctctgtgaccctcagttgaaaccagaagagagagaatcttgtaaccctcaggactgtgtccctgaagttgatgaaaactgcaaggacaagtactacaactgcaacgtggtggtccaggcaagactctgtgtctacaactactacaagaccgcctgctgtgcctcctgcacccgtgtggccaacaggcagacgggcttcctggggagcagataacactcctgcacccccatcagtagggcagcatcactgccttcccgggggcttcagcagtgcgcctggctggctgctgctccaccacgggccccctggcccaggcgctgccaaccaacttagtcaccacccctgcctccggtgaatgcaccccgtggtacccaggggctttttacacaagatgtttgaaagccacagtcagtcctttaagcatcaccatgtactgatgatcccctccttggacctggcatctgctaatggtgccctttgaaagtcaagcagtgggaagtacatggagctctcagccctgctcccatctggcaccttcaagtcagcagatgggccactgactgagcactgccccgtccctggtgctactggtctttctaaacttagcaccctggagagtccaaggaggcagcgcccccaacccagcgccccactaagccttgctgacacgcgtgcatccctctgtgacctcagcccagatgtgcctgttttcattctcaaagacattagactgttttcctgccctatgacacagatagctcacatgaatattgtgctttatttagcaggtgtactcacagatactagctccttagcagctcacaacatcccagaatgggaggcagggggtgactcattatccccattttactgacagggaaactgaggctcaacttaagtaattgacctgccaggtatattcacccatccagtggaagagctgagtccccgccccagtcatctaccagtatccagcctggggcctgtacttagatgtgaaaggtgctgcttcatttctgaccaagagactgagaagtttcccagaatgcaaacaaagcccaggcccctgaaatctttccggtcaagcctttatcccagcactcagttgttttggatgtctgttcctacttgcccttacccccaaagttacagatcctagttacaggactctgccagctttgttaaactgtccgtgagacaagaaagccattggggaaaccaggtgattgcctgaaattcttactccgttccaagtgctgttcctcccaggaaatcaaaggccagggtccttatggccgtggagccttcccgaccacagagccaacttgtgaagcacacagctctgcagcctgggctctgccctgcctcagccgcctcccccacgctcttcaccacgttcctggagagtccggccaacctgtcccagccgaaacactgctgtattagaaaaagtctctttctggtc

SEQ ID NO: 104747 - DNA, 660 bp, Artificial Sequence
  derived and/or modified sequence
atgtttgtgtcctacctgatcctgaccctgctgcacgtgcagacagctgtgctggcccggcctggaggagagagcatcggctgtgatgactacctgggcagtgacaaggtggtggacaagtgtggggtgtgtggcggggacaacacaggctgccaggtggtgtctggagtcttcaagcacgccctgaccagcctgggctaccaccgggtggtggagatccctgagggcgccaccaagatcaacatcacagagatgtacaagagcaacaagaagaagagccacctgaagccagccacccggggcagccagttcagctctgtgaaggtgtgcagcgtgcctgctgcctgcaagctgctgggcaccccaggccgggcccggcagcctgtgcctgccccccgggagctggagcatgacaagaacagcccccactgtgcctacctgagcctgtacctgaccagcctggcccagagctcctggagggtcttcagcctcttctcctatgtgctgatctacctgttcagcaagtacctggccttcaacaccctgtttgccctgaagaggatggccctgcagagggacaggaaggagaagacccgggcctggtgcatcttcatcaagctgtgtggccgggagatccagatcctgcccggccctgtgtag

SEQ ID NO: 104748 - DNA, 1977 bp, Artificial Sequence
  derived and/or modified sequence
atgtttgtgtcctacctgatcctgaccctgctgcacgtgcagacagctgtgctggcccggcctggaggagagagcatcggctgtgatgactacctgggcagtgacaaggtggtggacaagtgtggggtgtgtggcggggacaacacaggctgccaggtggtgtctggagtcttcaagcacgccctgaccagcctgggctaccaccgggtggtggagatccctgagggcgccaccaagatcaacatcacagagatgtacaagagcaacaactacctggccctgcggagccgcagcggccgcagcatcatcaatggaaactgggccatcgacaggcctgggaagtatgaaggaggcggcaccatgttcacctacaagaggcccaatgagatcagcagcacagctggggagagcttcctggccgagggccccaccaatgagatcctggatgtgtacatgatccaccagcagcccaaccctggggtgcactatgaatatgtgatcatgggcaccaatgccatcagcccccaggtgcccccccacagaagacctggagagcccttcaacggccagatggtgacagagggccgcagccaggaggagggggagcagaagggcagaaatgaggagaaggaggacctgcggggggaggcccctgagatgttcaccagcgagagcgcccagaccttccctgtgcgccacccagaccgcttcagcccccacaggccagacaacctggtgcccccagccccccagcccccccggcgcagccgggaccacaactggaagcagctgggcaccacagagtgcagcaccacctgtgggaagggcagccagtaccccatcttccgctgtgtgcacaggagcacccatgaggaggcccctgagagctactgtgacagctccatgaagcccaccccagaggaggagccctgcaacatcttcccctgcccagccttctgggacatcggggagtggagcgaatgttccaagacctgtggcctgggcatgcagcaccggcaggtgctgtgccggcaggtgtatgccaacagaagcctgactgtgcagccctaccgctgccagcacctggagaagccagagaccaccagcacctgccagctgaagatctgcagcgagtggcagatcagaacagactggaccagctgcagcgtgccctgtggggtgggccagaggaccagagatgtgaagtgtgtgagcaacattggagatgtggtggatgatgaggagtgcaacatgaagctgcggcccaatgacatcgagaactgtgacatgggcccctgtgccaagtcctggttcctgacagagtggagcgagcgctgcagcgcagaatgtggggccggcgtgaggaccaggtctgtggtgtgcatgaccaaccacgtgagcagcctgcccctggagggctgcggcaacaacagacctgctgaggccaccccctgtgacaatggcccctgcaccgggaaggtggagtggtttgctggctcctggagccagtgcagcattgaatgtggcagcggcacccagcagcgggaggtgatctgtgtgaggaagaatgctgacacctttgaggtgctggaccccagcgagtgcagcttcctggagaagccacccagccagcagagctgccacctgaagccctgtggggccaagtggttcagcacagagtggagcatgtgcagcaagagctgccagggcggcttccgggtgcgggaggtgcgctgcctgagtgatgacatgaccctgagcaacctgtgtgacccccagctgaagccagaggagcgggagagctgcaacccccaggactgtgtgcctgaggtggatgagaactgcaaggacaagtactacaactgcaatgtggtggtgcaggcccggctgtgtgtgtacaactactacaagacagcctgctgtgccagctgcaccagggtggccaaccggcagacaggcttcctgggcagcaggtag

SEQ ID NO: 104749 - DNA, 660 bp, Artificial Sequence
  derived and/or modified sequence
atgttcgtgagctacctgatcctgaccctgctgcacgtgcagaccgccgttttggctcgcccaggcggtgagtccataggctgcgatgattaccttggttccgacaaagtagttgacaagtgcggtgtttgcgggggagacaataccggatgtcaagtagttagtggcgtgttcaagcacgcactcacatccttgggctatcatagggtcgtcgaaatccctgaaggggcaaccaaaattaatatcacagaaatgtacaaatcaaacaagaagaaatcacatcttaaacccgctacacgtggctctcagttctcttccgttaaagtatgctcagtgccagctgcctgtaaacttcttggaacccctggccgggcacgtcagcctgttcccgcaccaagggagctggagcacgacaagaattccccacattgcgcatatttatccctgtacctcacctccctagctcagtcctcatggagggtcttctctttgttttcatatgtgctgatttacttgtttagcaaatacctggctttcaataccttgtttgcacttaagcggatggctctccagcgggaccgtaaagaaaaaactcgggcatggtgtatctttatcaagctgtgcggacgggagattcagattctgcccgggcccgtgtag

SEQ ID NO: 104750 - DNA, 1977 bp, Artificial Sequence
  derived and/or modified sequence
atgttcgtgagctacctgatcctgaccctgctgcacgtgcagaccgctgtcttagcgagacctgggggtgagagcataggctgcgatgactatctcgggtctgacaaggtcgtcgacaagtgcggcgtttgcggaggtgataataccggctgtcaggtcgtgtctggagtttttaagcacgcgctaacttcactggggtatcatcgggtcgtggagatacctgagggagccaccaaaatcaatatcaccgaaatgtacaagtccaacaactatctggctttgagaagtcggagcggtcggtctatcataaacggcaattgggctattgatcggcctggaaaatatgaggggggaggcacaatgttcacatataaacgacccaatgagatctcatccactgcaggcgaaagcttcctggcagaaggaccaacgaacgaaattttggatgtgtacatgatccatcagcagcccaatccaggggtccactacgagtatgtgatcatgggtaccaatgccatctccccacaggtcccccctcaccgacgacctggcgaaccgtttaatgggcagatggtgaccgaggggaggtcacaggaagagggtgagcagaagggccgtaacgaggaaaaggaagacctgcgcggagaagcacctgagatgttcacatccgaaagtgcccaaacattccctgtgaggcatcctgatcggtttagcccccatcgcccagacaacctggtgccacccgcgcctcagcctcctcggcgcagcagggatcacaactggaagcaactcgggacaaccgaatgctctacgacctgcggaaagggatcacaatacccaatttttcgttgcgtgcacagatctactcacgaagaggccccagaatcttactgtgactcatctatgaaacccacccccgaagaggagccctgcaatattttcccatgtccagctttttgggacattggggaatggagtgaatgttccaagacgtgtggcttaggtatgcagcacaggcaggtgctttgtcggcaggtatacgccaatcgatcattaaccgtgcagccctacaggtgccagcatctcgaaaagcctgaaactacttccacttgccagttaaaaatttgctccgagtggcagattaggactgattggacctcttgttcggtgccctgcggggtaggccagagaacaagagacgtaaagtgtgtgtccaatattggtgatgttgtcgacgatgaagagtgcaatatgaaattaagaccgaatgatatcgagaattgcgacatgggcccatgcgccaagtcttggttcctcacggagtggtctgaacggtgcagtgctgagtgcggggcgggcgtgcggacccgtagtgtggtgtgtatgactaatcatgtgagttccctgccactggaaggttgcgggaacaatcgacctgcggaggcgacaccttgtgacaacgggccttgcacagggaaagtcgagtggttcgcgggcagctggtcccagtgcagcattgagtgtgggagcggtactcagcagcgagaggtaatatgcgtccggaagaatgcagatacgttcgaggtgcttgacccatcggaatgctcttttctggagaaaccacctagtcaacagagttgtcacctcaaaccttgtggggcaaaatggttcagcaccgagtggtcaatgtgttctaaaagttgtcagggcggattccgcgtccgggaggtgcgctgcctaagtgacgacatgacactgtctaacctctgcgatccgcagttaaaaccggaagagcgcgaatcatgcaacccacaggactgcgttccggaggtcgatgagaactgcaaagataagtattacaactgcaatgtcgtggtccaggctcgtctatgcgtgtataactattacaagaccgcctgttgcgcttcgtgcacgcgggtcgcaaatcggcaaacggggtttcttggcagtcggtag

SEQ ID NO: 104751 - RNA, 660 nt, Artificial Sequence
  derived and/or modified sequence
auguucguaagcuaccucauucucacucuccuccacguucaaacagcagugcuggcgaggccaggcggagaaucuaucggcugugacgauuaccucggaagugacaaggugguggauaaaugcggcguguguggaggcgauaauacaggcugccaagucguguccgggguguuuaagcacgccuuaacaagcuugggguaucaccgugucgucgaaauaccagagggagcgaccaagauuaauaucaccgagauguauaagagcaacaagaagaagucccaucucaaaccagcuacaaggggaucacaauucagcucugugaagguuugcucagugccugccgcgugcaaacuccuuggaaccccagguagagccagacagccaguuccagcccccagagaacuugagcaugacaagaacuccccccauugugccuauuugucacuguaccucacaucacucgcacagucaucuuggcgcguguucuccuuguucuccuaugugcugaucuauuuauucagcaaguaccuggccuuuaauacucuguuugcauugaagcggauggcccugcagagagaccguaaagagaagacacgcgcaugguguauuuuuauuaagcuguguggaagggagauccagauccuaccagggcccgucuag

SEQ ID NO: 104752 - RNA, 1977 nt, Artificial Sequence
  derived and/or modified sequence
auguucgugucuuaccugauacuuacccuacuucaugugcagacagccguccucgcccgucccggcggagaaagcaucgguugugaugauuaucuagggucagacaaggucguggauaaguguggggugugcggaggggauaauaccggcugccagguggugucuggagucuucaagcacgcacuuaccucacugggguaccacagggucguggaaauccccgagggagccaccaaaaucaacauaaccgagauguacaagaguaacaacuaucucgcucuccgaucucguucaggcagaucaauuaucaacgggaauugggcaauugaucggcccggaaaauaugagggaggcggcacaauguucacuuauaaacgaccuaacgagauaucuuccacagcuggagagaguuuuuuagcagaggggcccaccaaugagauacuagacguguauaugauccaccagcagcccaaccccggcguccacuacgaauauguuaucaugggaacaaacgcaauaucgccccaggugccaccccacagacguccuggcgaaccauuuaacggacagauggugaccgaagguaggucacaagaagagggcgagcaaaaaggacguaaugaggaaaaagaggaccuucggggggaggccccugagauguucacaucugaauccgcucagacauuucccguccgacacccugauagguuuucaccacauagaccagauaaucuggugccaccugcaccccagccaccccgccggucacgggaucacaauuggaaacagcugggcaccacagaguguucuacaacaugcggaaaaggaagucaguauccuaucuuucgguguguacaccgaucgacacaugaagaagcaccggagagcuacugugauucauccaugaaacccacacccgaagaagagccauguaauauuuuuccuugcccggcauucugggauauuggcgagugguccgaaugcucuaagacuuguggccuagggaugcagcaucgccaggucuugugccgccaggucuacgcuaaccguucacugacugugcagccguacagaugccaacauuuagagaaaccggaaaccaccagcacuugccagcugaagauuugcucugaguggcagauuaggacagauuggaccuccuguucagugcccuguggaguugggcaaagaacccgggacgucaaauguguguccaauauuggugacguggucgacgaugaggagugcaauaugaagcugaggccaaacgacauugagaacugugauauggguccuugcgccaagagcugguuccuaaccgaauggucagagcgguguucugccgaauguggugcuggggugcggaccagauccgugguuuguaugacgaaccacguguccucucucccacuggaaggcuguggcaacaaccgccccgcagaggccacacccugugacaacggcccaugcacaggaaagguggaaugguuugcuggguccuggucacagugcucaauugaaugcggcagugguacacagcagagggaaguuaucugcgugagaaagaacgccgauaccuucgaaguucuggaccccagugaauguagcuuccuggaaaaaccaccaucccagcaaucuugccauuugaaaccuuguggggcuaaaugguucucuacagaaugguccauguguagcaaguccugccagggcggguucaggguacgcgaagugcgcugucuuagcgaugacaugacccugucaaaccucugcgacccacaacuaaagcccgaagaacgggaguccuguaauccccaagauuguguuccggaaguagaugaaaacuguaaagauaaguacuauaacugcaauguaguuguccaagcacguuuauguguguacaauuacuacaaaacagcauguugugccucuugcacgcguguggcuaacaggcaaaccggguuccuaggaagccguuag

SEQ ID NO: 104753 - RNA, 660 nt, Artificial Sequence
  derived and/or modified sequence
auguucguaagcuaccucauucucacucuccuccacguucaaacagcagugcuggcgaggccaggcggagaaucuaucggcugugacgauuaccucggaagugacaaggugguggauaaaugcggcguguguggaggcgauaauacaggcugccaagucguguccgggguguuuaagcacgccuuaacaagcuugggguaucaccgugucgucgaaauaccagagggagcgaccaagauuaauaucaccgagauguauaagagcaacaagaagaagucccaucucaaaccagcuacaaggggcagccaguucagcagcgugaaaguguguucagucccggccgcuugcaaacucuuagggacccccgguagagccaggcaaccgguuccugcaccccgugagcuggagcacgacaaaaauucuccacauugugccuaucugucucuuuauuuaacgucauuagcccagucuaguuggcgcgucuucucgcuguuuucuuauguccugaucuacuuauucucuaaauaccucgccuuuaauacgcuguuugcucugaagaggauggcccuucagcgagacagaaaggagaaaacucgcgcaugguguauuuucauuaaguuauguggacgagaaauucagauccucccaggcccuguguag

SEQ ID NO: 104754 - RNA, 1977 nt, Artificial Sequence
  derived and/or modified sequence
auguucguuucuuaccuaauucucacucuguugcacguacagaccgcugugcuggcccgcccagguggcgaaucuauuggaugcgaugauuaccucggcagugacaagguggucgauaaauguggaguuugcgguggcgauaauacaggaugccaagucguaagcggaguguucaagcacgcccugacaagucuugguuaucaucgcgucguugagauaccugaaggcgccacuaagauuaauauuaccgagauguauaaaagcaauaacuaucucgcgcugcguagccgcucuggaaggucaauuaucaacgggaauugggcaauugaucggcccggaaaauaugagggaggcggcacaauguucacuuauaaacgaccuaacgagauaucuuccacagcuggagagaguuuuuuagcagaggggcccaccaaugagauacuagacguguauaugauccaccagcagcccaaccccggcguccacuacgaauauguuaucaugggaacaaacgcaauaucgccccaggugccaccccacagacguccuggcgaaccauuuaacggacagauggugaccgaagguaggucacaagaagagggcgaacagaaagggcggaaugaggaaaaggaggacuugcguggcgaagcaccggaaauguucaccucugaaagcgcacaaaccuuuccagucagacacccagacagguuuuccccacaucgaccagacaaucuuguacccccagcuccacagccaccucgcagguccagagaccauaacuggaagcagcuugggaccacugaauguucuacaaccuguggaaagggaucccaauaccccaucuuucgcugcgugcacaggucuacacacgaggaagcacccgaaucuuacugugauuccucuaugaagcccacaccagaagaggaaccaugcaauauuuuuccauguccggccuuuugggacaucggagaauggucggaaugcagcaagaccugcggacugggaaugcaacauaggcaggugcugugucgucagguguaugcgaaccguucucuuaccgugcagccguaccguugucagcaucuggaaaagcccgaaacaacguccaccugucagcucaagauauguucugaauggcagauccggacugauuggacaucuugcagcguacccuguggaguaggacagagaaccagagacguaaagugcgugucgaauauaggugacgucguggaugacgaagaauguaacaugaaacugagaccaaacgacauagagaauugugauaugggacccugcgcgaaauccugguuccugaccgaauggucggagagguguucagccgaauguggcgcugggguucgaacccguagcguaguuuguaugaccaaucauguuucuucccugccucuugagggcuguggcaauaaucgucccgcugaagccacaccaugcgauaacggcccuuguacugguaaggucgaaugguucgccgguagcuggagccagugcaguauugagugcgggagcggcacacagcaaagagaaguuauuugugugaggaagaacgccgauacauuugaaguucuagaucccagcgaguguucuuuccuggaaaagccgccgucucagcagaguugucaucuaaagccaugcggugcaaaaugguuuaguaccgaauggucaauguguaguaaaaguugucaaggcggauuuaggguacgagaagucagauguuuguccgacgauaugacguuaaguaaucucugugacccacaacugaaaccugaagagcgagagagcugcaauccacaggauugugugccugagguggacgaaaacugcaaggacaaauauuauaauugcaacgugguuguucaggcucgacuuuguguauacaauuauuacaaaacugccugcugcgcaucuuguacaagaguggcaaacagacaaacaggauuuuuaggauccagauag

SEQ ID NO: 104755 - protein, 606 aa, Artificial Sequence
  derived and/or modified sequence
MADMEDLFGSDADSEAERKDSDSGSDSDSDQENAASGSNASGSESDQDERGDSGQPSNKELFGDDSEDEGASHHSGSDNHSERSDNRSEASERSDHEDNDPSDVDQHSGSEAPNDDEDEGHRSDGGSHHSEAEGSEKAHSDDEKWGREDKSDQSDDEKIQNSDDEERAQGSDEDKLQNSDDDEKMQNTDDEERPQLSDDERQQLSEEEKANSDDERPVASDNDDEKQNSDDEEQPQLSDEEKMQNSDDERPQASDEEHRHSDDEEEQDHKSESARGSDSEDEVLRMKRKNAIASDSEADSDTEVPKDNSGTMDLFGGADDISSGSDGEDKPPTPGQPVDENGLPQDQQEEEPIPETRIEVEIPKVNTDLGNDLYFVKLPNFLSVEPSMSLHLGNEVFDVYKAPLQGDHNHLFIRQGTGLQGQAVFKTKLTFRPHSTDSATHRKMTLSLADRCSKTQKIRILPMAGRDPECQRTEMIKKEEERLRASIRRESQQRRMREKQHQRGLSASYLEPDRYDEEEEGEESISLAAIKNRYKGGIREERARIYSSDSDEGSEEDKAQRLLKAKKLTSDEEGEPSGKRKAEDDDKANKKHKKYVISDEEEEDDD

SEQ ID NO: 104756 - DNA, 1821 bp, Artificial Sequence
  derived and/or modified sequence
atggctgacatggaggatctgttcggatctgacgccgactccgaggcagagaggaaagatagtgactccgggtccgactccgattcagatcaggagaacgcggcctcaggctcaaatgcatcagggagcgagtctgaccaggatgagcgaggcgacagcgggcagccttctaataaagagctatttggagacgatagcgaggacgagggagcaagccaccacagcggttctgataatcatagcgaacgctcagataacagatccgaggcctccgagaggtccgaccacgaagataacgatccgagcgatgtcgaccagcattctggcagcgaggcacctaacgacgatgaggatgagggtcatcgaagcgatggcggctcccaccatagcgaagccgaggggtcagaaaaggcgcacagcgatgatgagaaatggggacgcgaggacaagtccgatcagtcagatgacgagaaaattcagaactccgacgatgaggagcgggctcagggatctgatgaagacaagttgcaaaactccgacgatgacgaaaagatgcagaacaccgatgacgaagaaaggccccaactctcagacgatgaaagacaacagctgtccgaggaagaaaaggcaaacagcgatgacgaacggcccgtggcttccgacaacgacgacgagaagcagaattcagacgatgaggagcagccacaactgtctgacgaagagaagatgcagaactctgacgacgaacgaccccaggcatccgatgaggagcatcgacactccgatgacgaagaggaacaggaccacaagtccgagtcagcccgggggagtgatagtgaggatgaggtgctgcgaatgaaaagaaagaacgccattgcttctgatagcgaggcagatagcgataccgaggtgcccaaggacaactctgggactatggacctttttggaggagccgacgacattagtagtggttccgatggggaggacaaaccgcctacccccgggcaacccgtggacgagaatggtctgccacaggaccagcaggaagaggaaccaatcccagagactaggatcgaggtcgaaatccccaaggtgaacacagatctgggaaatgacctttattttgtgaaactgcccaatttcctgagcgtagaaccatccatgtccctgcaccttgggaacgaagtcttcgacgtctacaaagctcctttgcagggcgaccataaccacctatttattcgacagggaaccggcctccagggccaggctgtgttcaagactaagctcacctttcgccctcactctacagatagcgctacgcacagaaagatgactcttagcctggctgaccgctgttcaaaaacacagaaaatccgaattctcccgatggcgggccgggacccagagtgccagcgaaccgagatgatcaagaaagaggaagaaaggctcagagcctccattcggagggaaagtcagcaacgtagaatgagggagaagcagcaccagcgtggcctgagtgcctcatacctggaacccgaccgctacgatgaagaggaggagggcgaggagagcattagcctggccgctatcaagaaccgttacaagggaggcatcagggaggagcgagcccggatttattcttctgactcggatgagggaagcgaggaggacaaagcacagcggctgttgaaggcaaaaaaacttactagcgacgaagaaggcgagccctcaggtaaacgtaaggctgaggacgacgataaggctaataaaaagcacaagaagtacgtcatatctgacgaggaggaggaggacgatgactag

SEQ ID NO: 104757 - DNA, 1821 bp, Artificial Sequence
  derived and/or modified sequence
atggctgacatggaggacctgtttggaagtgatgctgacagcgaggccgagaggaaggacagcgacagcggcagtgacagcgacagcgaccaggagaatgctgccagcggcagcaatgccagcggcagcgagagtgaccaggatgagcggggggacagcggccagcccagcaacaaggagctgtttggagatgacagtgaagatgagggcgccagccaccacagcggcagtgacaaccacagcgagaggagtgacaacagaagtgaggccagcgagaggagtgaccatgaagataatgaccccagtgatgtggaccagcacagcggcagcgaggccccaaatgatgatgaagatgagggccacagaagtgatggcggcagccaccacagcgaggccgagggcagcgagaaggcccacagtgatgatgagaagtggggccgggaggacaagagtgaccagagtgatgatgagaagatccagaacagtgatgatgaggagcgggcccagggcagtgatgaggacaagctgcagaacagtgatgatgatgagaagatgcagaacacagatgatgaggagcggccccagctgagtgatgatgagcggcagcagctgtctgaggaggagaaggccaacagtgatgatgagaggcctgtggccagtgacaatgatgatgagaagcagaacagtgatgatgaggagcagccccagctgagtgatgaggagaagatgcagaacagtgatgatgagcggccccaggccagtgatgaggagcaccgccacagtgatgatgaggaggagcaggaccacaagtctgagagcgcccggggcagtgacagtgaagatgaggtgctgaggatgaagaggaagaatgccatcgccagtgacagcgaggccgacagcgacacagaggtgcccaaggacaacagcggcaccatggacctgtttggaggagcagatgacatcagcagcggcagtgatggagaggacaagccacccaccccaggccagcctgtggatgaaaatggcctgccccaggaccagcaggaggaggagcccatccctgagacccgcatcgaggtggagatccccaaggtgaacacagacctgggcaatgacctgtactttgtgaagctgcccaacttcctgtctgtggagcccagcatgagcctgcacctgggcaatgaggtgtttgatgtgtacaaggcccccctgcagggcgaccacaaccacctgttcatccggcagggcaccggcctgcagggccaggccgtgttcaagaccaagctgaccttccggccccacagcacagacagcgccacccacaggaagatgaccctgagcctggccgaccgctgcagcaagacccagaagatccgcatcctgcccatggccggccgggaccctgagtgccagaggacagagatgatcaagaaggaggaggagcggctgcgggccagcatccggcgggagagccagcagaggaggatgagggagaagcagcaccagaggggcctgagcgccagctacctggagccagacagatatgatgaggaggaggagggggaggagagcatcagcctggccgccatcaagaaccgctacaagggcggcatccgggaggagcgggcccgcatctacagcagtgacagtgatgagggcagcgaggaggacaaggcccagaggctgctgaaggccaagaagctgaccagtgatgaggagggggagcccagcggcaagaggaaggcagaagatgatgacaaggccaacaagaagcacaagaagtatgtgatcagtgatgaggaggaggaggatgatgactag

SEQ ID NO: 104758 - DNA, 1981 bp, Artificial Sequence
  derived and/or modified sequence
ctaaccgaggcagcagcggacgtgagcgataatggcggatatggaggatctcttcgggagcgacgccgacagcgaagctgagcgtaaagattctgattctggatctgactcagattctgatcaagagaatgctgcctctggcagtaatgcctctggaagtgaaagtgatcaggatgaaagaggtgattcaggacaaccaagtaataaggaactgtttggagatgacagtgaggacgagggagcttcacatcatagtggtagtgataatcactctgaaagatcagacaatagatcagaagcttctgagcgttctgaccatgaggacaatgacccctcagatgtagatcagcacagtggatcagaagcccctaatgatgatgaagacgaaggtcatagatcggatggagggagccatcattcagaagcagaaggttctgaaaaagcacattcagatgatgaaaaatggggcagagaagataaaagtgaccagtcagatgatgaaaagatacaaaattctgatgatgaggagagggcacaaggatctgatgaagataagctgcagaattctgacgatgatgagaaaatgcagaacacagatgatgaggagaggcctcagctttccgatgatgagagacaacagctatctgaggaggaaaaggctaattctgatgatgaacggccggtagcttctgataatgatgatgagaaacagaattctgatgatgaagaacaaccacagctgtctgatgaagagaaaatgcaaaattctgatgatgaaaggccacaggcctcagatgaagaacacaggcattcagatgatgaagaggaacaggatcataaatcagaatctgcaagaggcagtgatagtgaagatgaagttttacgaatgaaacgcaagaatgcgattgcatctgattcagaagcggatagtgacactgaggtgccaaaagataatagtggaaccatggatttatttggaggtgcagatgatatctcttcagggagtgatggagaagacaaaccacctactccaggacagcctgttgatgaaaatggattgcctcaggatcaacaggaagaggagccaattcctgagaccagaatagaagtagaaatacccaaagtaaacactgatttaggaaacgacttatattttgttaaactgcccaactttctcagtgtagagcccagcatgtccctgcatttaggcaatgaagtgtttgatgtgtacaaagccccactgcagggcgaccacaatcatctttttataagacaaggtactggtctacagggacaagcagtctttaaaacgaaactcaccttcagacctcactctacggacagtgccacacatagaaagatgactctgtcacttgcagataggtgttcaaagacacagaagattagaatcttgccaatggctggtcgtgatcctgaatgccaacgcacagaaatgattaagaaagaagaagaacgtttgagggcttccatacgtagggaatctcagcagcgccgaatgagagagaaacagcaccagcgggggctgagcgccagttacctggaacctgatcgatacgatgaggaggaggaaggcgaggagtccatcagcttggctgccattaaaaaccgatataaagggggcattcgagaggaacgagccagaatctattcatcagacagtgatgagggatcagaagaagataaagctcaaagattactcaaagcaaagaaacttaccagtgatgaggaaggtgaaccttccggaaagagaaaagcagaagatgatgataaagcaaataaaaagcataagaagtatgtgatcagcgatgaagaggaagaagatgatgattgaagtatgaaatatgaaaacattttatatattttattgtacagttataaatatgtaaacatgagttattttgattgaaatgaatcgatttgcttttgtgtaattttaattgtaataaaacaatttaaaagc

SEQ ID NO: 104759 - DNA, 1821 bp, Artificial Sequence
  derived and/or modified sequence
atggccgacatggaggacctgttcggcagcgacgccgacagcgaggcagagaggaaggacagcgactcaggtagcgactcggattcagatcaagagaatgcagcctccggttccaacgcatcaggtagtgagtcagatcaggacgagaggggagacagtgggcaaccatcaaataaggagctgtttggcgacgactcggaggatgagggcgcttctcaccactcaggcagcgacaatcactccgaaaggtctgacaaccggagcgaggcctctgagcgaagcgatcatgaagacaacgacccaagtgacgtagatcagcactccgggagtgaggcacctaacgacgacgaagacgaaggccatcgctctgatggtggctcacaccactctgaggcagaaggtagtgagaaggcacattctgacgacgagaagtggggacgcgaggataagtccgatcagtcagatgatgaaaagatccagaattctgacgatgaagagagagcccagggcagtgacgaggacaagctacagaactccgatgacgatgaaaagatgcagaatacagatgatgaagagcggccgcagctttctgatgatgaacgtcagcaactgtcagaagaggagaaggcgaatagcgatgatgaacgaccagtggcctccgacaacgacgacgagaagcagaattcggatgacgaggagcagccccaactttcggatgaagagaagatgcagaatagtgacgacgaacggccccaggctagcgatgaggagcaccggcattcagatgacgaagaggaacaggaccacaaatccgagagcgccagaggatcagattccgaggacgaggttttacgcatgaagcgcaaaaatgccatcgcctctgattcggaggctgactctgacacagaggttccgaaggacaacagtggaaccatggacctctttggcggcgccgatgatatctcctctggcagcgatggtgaagataagcccccaacccctgggcagcccgtggatgaaaatgggctccctcaggaccagcaggaagaagagcctatacctgaaacccgcatcgaagtcgaaatccctaaggtgaataccgatctgggcaacgacctgtatttcgtcaagttacccaacttcttgtcagtggaacctagtatgagcctgcatctcggcaatgaggtgtttgacgtgtataaagcacctctgcaaggtgatcacaaccacctatttattcgacaagggaccggacttcagggacaggcggtgttcaaaaccaagctgaccttccgcccccacagtaccgatagtgctacccaccgcaagatgactctctctctggcggatcgctgtagtaagacccagaagattcggattctccccatggcaggcagagatccagaatgtcaacggactgagatgatcaagaaagaggaggagcggctgagagcctcgatccgtagagaatcacagcagcggaggatgagagaaaagcagcaccagagaggtttgtccgcatcctatctggagcctgacagatacgatgaggaagaagaaggggaagagtctattagtttagctgcgattaagaatcgctacaaaggcggcattagggaggaaagggcaagaatctattcatcagattctgatgagggatctgaggaagacaaggcgcagcgccttttgaaagcaaagaaattgacctccgatgaggaaggggagccaagtggcaagcgtaaggccgaagacgatgataaggctaataaaaagcataagaagtatgtgatcagcgatgaggaggaggaggacgacgactag

SEQ ID NO: 104760 - DNA, 1821 bp, Artificial Sequence
  derived and/or modified sequence
atggccgacatggaagacctgttcggaagcgacgctgactcagaagcagagcggaaggattctgacagcggctccgacagcgattctgatcaggaaaacgcggcatccgggtccaatgcctctggctccgagtctgaccaagatgagagaggcgattccggtcagccgtcaaacaaagaattgtttggcgatgattctgaggacgaaggcgcttcccatcactccggctctgataatcactctgaaaggtctgataaccgatcagaggcttcagaacggtcggatcatgaagataatgacccctccgacgtggatcaacatagtggctcagaggccccaaacgatgacgaggatgaagggcacagatctgatgggggaagtcaccacagtgaggcagaaggatcggagaaggcgcattcagatgacgaaaagtggggcagggaggacaaaagcgatcagagcgatgatgagaaaatccaaaacagtgatgacgaggaaagggcccaggggagtgacgaagacaaactgcaaaattctgatgacgacgagaagatgcagaatacggacgacgaggaaagacctcagctctctgacgatgagcggcaacagctgtctgaggaagagaaagccaacagtgacgatgagaggcccgttgcgtccgacaacgatgacgagaaacagaattccgacgacgaggagcaaccacagttgagtgacgaagaaaaaatgcaaaattccgacgatgagcgtcctcaggcatccgacgaagagcaccggcacagtgacgatgaggaggagcaggatcacaaatctgagtcggcccgaggtagcgacagcgaagacgaggttctccgcatgaaaaggaagaatgctatcgcctcagactcagaggctgacagcgataccgaggtaccaaaggataattctggaacgatggacctgtttgggggagccgacgacatttcttcagggtctgacggagaagacaaaccaccaacacctggccagcccgtggatgagaatgggctgcctcaggatcaacaggaagaggagccaattccggagacccgtattgaagtggaaataccaaaggtgaataccgatctggggaacgatctttacttcgtcaagctgcccaactttctttccgtagaaccatccatgtctctccaccttggaaatgaagtcttcgatgtgtacaaggccccactgcaaggtgatcataaccatctctttatacgacagggaaccggattacaaggacaggctgtgtttaagactaagctgacattccgcccacactcgaccgactcagctacacatcggaagatgaccctgagccttgcggatcgttgctcaaagacacagaaaattcggattctacctatggccggacgtgacccggaatgccaaagaaccgagatgattaagaaggaggaagagaggcttcgcgcttccatcagaagggagtcccagcaacgcagaatgcgggagaagcagcaccagcgcggtctgagtgccagctatcttgagcccgacaggtacgatgaggaggaagagggggaagaaagcatttcgcttgcagcaattaaaaaccggtataaaggcggtattcgggaggaaagagccaggatctatagttccgactctgacgaaggaagtgaggaagataaggctcagagactgctaaaagctaagaagcttacttctgacgaggagggggaaccctcaggaaagcgtaaagccgaagatgacgacaaagcaaataagaaacataaaaagtacgtaatcagcgacgaagaagaggaggatgatgattag

SEQ ID NO: 104761 - DNA, 1821 bp, Artificial Sequence
  derived and/or modified sequence
atggccgacatggaggacctgttcggcagcgacgccgacagcgaggccgagagaaaggacagcgacagcggcagcgacagcgacagcgaccaggagaacgccgccagcggcagcaacgccagcggcagcgagagcgaccaggacgagagaggcgacagcggccagcccagcaacaaggagctgttcggcgacgacagcgaggacgagggcgccagccaccacagcggcagcgacaaccacagcgagagaagcgacaacagaagcgaggccagcgagagaagcgaccacgaggacaacgaccccagcgacgtggaccagcacagcggcagcgaggcccccaacgacgacgaggacgagggccacagaagcgacggcggcagccaccacagcgaggccgagggcagcgagaaggcccacagcgacgacgagaagtggggcagagaggacaagagcgaccagagcgacgacgagaagatccagaacagcgacgacgaggagagagcccagggcagcgacgaggacaagctgcagaacagcgacgacgacgagaagatgcagaacaccgacgacgaggagagaccccagctgagcgacgacgagagacagcagctgagcgaggaggagaaggccaacagcgacgacgagagacccgtggccagcgacaacgacgacgagaagcagaacagcgacgacgaggagcagccccagctgagcgacgaggagaagatgcagaacagcgacgacgagagaccccaggccagcgacgaggagcacagacacagcgacgacgaggaggagcaggaccacaagagcgagagcgccagaggcagcgacagcgaggacgaggtgctgagaatgaagagaaagaacgccatcgccagcgacagcgaggccgacagcgacaccgaggtgcccaaggacaacagcggcaccatggacctgttcggcggcgccgacgacatcagcagcggcagcgacggcgaggacaagccccccacccccggccagcccgtggacgagaacggcctgccccaggaccagcaggaggaggagcccatccccgagaccagaatcgaggtggagatccccaaggtgaacaccgacctgggcaacgacctgtacttcgtgaagctgcccaacttcctgagcgtggagcccagcatgagcctgcacctgggcaacgaggtgttcgacgtgtacaaggcccccctgcagggcgaccacaaccacctgttcatcagacagggcaccggcctgcagggccaggccgtgttcaagaccaagctgaccttcagaccccacagcaccgacagcgccacccacagaaagatgaccctgagcctggccgacagatgcagcaagacccagaagatcagaatcctgcccatggccggcagagaccccgagtgccagagaaccgagatgatcaagaaggaggaggagagactgagagccagcatcagaagagagagccagcagagaagaatgagagagaagcagcaccagagaggcctgagcgccagctacctggagcccgacagatacgacgaggaggaggagggcgaggagagcatcagcctggccgccatcaagaacagatacaagggcggcatcagagaggagagagccagaatctacagcagcgacagcgacgagggcagcgaggaggacaaggcccagagactgctgaaggccaagaagctgaccagcgacgaggagggcgagcccagcggcaagagaaaggccgaggacgacgacaaggccaacaagaagcacaagaagtacgtgatcagcgacgaggaggaggaggacgacgactag

SEQ ID NO: 104762 - protein, 3052 aa, Artificial Sequence
  derived and/or modified sequence
MAFSIDRALNVALGNPSSTAQHVFKVSLVSGMPFYGYHEKERHFMKIYLYNPTMVKRICELLQSGAIMNKFYQPHEAHIPYLLQLFIDYNLYGMNLINLAAVKFRKARRKSNTLHATGSCKNHLSGNSLADTLFRWEQDEIPSSLILEGVEPQSTCELEVDAVAADILNRLDIEAQIGGNPGLQAIWEDEKQRRRNRNETSQMSQPESQDHRFVPATESEKKFQKRLQEILKQNDFSVTLSGSVDYSDGSQEFSAELTLHSEVLSPEMLQCTPANMVEVHKDKESSKGHTRHKVEEALINEEAILNLMENSQTFQPLTQRLSESPVFMDSSPDEALVHLLAGLESDGYRGERNRMPSPCRSFGNNKYPQNSDDEENEPQIEKEEMELSLVMSQRWDSNIEEHCAKKRSLCRNTHRSSTEDDDSSSGEEMEWSDNSLLLASLSIPQLDGTADENSDNPLNNENSRTHSSVIATSKLSVKPSIFHKDAATLEPSSSAKITFQCKHTSALSSHVLNKEDLIEDLSQTNKNTEKGLDNSVTSFTNESTYSMKYPGSLSSTVHSENSHKENSKKEILPVSSCESSIFDYEEDIPSVTRQVPSRKYTNIRKIEKDSPFIHMHRHPNENTLGKNSFNFSDLNHSKNKVSSEGNEKGNSTALSSLFPSSFTENCELLSCSGENRTMVHSLNSTADESGLNKLKIRYEEFQEHKTEKPSLSQQAAHYMFFPSVVLSNCLTRPQKLSPVTYKLQPGNKPSRLKLNKRKLAGHQETSTKSSETGSTKDNFIQNNPCNSNPEKDNALASDLTKTTRGAFENKTPTDGFIDCHFGDGTLETEQSFGLYGNKYTLRAKRKVNYETEDSESSFVTHNSKISLPHPMEIGESLDGTLKSRKRRKMSKKLPPVIIKYIIINRFRGRKNMLVKLGKIDSKEKQVILTEEKMELYKKLAPLKDFWPKVPDSPATKYPIYPLTPKKSHRRKSKHKSAKKKTGKQQRTNNENIKRTLSFRKKRSHAILSPPSPSYNAETEDCDLNYSDVMSKLGFLSERSTSPINSSPPRCWSPTDPRAEEIMAAAEKEAMLFKGPNVYKKTVNSRIGKTSRARAQIKKSKAKLANPSIVTKKRNKRNQTNKLVDDGKKKPRAKQKTNEKGTSRKHTTLKDEKIKSQSGAEVKFVLKHQNVSEFASSSGGSQLLFKQKDMPLMGSAVDHPLSASLPTGINAQQKLSGCFSSFLESKKSVDLQTFPSSRDDLHPSVVCNSIGPGVSKINVQRPHNQSAMFTLKESTLIQKNIFDLSNHLSQVAQNTQISSGMSSKIEDNANNIQRNYLSSIGKLSEYRNSLESKLDQAYTPNFLHCKDSQQQIVCIAEQSKHSETCSPGNTASEESQMPNNCFVTSLRSPIKQIAWEQKQRGFILDMSNFKPERVKPRSLSEAISQTKALSQCKNRNVSTPSAFGEGQSGLAVLKELLQKRQQKAQNANTTQDPLSNKHQPNKNISGSLEHNKANKRTRSVTSPRKPRTPRSTKQKEKIPKLLKVDSLNLQNSSQLDNSVSDDSPIFFSDPGFESCYSLEDSLSPEHNYNFDINTIGQTGFCSFYSGSQFVPADQNLPQKFLSDAVQDLFPGQAIEKNEFLSHDNQKCDEDKHHTTDSASWIRSGTLSPEIFEKSTIDSNENRRHNQWKNSFHPLTTRSNSIMDSFCVQQAEDCLSEKSRLNRSSVSKEVFLSLPQPNNSDWIQGHTRKEMGQSLDSANTSFTAILSSPDGELVDVACEDLELYVSRNNDMLTPTPDSSPRSTSSPSQSKNGSFTPRTANILKPLMSPPSREEIMATLLDHDLSETIYQEPFCSNPSDVPEKPREIGGRLLMVETRLANDLAEFEGDFSLEGLRLWKTAFSAMTQNPRPGSPLRSGQGVVNKGSSNSPKMVEDKKIVIMPCKCAPSRQLVQVWLQAKEEYERSKKLPKTKPTGVVKSAENFSSSVNPDDKPVVPPKMDVSPCILPTTAHTKEDVDNSQIALQAPTTGCSQTASESQMLPPVASASDPEKDEDDDDNYYISYSSPDSPVIPPWQQPISPDSKALNGDDRPSSPVEELPSLAFENFLKPIKDGIQKSPCSEPQEPLVISPINTRARTGKCESLCFHSTPIIQRKLLERLPEAPGLSPLSTEPKTQKLSNKKGSNTDTLRRVLLTQAKNQFAAVNTPQKETSQIDGPSLNNTYGFKVSIQNLQEAKALHEIQNLTLISVELHARTRRDLEPDPEFDPICALFYCISSDTPLPDTEKTELTGVIVIDKDKTVFSQDIRYQTPLLIRSGITGLEVTYAADEKALFHEIANIIKRYDPDILLGYEIQMHSWGYLLQRAAALSIDLCRMISRVPDDKIENRFAAERDEYGSYTMSEINIVGRITLNLWRIMRNEVALTNYTFENVSFHVLHQRFPLFTFRVLSDWFDNKTDLYRWKMVDHYVSRVRGNLQMLEQLDLIGKTSEMARLFGIQFLHVLTRGSQYRVESMMLRIAKPMNYIPVTPSVQQRSQMRAPQCVPLIMEPESRFYSNSVLVLDFQSLYPSIVIAYNYCFSTCLGHVENLGKYDEFKFGCTSLRVPPDLLYQVRHDITVSPNGVAFVKPSVRKGVLPRMLEEILKTRFMVKQSMKAYKQDRALSRMLDARQLGLKLIANVTFGYTSANFSGRMPCIEVGDSIVHKARETLERAIKLVNDTKKWGARVVYGDTDSMFVLLKGATKEQSFKIGQEIAEAVTATNPKPVKLKFEKVYLPCVLQTKKRYVGYMYETLDQKDPVFDAKGIETVRRDSCPAVSKILERSLKLLFETRDISLIKQYVQRQCMKLLEGKASIQDFIFAKEYRGSFSYKPGACVPALELTRKMLTYDRRSEPQVGERVPYVIIYGTPGVPLIQLVRRPVEVLQDPTLRLNATYYITKQILPPLARIFSLIGIDVFSWYHELPRIHKATSSSRSEPEGRKGTISQYFTTLHCPVCDDLTQHGICSKCRSQPQHVAVILNQEIRELERQQEQLVKICKNCTGCFDRHIPCVSLNCPVLFKLSRVNRELSKAPYLRQLLDQF

SEQ ID NO: 104763 - DNA, 9159 bp, Artificial Sequence
  derived and/or modified sequence
atggcattctccatcgatcgagcactgaacgttgcattaggaaatcccagtagtacagctcagcacgtcttcaaggtgtcactggtttccggaatgcctttctacggttaccatgaaaaagaaagacactttatgaagatatatctgtacaatccaaccatggtgaagagaatatgtgaattactgcaaagcggggctatcatgaacaagttttaccagccccatgaagcccacatcccatacctcttgcagctgtttattgactacaacctttacggcatgaacctcatcaatctcgcggcagtgaagtttcggaaagcaagacgcaagtccaacaccctgcatgccacaggaagctgtaaaaatcacttatccggaaattctcttgctgacacactcttccggtgggagcaggacgagatcccatcttctcttatactcgagggagtagagccgcagtctacctgtgagctcgaggtagacgccgttgccgcagacatcttaaataggctggacattgaggctcagataggcggaaaccccggcctgcaggccatatgggaggacgaaaaacaaagacgccgtaaccgcaacgagacttcgcagatgtctcagccggagtcccaggaccaccgcttcgtccccgccaccgagagtgagaagaaattccaaaaaagacttcaagaaatcctcaagcagaatgacttcagcgtgaccctaagtgggtccgtggactatagtgatgggagccaagaattttcagctgagctaaccctacattccgaggtgctttccccagagatgctgcagtgtactcctgccaatatggtggaagtgcacaaggacaaggagtcaagtaagggccataccagacacaaagtagaagaggcccttatcaatgaggaggccatcctcaacctgatggaaaattcacagacattccagcctctaacacagaggctctccgagagtccggtatttatggatagcagtccagatgaagccctcgtccacctgctggcgggtttagagtccgacgggtacagaggtgagaggaataggatgccttccccttgtagaagctttggtaataataaatacccccagaattctgacgatgaggaaaatgagccacagattgaaaaggaagaaatggagctttcactggttatgtctcagcgctgggactctaacatagaggagcactgtgctaaaaagaggtccctgtgccgaaacacccaccgaagctcgaccgaagacgatgacagctcatctggtgaggagatggaatggagcgacaactctcttctgctggcatccctaagcataccacagttagacggcaccgcggatgaaaattccgacaatcccctgaacaacgaaaactcgagaacacactctagcgtcatagccacctcgaaactctctgtgaaaccttccatcttccacaaagacgccgctacactggagccctcttcctccgcgaaaatcaccttccagtgtaagcatacttcagcattgagctctcacgtcctaaataaggaagatctgatcgaggatcttagtcagactaacaaaaacaccgagaagggcttagacaacagcgtcactagtttcaccaatgagtctacctactcaatgaaataccccggatctctgtcctccacagtgcatagcgagaatagccataaggaaaattctaaaaaagaaatcctgcccgtgagtagctgtgagagctctatcttcgattatgaagaggacattccttcagttacacggcaagtcccatcacgtaaatataccaatataagaaaaatcgagaaagacagcccctttatccacatgcataggcatccaaatgaaaacacactaggcaaaaactcatttaacttttctgaccttaatcactccaaaaataaggtgtcttcagagggaaacgagaaggggaactccactgcattatcatcactgttcccttctagcttcaccgaaaattgcgagcttctaagttgttcaggcgagaatcggaccatggtgcattcactgaattcaaccgcagatgaaagtggactaaacaagcttaaaatccgctatgaggagttccaggagcataaaactgaaaagccctctttgtcgcagcaggccgcacattacatgttcttcccttccgtcgttctgtcgaactgtctgacaaggcctcagaaattgtcaccagtgacttacaagctgcagcctggaaataagccaagtagactaaagctcaacaaacgaaaactggccggacaccaagaaacttctaccaagtcctccgaaacgggcagcaccaaggataacttcattcaaaacaacccctgtaactctaatccagagaaagataacgctcttgcatctgacctgaccaagaccacgcgcggggccttcgagaacaagacacctactgacggtttcatagactgccactttggagacgggactctggagactgaacagagcttcggcctttatgggaataaatacaccctgcgggctaaacggaaagttaactacgagaccgaggacagcgagtcctcattcgttacacataatagcaagatttctttaccccaccccatggaaattggtgaatcccttgacgggaccctcaagagcaggaaacgacggaaaatgtccaaaaagttaccacccgtgatcatcaaatacatcattattaataggtttagggggcgtaagaacatgctggtgaagctcggtaagattgacagcaaagagaagcaggtgattctgaccgaagagaaaatggaactgtataagaagttagcacccctcaaagatttctggcccaaagttccagactcacccgctacaaaataccccatatatcctcttaccccaaaaaagagccacaggcgtaagtccaagcacaagagcgcaaagaaaaaaacggggaagcagcagaggaccaataacgaaaacatcaaaaggacactcagttttagaaaaaagcgcagtcatgccatactcagtcccccaagccccagctacaacgcggaaacagaggattgcgatttaaactattcagacgtgatgagcaagctgggattcctttccgaaagatccacatcacctattaattcaagtccaccgagatgctggagcccgacggatccccgagctgaggaaattatggcagctgcagaaaaggaggctatgctatttaagggccccaatgtgtacaaaaagactgtgaactcccgaatcggcaagactagtcgagctcgagcccaaatcaaaaagagcaaagcaaagctcgccaacccttcgatcgtgaccaagaagagaaacaagagaaaccagactaacaagcttgtggacgatggtaaaaaaaagccacgcgccaagcaaaagacaaacgagaaggggacctctaggaaacacaccactctcaaagacgagaaaataaagagccagtcaggagccgaggtgaaattcgtcctgaagcatcagaatgtgagtgaatttgctagcagtagcgggggctcccaactcttattcaagcagaaagacatgcctctaatggggagcgcggtggatcatcccctgagcgcctcgctaccgacaggtattaacgctcagcagaagctgagtggctgctttagctcgtttctagagtccaagaagtctgtggatctgcagacctttccttcatcacgtgacgatctacatcctagtgtagtttgcaactcaattggtcccggcgtctctaaaataaacgtacaacgtccccataaccagtccgctatgtttactttgaaggagtccaccctcatccagaaaaacattttcgatctgtcgaatcacctctcacaggtcgctcaaaatacccagatctcttcaggaatgtcatcaaagattgaagacaacgctaataatatccagcgcaactacctgagtagcataggtaaactgagcgagtataggaattctctggaatcaaaattggatcaagcatatacgcccaattttcttcattgcaaggattcccaacagcaaattgtatgcattgccgagcaaagtaagcactccgagacatgctcacctggtaatacagcatcagaagagtcccagatgccaaataactgcttcgtgaccagcctaaggtcacctataaaacagatcgcttgggagcagaagcaacggggcttcattctggacatgagcaactttaagcccgagagggtgaaaccgcgaagcctgtcggaagcaataagtcagaccaaggcactgagtcagtgtaagaaccggaacgtgtctactcccagtgccttcggagaagggcaatcgggtctagcagtccttaaagaacttttgcagaaaagacaacagaaagcccaaaacgccaataccacacaggacccactatcaaataaacaccagcccaataagaatatcagcggctcgctggagcacaacaaagccaacaaaaggactcggagcgtgacatcaccccgcaagccgcggacaccaagaagtactaagcaaaaagagaagataccaaagttgttaaaagtcgatagcctcaacttgcagaactctagccaacttgacaacagtgtgagcgacgattctccaattttcttctctgaccctggcttcgaatcctgttacagtctggaggactctttatcccccgagcacaattacaatttcgacataaatacaatcggccagaccggtttctgctcattctactctggcagtcagttcgtccccgccgaccagaacctgccgcagaagtttctgtcggacgcagtccaggatctgttccctgggcaggctatagagaaaaatgaattcctgtcccacgacaatcaaaagtgcgacgaggacaaacaccacaccaccgacagcgctagctggatccgaagcggcacactgtcacctgaaatcttcgaaaagtcaaccattgattctaatgaaaatcgcaggcacaaccagtggaagaactccttccatcctttaacaacccggagtaatagcatcatggattctttctgcgtgcagcaggctgaggactgtttatccgaaaagtctcgcttgaatagaagctcagtgagtaaggaggtgtttcttagcctgcctcagcccaacaactctgattggatccagggccacacccgaaaagagatggggcagagtctggactccgccaacactagctttacagccatactgtcttctcccgacggagaactagtggacgttgcttgtgaggatctggaactttacgtgagtagaaacaatgatatgttgacgccaactcccgattcaagccccaggagcactagtagtccgagccaaagtaagaatggctcctttaccccgcggaccgccaacatcttgaagccactgatgagcccccctagccgagaggagattatggccacactcttagatcacgatctgtctgagactatttaccaggaacctttctgttccaacccatctgatgtgcctgaaaagccacgggagatcggcggcagactgttgatggttgaaactcgactggccaatgatttggctgagttcgagggcgactttagtttagaagggttaagactgtggaaaactgccttcagtgctatgacccagaacccccgccccggatcacccctgagatccgggcaaggagtggtgaacaagggttcatcaaattcacccaaaatggttgaagacaaaaaaatcgtgatcatgccttgcaaatgtgctccttcaagacagctcgttcaggtgtggttgcaggcaaaggaggagtacgaacgaagcaagaaactgcctaaaactaaacctaccggggtcgtgaagtctgcagagaacttcagcagctcagtgaaccctgatgacaagccagtggttcctcctaagatggacgtcagtccttgtatcttgcctaccaccgctcacactaaagaggatgtggataactcacagattgcacttcaggcccctaccacaggttgctcccagaccgctagcgagtcccagatgcttcctcctgtggcttccgccagtgacccagaaaaagacgaagatgatgatgataattactatatatcatactcctcgcctgatagccctgttatccccccatggcagcagcccatttcccctgatagcaaagccctgaacggggacgaccggccaagttcacctgttgaggaactgccttccttagctttcgaaaactttctcaagcccatcaaggacggaatccagaaaagtccctgctccgaaccgcaggagccactggtcatcagccccatcaacacaagggcgcgtacgggtaaatgtgaaagtctgtgtttccattcaacccctattatccagcgcaaactgctggaaaggctcccagaggcaccaggtttatcaccattaagtaccgagcccaagacacagaagctgtccaacaaaaagggttccaacacggatacactgagaagagtcttattgactcaggctaaaaaccagttcgctgccgtaaacacaccccagaaggagacctctcagatcgacggcccatccctgaataatacctacggatttaaggtgtcgattcaaaacctgcaggaggctaaggctcttcacgagatacagaacctcacactgatctccgttgagctccacgcacggacacgtagggatctggaacccgacccagaatttgatcccatttgtgcactgttttattgtatcagcagcgatacaccactccctgacaccgagaagaccgaactaactggcgtgatagtgatcgacaaagacaagaccgtgttctcacaggacatcagatatcagacccccctgctgataaggtctggaataacagggctcgaggtcacttacgctgctgatgaaaaggctttgttccacgagatcgccaatataatcaagaggtatgatcctgacatcttattaggttatgaaatacagatgcatagctggggctatctgctccaacgcgccgccgcgttgtctattgatctctgcaggatgatctctcgggtgccagacgacaagattgagaatcgtttcgctgcggaacgagatgaatatggttcttacacaatgtctgagattaatatcgtgggtcgaataactctgaacttgtggcgcattatgagaaatgaagtggcgcttaccaattacacattcgagaacgtgagctttcacgtactgcaccagcgctttccacttttcactttcagagtgttaagcgattggttcgataacaaaactgacctgtatcggtggaagatggtcgatcactacgtcagtagagtccgagggaatctccagatgctcgagcaattagacctgatcggcaaaacgtccgagatggctagactgtttggaattcaattcctgcatgtcctcaccaggggaagtcaatatagagtcgaaagcatgatgttgagaatcgctaaaccaatgaattacatcccggtcacaccctctgtccagcagcgctctcagatgagagccccacagtgtgtgccgctcataatggaaccagaaagccgattctactctaattccgtgctcgtgcttgactttcagtcattatacccatccattgtcatcgcttacaactactgtttcagcacgtgccttggccacgtggaaaatctgggtaaatacgacgagttcaagtttggatgcacgtccctccgcgtccctccggatctcctttaccaggttagacatgacattaccgtgtcccctaatggggtggcctttgtgaagccgagtgtgaggaaaggtgttctgcctaggatgctggaagagatactcaagacacgtttcatggtcaagcagagcatgaaggcctacaagcaggaccgcgcattatcccggatgctcgatgcacggcagctaggcttgaaactgattgccaatgtaacttttgggtacacaagcgcaaacttcagcggtcgtatgccatgcatagaagtaggagactccatagtgcacaaagcaagggagacattagagcgggctattaagctggtgaacgacactaaaaaatggggcgccagagtcgtctacggagataccgactctatgtttgttctgttgaaaggggccactaaggaacagagtttcaagattggccaggaaattgccgaggcggtgacagcaactaatccaaaaccggttaaactgaagttcgagaaagtctatttgccttgcgtgctccagacaaagaaacgctatgtgggctatatgtacgaaacactggatcaaaaagacccagtcttcgatgccaaaggtatcgagactgtccgcagagattcttgccctgctgtttctaagatcctggagcggagcttaaagctcctgttcgaaaccagggatattagcttgatcaaacagtatgtgcagcggcagtgcatgaaactgctcgaggggaaggcctctatccaagattttatattcgcgaaggaataccggggtagtttcagctacaagcccggagcctgcgtgccggccctcgagttaacaagaaagatgctgacctacgataggagaagcgagccccaggtcggagaacgcgtgccttacgtcatcatatacggaacccctggagtgccgctcattcaactggtgaggagaccagttgaggtactccaagacccaactttgcggctgaacgctacctactacattaccaagcagattctaccccctctcgcccggatcttctcgctaatcggcatcgatgttttcagttggtatcacgaactgcctcgcattcataaggcaaccagctctagccgcagtgagcctgagggcaggaaagggacaatctctcagtatttcactaccttacactgccctgtctgtgatgaccttacacagcacgggatctgttccaagtgtcggtctcagccgcagcacgtggccgttattctgaaccaagagatacgcgaactcgagaggcaacaggagcagttggtgaaaatctgcaagaattgcacaggctgttttgaccggcatatcccatgcgtcagccttaactgccccgtgctgtttaagctgtcccgcgtgaatcgggagctgtctaaggcaccttatttgaggcagctcctcgatcagttttag

SEQ ID NO: 104764 - DNA, 9159 bp, Artificial Sequence
  derived and/or modified sequence
atggccttcagcattgaccgggccctgaatgtggccctgggcaaccccagcagcacagcccagcacgtgttcaaggtgtccctggtgtctggcatgcccttctacggctaccacgagaaggagcggcacttcatgaagatctacctgtacaaccccaccatggtgaagaggatctgtgagctgctgcagagcggggccatcatgaacaagttctaccagccccatgaggcccacatcccctacctgctgcagctgttcatcgactacaacctgtatggcatgaacctgatcaacctggccgctgtgaagttcaggaaggcccggaggaagagcaacaccctgcacgccaccggcagctgcaagaaccacctgagcggcaacagcctggccgacaccctcttccgctgggagcaggatgagatccccagcagcctcatcctggagggcgtggagccccagagcacctgtgagctggaggtggatgctgtggccgctgacatcctgaaccggctggacatcgaggcccagattggaggcaaccctggcctgcaggccatctgggaggatgagaagcagaggagaagaaacagaaatgagaccagccagatgagccagcctgagagccaggaccacagatttgtgcctgccacagaaagtgagaagaagttccagaagaggctgcaggagatcctgaagcagaatgacttctctgtgaccctgagcggctctgtggactacagtgatggcagccaggagttctctgctgagctgaccctgcacagcgaggtgctgagccctgagatgctgcagtgcaccccagccaacatggtggaggtgcacaaggacaaggagagcagcaagggccacaccaggcacaaggtggaggaggccctgatcaatgaggaggccatcctgaacctgatggagaacagccagaccttccagcccctgacccagaggctgtctgagagccctgtgttcatggacagcagcccagatgaggccctggtgcacctgctggccggcctggagagtgatggctacagaggagagaggaacaggatgcccagcccctgccgcagctttggaaacaacaagtacccccagaacagtgatgatgaagaaaatgagccccagatcgagaaggaggagatggagctgagcctggtgatgagccagcgctgggacagcaacatcgaggagcactgtgccaagaagaggagcctgtgcaggaacacccacaggagcagcacagaagatgatgacagcagcagtggagaggagatggagtggagcgacaacagcctgctgctggccagcctgagcatcccccagctggatggaacagcagatgagaacagcgacaaccccctgaacaatgaaaacagcaggacccacagcagcgtcatcgccaccagcaagctgtctgtgaagcccagcatcttccacaaggatgctgccaccctggagcccagcagcagcgccaagatcaccttccagtgcaagcacaccagcgccctgagcagccacgtgctgaacaaggaggacctgattgaggacctgagccagaccaacaagaacacagagaagggcctggacaacagcgtgaccagcttcaccaatgaaagcacctacagcatgaagtacccaggcagcctgagcagcacagtgcacagcgagaacagccacaaggagaacagcaagaaggagatcctgcctgtgagcagctgtgagagcagcatctttgattatgaggaggacatccccagcgtgacccggcaggtgcccagcaggaagtacaccaacatcaggaagattgagaaggacagccccttcatccacatgcaccgccaccccaatgaaaacaccctgggcaagaacagcttcaacttcagtgacctgaaccacagcaagaacaaggtgtcctctgagggcaatgagaagggcaacagcacagccctgagcagcctcttccccagcagcttcacagagaactgtgagctgctgagctgcagcggggagaacagaaccatggtgcacagcctgaacagcacagcagatgaaagtggcctgaacaagctgaagatccgctatgaggagttccaggagcacaagacagagaagcccagcctgagccagcaggccgcccactacatgttcttccccagcgtggtgctgagcaactgcctgacccggccccagaagctgagccctgtgacctacaagctgcagcccggcaacaagcccagccggctgaagctgaacaagaggaagctggccggccaccaggagaccagcaccaagagcagcgagaccggcagcaccaaggacaacttcatccagaacaacccctgcaacagcaaccctgagaaggacaatgccctggccagtgacctgaccaagaccaccaggggggcctttgagaacaagacccccacagatggcttcatcgactgccactttggagatggcaccctggagacagagcagagctttggcctgtatggcaacaagtacaccctgcgggccaagaggaaggtgaactatgaaacagaggacagcgagagcagctttgtgacccacaacagcaagatcagcctgccccaccccatggagattggagagagcctggatggcaccctgaagagcaggaagaggaggaagatgagcaagaagctgccccctgtgatcatcaagtacatcatcatcaaccgcttccggggcaggaagaacatgctggtgaagctgggcaagattgacagcaaggagaagcaggtgatcctgacagaggagaagatggagctgtacaagaagctggcccccctgaaggacttctggcccaaggtgcctgacagccctgccaccaagtaccccatctaccccctgacccccaagaagagccacaggaggaagagcaagcacaagagcgccaagaagaagacaggcaagcagcagaggaccaacaatgaaaacatcaagaggaccctgtccttcaggaagaagaggagccacgccatcctgagcccccccagccccagctacaatgctgagacagaggactgtgacctgaactacagtgatgtgatgagcaagctgggcttcctgtctgagaggagcaccagccccatcaacagcagccccccacgctgctggagccccacagaccccagggctgaggagatcatggctgctgctgagaaggaggccatgctgttcaagggccccaacgtgtacaagaagacagtgaacagccgcatcggcaagaccagccgggcccgggcccagatcaagaagagcaaggccaagctggccaaccccagcatcgtgaccaagaagaggaacaagaggaaccagaccaacaagctggtggatgatggcaagaagaagccccgggccaagcagaagaccaatgagaagggcaccagcaggaagcacaccaccctgaaggatgagaagatcaagagccagagcggggctgaggtgaagtttgtgctgaagcaccagaatgtgtctgaatttgccagcagcagcggcggcagccagctgctcttcaagcagaaggacatgcccctgatgggcagcgctgtggaccaccccctgagcgccagcctgcccaccggcatcaatgcccagcagaagctgagcggctgcttcagcagcttcctggagagcaagaagtctgtggacctgcagaccttccccagcagcagagatgacctgcaccccagcgtggtgtgcaacagcatcggccctggggtgtccaagatcaacgtgcagaggccccacaaccagagcgccatgttcaccctgaaggagagcaccctcatccagaagaacatctttgacctgagcaaccacctgagccaggtggcccagaacacccagatcagcagcggcatgagcagcaagattgaagataatgccaacaacatccagaggaactacctgagcagcatcggcaagctgtctgagtacagaaacagcctggagagcaagctggaccaggcctacacccccaacttcctgcactgcaaggacagccagcagcagatcgtgtgcatcgccgagcagagcaagcacagcgagacctgcagccctggcaacacagccagcgaggagagccagatgcccaacaactgctttgtgaccagcctgcggagccccatcaagcagatcgcctgggagcagaagcagaggggcttcatcctggacatgagcaacttcaagccagagcgggtgaagcccaggagcctgtctgaggccatcagccagaccaaggccctgagccagtgcaagaacagaaatgtgtccacccccagcgccttcggggagggccagagcggcctggccgtgctgaaggagctgctgcagaagaggcagcagaaggcccagaatgccaacaccacccaggaccccctgagcaacaagcaccagcccaacaagaacatcagcggcagcctggagcacaacaaggccaacaagaggaccaggtctgtgaccagccccaggaagcccaggacccccaggagcaccaagcagaaggagaagatccccaagctgctgaaggtggacagcctgaacctgcagaacagcagccagctggacaacagcgtgtctgatgacagccccatcttcttcagtgaccccggctttgagagctgctacagcctggaggacagcctgagccctgagcacaactacaactttgacatcaacaccatcggccagacaggcttctgcagcttctacagcggcagccagtttgtgcctgctgaccagaacctgccccagaagttcctgagtgatgctgtgcaggacctcttccctggccaggccatcgagaagaatgagttcctgagccatgacaaccagaagtgtgatgaggacaagcaccacaccacagacagcgcctcctggatccgcagcggcaccctgagccctgagatctttgagaagagcaccatcgacagcaatgaaaatagaagacacaaccagtggaagaacagcttccaccccctgaccaccaggagcaacagcatcatggacagcttctgtgtgcagcaggccgaggactgcctgtctgagaagagccggctgaacagaagctctgtgtccaaggaggtgttcctgagcctgccccagcccaacaacagcgactggatccagggccacaccaggaaggagatgggccagagcctggacagcgccaacaccagcttcaccgccatcctgagcagcccagatggagagctggtggatgtggcctgtgaggacctggagctgtatgtgtccagaaataatgacatgctgacccccaccccagacagcagccccaggagcaccagcagccccagccagagcaagaatggcagcttcacccccaggacagccaacatcctgaagcccctgatgagcccccccagccgggaggagatcatggccaccctgctggaccatgacctgtctgagaccatctaccaggagcccttctgcagcaaccccagtgatgtgcctgagaagccccgggagatcggcggccgcctgctgatggtggagacccggctggccaatgacctggccgagtttgaaggagacttcagcctggagggcctgcggctgtggaagacagccttcagcgccatgacccagaaccccaggcctggcagccccctgcggagcggccagggcgtggtgaacaagggcagcagcaacagccccaagatggtggaggacaagaagatcgtcatcatgccctgcaagtgtgcccccagccggcagctggtgcaggtgtggctgcaggccaaggaggagtatgaaagaagcaagaagctgcccaagaccaagcccaccggggtggtgaagtctgctgagaacttcagcagctctgtgaacccagatgacaagcctgtggtgccccccaagatggatgtgagcccctgcatcctgcccaccacagcccacaccaaggaggatgtggacaacagccagatcgccctgcaggcccccaccaccggctgcagccagacagccagcgagagccagatgctgccccctgtggccagcgccagtgaccctgagaaggatgaagatgatgatgacaactactacatctcctacagcagcccagacagccctgtgatccccccctggcagcagcccatcagcccagacagcaaggccctgaatggagatgaccggcccagcagccctgtggaggagctgcccagcctggcctttgagaacttcctgaagcccatcaaggatggcatccagaagagcccctgcagcgagccccaggagcccctggtgatcagccccatcaacacccgggccaggactggaaaatgtgagagcctgtgcttccacagcacccccatcatccagaggaagctgctggagcggctgcctgaggcccctggcctgagccccctgagcacagagcccaagacccagaagctgagcaacaagaagggcagcaacacagacaccctgcggcgggtgctgctgacccaggccaagaaccagtttgctgctgtgaacaccccccagaaggagaccagccagattgatggccccagcctgaacaacacctacggcttcaaggtgtccatccagaacctgcaggaggccaaggccctgcacgagatccagaacctgaccctcatctctgtggagctgcacgcccggacccggcgggacctggagccagaccctgagtttgaccccatctgtgccctcttctactgcatcagcagtgacacccccctgcctgacacagagaagacagagctgactggagtcatcgtcatcgacaaggacaagacagtgttcagccaggacatccgctaccagacccccctgctgatccgcagcggcatcaccggcctggaggtgacctatgctgctgatgagaaggccctcttccatgaaattgccaacatcatcaagagatatgaccctgacatcctgctgggctatgagatccagatgcacagctggggctacctgctgcagagagctgctgccctgagcattgacctgtgcaggatgatcagccgggtgcctgatgacaagattgagaacagatttgctgctgagagagatgaatatggcagctacaccatgtctgagatcaacatcgtgggccgcatcaccctgaacctgtggaggatcatgagaaatgaggtggccctgaccaactacacctttgaaaatgtgtccttccacgtgctgcaccagcgcttccccctcttcaccttccgggtgctgagtgactggtttgacaacaagacagacctgtaccgctggaagatggtggaccactacgtgtcccgggtgcggggcaacctgcagatgctggagcagctggacctgattggcaagaccagcgagatggcccggctgtttggcatccagttcctgcacgtgctgacccggggcagccagtacagagtggagagcatgatgctgcgcatcgccaagcccatgaactacatccctgtgacccccagcgtgcagcagaggagccagatgagggccccccagtgtgtgcccctcatcatggagcctgagagccgcttctacagcaacagcgtgctggtgctggacttccagagcctgtaccccagcatcgtcatcgcctacaactactgcttcagcacctgcctgggccacgtggagaacctgggcaagtatgatgagttcaagtttggctgcaccagcctgcgggtgcccccagacctgctgtaccaggtgagacatgacatcaccgtgagccccaacggggtggcctttgtgaagcccagcgtgaggaaaggagtgctgcccaggatgctggaggagatcctgaagacccgcttcatggtgaagcagagcatgaaggcctacaagcaggaccgggccctgagcaggatgctggatgcccggcagctgggcctgaagctgattgccaacgtgaccttcggctacaccagcgccaacttcagcggccgcatgccctgcatcgaggtgggggacagcatcgtgcacaaggcccgggagaccctggagcgggccatcaagctggtgaatgacaccaagaagtggggcgcccgggtggtgtatggagacacagacagcatgtttgtgctgctgaagggggccaccaaggagcagagcttcaagattggccaggagattgctgaggccgtgacagccaccaaccccaagcctgtgaagctgaagtttgagaaggtgtacctgccctgtgtgctgcagaccaagaagagatatgtgggctacatgtatgagaccctggaccagaaggaccctgtgtttgatgccaagggcattgaaacagtgagaagagacagctgcccagctgtgtccaagatcctggagaggagcctgaagctgctgtttgagacccgggacatcagcctcatcaagcagtatgtgcagaggcagtgcatgaagctgctggagggcaaggccagcatccaggacttcatctttgccaaggagtaccggggcagcttctcctacaagccaggggcctgtgtgcctgccctggagctgaccaggaagatgctgacctatgacagaagaagtgagccccaggtgggggagcgggtgccctacgtgatcatctacggcaccccaggagtgcccctcatccagctggtgagaagacctgtggaggtgctgcaggaccccaccctgcggctgaatgccacctactacatcaccaagcagatcctgccccccctggcccgcatcttcagcctgattggaattgatgtgttctcctggtaccacgagctgccccgcatccacaaggccaccagcagcagccgctctgagcctgagggcaggaagggcaccatcagccagtacttcaccaccctgcactgccctgtgtgtgatgacctgacccagcacggcatctgcagcaagtgccgcagccagccccagcacgtggccgtcatcctgaaccaggagatccgggagctggagcggcagcaggagcagctggtgaagatctgcaagaactgcaccggctgctttgacagacacatcccctgtgtgtccctgaactgccctgtgctcttcaagctgagccgggtgaaccgggagctgagcaaggccccctacctgcggcagctgctggaccagttctag

SEQ ID NO: 104765 - DNA, 9159 bp, Artificial Sequence
  derived and/or modified sequence
atggccttcagcatcgaccgggccctgaacgtggccctgggcaacccatcttcgactgcccagcatgtctttaaggtgtccttagtatccggcatgccgttttacggctatcatgaaaaagagcggcacttcatgaagatctatctttataacccaacaatggtaaaacgcatatgtgaactacttcagagcggagccatcatgaacaaattctatcaacctcacgaggctcacataccgtatttgttgcagctgttcattgactacaatctgtacgggatgaacctgatcaatctcgcagccgttaaatttcggaaagcacggagaaaaagtaataccctgcacgccactggcagctgtaaaaatcacctgtctggaaactcgttggcagacaccctgttccggtgggagcaagacgaaatcccttcatcactgattctcgaaggcgtagagccccagtcgacttgcgaattagaagtcgacgctgtcgcggccgatatcctgaaccgcctagacattgaggcccagataggaggaaaccccggtctgcaagccatctgggaagatgaaaagcaaaggagacggaaccgaaacgagacatcccaaatgtctcagcctgaatcacaagaccatagatttgttccggcaacagagtcagagaaaaagttccagaaacggttgcaggaaattctgaagcagaacgactttagtgtgacactgtccggatctgtggattacagcgacggcagccaggagttttcagccgaactcaccctccatagcgaggttctgagtcccgagatgcttcagtgtacacctgccaatatggtggaggttcataaggacaaggagtccagtaaaggacacactagacataaggttgaagaagcccttatcaacgaggaggcgattctgaacctcatggagaacagtcagacattccagcccctgacacaaagactctcagaatccccagtcttcatggacagcagtcccgacgaagccctcgtccacctgctggccggactcgaatcggacggatacaggggcgagcgtaacaggatgccgtcgccctgtaggagctttggcaacaataagtacccccaaaacagtgatgacgaggagaatgagccgcagatcgaaaaagaagagatggaactgagcctggtgatgtcccaacgatgggacagtaatattgaggagcattgcgctaagaaacggtcactttgtaggaacactcaccgcagcagtacagaggatgacgattcctcatcaggtgaggaaatggagtggtccgataactcactgctgcttgcatctctcagcattccgcagctcgacggtaccgctgacgagaactcagacaacccactgaacaacgagaatagtaggacgcatagcagcgtcatcgctacttccaaactgtctgtgaaacctagtattttccataaggatgccgctacccttgagccctcaagctccgccaagatcacttttcagtgtaagcatacctcagcactgagttctcacgtcctgaacaaggaagacctgatagaggaccttagccagacaaataagaatactgaaaagggactggataactcggtcacgtcttttacaaacgaaagcacctattcaatgaaatatcctggttccctttcatctactgtgcactcagagaattcacacaaagaaaacagtaaaaaggaaatactccctgtttcttcttgtgaatcatctatttttgactacgaggaagacattccctccgtgacaagacaggtgccctcccgcaagtatactaacattcggaagatagaaaaagactcccctttcattcatatgcaccggcacccaaatgaaaatacactaggcaaaaattcctttaattttagtgatctcaatcactctaaaaataaagtatccagcgagggcaatgaaaaaggcaactctactgcgctgagcagcctgttccctagctcttttaccgaaaactgtgaactcctttcttgttccggggagaacaggaccatggttcactcccttaacagcactgcagatgaatccgggctcaataagctaaagatccggtacgaggagttccaggagcataagacagagaaacctagtttgagccagcaggctgctcactatatgttcttcccctcagtcgttttgtctaactgtttaacgcgcccacaaaagctctctccggtaacgtacaagctgcagccagggaataaaccttctcggttgaagcttaataagcggaaattggccgggcatcaggagacatctacgaaaagctctgaaaccggatccacaaaagacaacttcatccaaaacaacccctgcaacagtaaccccgaaaaagataacgccctagcatctgatctgaccaaaactacccgtggagcctttgagaataagacacccaccgatggcttcatcgattgccacttcggcgacgggaccctggaaacagaacagtcatttggtttgtacggcaataaatataccttacgtgccaaacgcaaggtcaactatgagacagaagatagcgagagctctttcgtgactcataactccaagattagcctacctcacccaatggagattggagaatctctcgatggcacacttaaaagcagaaagagacgaaagatgtctaagaaactcccgccggtgataatcaagtatataatcataaacaggtttcgtgggagaaagaatatgctcgttaagttgggcaaaatcgactccaaagaaaagcaggtgatcctgacggaggaaaaaatggagttgtacaagaagctggccccactcaaagatttttggcccaaggtgccagacagcccggctacaaaataccctatttatcccctgacccccaagaagagccaccgacggaaatccaagcacaaatccgccaaaaagaaaactggcaaacagcagcgcactaataacgagaacattaagcgtacgctgtcattcaggaagaagcgcagccacgcaatactatcccccccttcacccagttataatgccgagaccgaggattgcgatctcaactattcggatgttatgtcaaagctgggatttctgagtgagcgatccactagtccgatcaatagctcaccacctcggtgttggtctccaaccgacccccgagcagaggaaatcatggctgcggccgaaaaagaagccatgttgtttaaggggccaaacgtgtataagaaaaccgtgaatagcaggataggcaaaaccagtagggccagagctcagataaagaagtcaaaggcgaaactggctaaccccagcattgtaacaaagaaaagaaacaaacggaaccagaccaacaaactggttgatgatggaaaaaaaaagccaagagcgaagcaaaagactaacgagaagggaacttctcgtaagcataccacgctgaaggacgagaagattaaaagccagtcaggggctgaagtcaaatttgtgctgaagcatcagaacgtgtctgagttcgcctcgtctagcggcggatcacagcttttgttcaagcaaaaggatatgcctctgatgggctctgcagtggaccaccctctatcggcttcccttccaaccggtatcaatgcccagcagaagctgtcaggttgctttagcagctttctcgagtctaagaagagtgtggacctccagaccttcccctcctctcgcgatgatctgcacccgtctgtagtatgtaatagcatagggccaggggtgtcaaagatcaacgtccaaaggcctcacaatcagtcagcaatgtttactctgaaagagagtaccctcattcagaagaacattttcgatctcagcaaccacctttctcaggtggcccagaatacacagatctcctcaggcatgagtagtaaaatcgaggataatgccaacaacatccagaggaactacctaagctccatcgggaagctgagcgagtatcggaacagtctggagagcaagctggaccaagcctatacacctaacttcctgcattgcaaggactctcagcaacagatcgtctgcattgcggaacagtcaaagcactcggagacctgtagtccaggaaatacagcttcagaggagtctcaaatgcccaataattgctttgtgacctcactgagaagtcctatcaagcagatcgcctgggaacagaagcagcgagggttcatcctggatatgagcaattttaaacctgaacgtgtaaagccccgatctttatctgaggccattagccagacaaaggccctcagtcaatgtaagaatcggaatgtttccacgccgtcagcgttcggcgaagggcagagcggcctggcagtactcaaggagctgctgcagaagagacagcagaaagcacaaaacgcgaatactacacaggaccctctctcaaataagcaccagcctaataagaatatatcaggaagcctagaacacaacaaggccaacaaacggacaaggagtgtgacgtcccctaggaaaccccgtacaccccgaagcactaagcaaaaggagaaaatcccaaagctgcttaaggtggattccttgaatttgcagaactctagtcagctcgataactctgtctccgatgattcccctatcttttttagtgatccgggcttcgagagttgttactctttggaggactctctgtctcccgagcataactataactttgacattaacacgattggacagaccggattctgttctttttattccggctcccagtttgtccctgccgatcagaatctacctcagaagttcctgtccgatgcagtgcaggatctttttcctggacaggccatcgaaaagaacgaatttttgtctcacgataaccaaaagtgcgatgaggataagcatcacactacggatagcgcttcctggatcaggtctggcaccctatcgcctgagatctttgaaaaatctactatagactctaacgaaaatcgaagacacaaccaatggaaaaacagtttccatccgttgactactcggtctaatagtattatggattctttttgcgttcaacaagccgaggactgtctcagcgagaaatcgaggctcaacaggtcttccgtgagcaaggaagttttcctctcactgccccagcctaacaacagcgattggatccagggccatacgaggaaggaaatgggtcaatcactggattccgcaaacaccagcttcaccgccattctctcaagtccagatggcgagcttgttgatgttgcctgtgaagatctcgagctctacgtgtccaggaacaacgatatgctgactcctacaccagattcctcaccacggtcgaccagctccccaagccaatctaagaacggctccttcactcctaggactgcaaatattctgaagccactcatgtcacccccttcaagggaagagattatggccacactcctagaccacgatctctctgaaacaatttaccaggaacccttctgttctaacccgagcgatgttcccgagaagccccgcgagattggcggccgacttttgatggtggagacccgcctcgctaacgacctggccgagttcgagggagacttcagtctggaaggtttaaggctttggaagacggcatttagtgcgatgacacagaacccccgcccagggtcaccactgcgcagcgggcagggcgtggtgaacaagggctccagcaattcacccaagatggtggaagacaagaagatcgtgatcatgccctgtaagtgtgcccccagtcgccagctcgtacaagtgtggctgcaagccaaggaggagtatgagcgctccaagaagctccctaagaccaaaccaaccggcgtggtcaagtcagcagagaacttcagtagctcagtgaaccccgacgataaaccagtggtaccgcccaagatggatgtatccccgtgtattctgcccactacggcgcacacaaaggaagacgttgataattcccaaattgcactgcaggcccccactacaggctgcagccagacagcatctgaaagccagatgcttccgcctgtggcctccgcatccgatcctgagaaagatgaagatgacgacgacaattactacatatcttactcatctcctgactcaccagtgatccccccgtggcagcagcccatcagccccgattcaaaggccctaaacggcgatgatcggccgtccagccccgtagaagagctcccatctttagcattcgagaatttcctcaagcccattaaggacggtatccagaagagcccatgttctgagccacaggagccactcgttatctcaccaataaacacccgcgctcgcaccggtaagtgtgaatcactctgtttccactcaaccccaatcattcagaggaagctgctggaacgtctccccgaagctcccgggctgagcccccttagcaccgagcctaagacccaaaagctatctaataagaagggctcaaacaccgacactctcagacgcgtgctgctgacccaggctaaaaatcagtttgctgctgttaacacaccccagaaggaaacttcccaaatcgatggaccctctttaaacaatacttacggatttaaggtatcaatacagaacttacaggaagctaaggcactgcatgagatccagaatctgaccctaatctccgtagaattacatgctcggacaaggcgagacttagagccggatcctgaatttgacccaatttgcgcattattctattgcatttcttcagacacccccctcccagatacagagaagacagaactgacaggtgtgattgtcatcgataaggacaagaccgtcttcagccaggatattcgctaccagactcctcttctcatcagaagtgggattaccggccttgaagttacctatgctgctgacgaaaaagccctcttccatgagatagcgaatattataaagcgctacgatcccgacattctcttaggatatgagatacaaatgcactcttggggatacttgctccagcgagccgcagcattgagtattgacctctgtagaatgatttcccgagtcccagatgataagatcgagaatcggttcgcagccgaaagagacgagtacgggagctatacgatgagtgaaataaacatcgtcggacgcatcactctgaacctatggcgtattatgcgcaacgaggtggccctcactaactatacctttgagaacgtcagctttcatgtcctccaccagcgttttccgttatttaccttccgggtactgagtgactggtttgataacaaaaccgacctctaccgctggaagatggtcgatcactacgttagtagagtgagaggcaaccttcaaatgctcgaacaacttgacctgatcggtaagactagtgagatggccagactgtttggcatccagttcctgcatgtgctaacccggggcagccagtaccgcgtagaatcgatgatgctccgtatcgcaaaacccatgaattacatccccgtcacacccagcgtccagcagcggagccagatgcgtgctcctcaatgtgtacccctaatcatggagccagagtcgcgcttctactccaacagtgtcctcgtccttgatttccagtccttgtacccttccatcgtaatcgcctacaattattgcttcagcacctgcctgggccacgtagagaacctcggcaagtacgatgagtttaagttcggctgcacttctctaagagtgccgccagacctgctttatcaggttagacatgatattacagtctctcccaatggcgtggcctttgtaaaaccttcagtccgaaagggagtcctaccgaggatgctggaggagattctgaagactcgattcatggtcaagcagtccatgaaggcttacaagcaggacagagccctcagtagaatgttagacgctaggcagttggggctgaaactaatcgctaacgtgacctttggctacacctccgctaatttttccggacgcatgccgtgcatagaagtgggcgacagcatagtgcacaaagctcgcgagacactggaacgggctataaagctcgtgaatgacaccaagaaatggggagcccgtgttgtgtatggagacaccgacagtatgttcgttttacttaagggagccacaaaggaacagagcttcaaaatcggccaggaaattgccgaggccgtcaccgcaacaaacccaaagcctgtgaaactaaagtttgagaaggtgtacctgccttgtgtgttgcagacgaagaagaggtacgtggggtacatgtacgaaaccctggatcagaaggacccagttttcgacgccaagggcattgagacagtgaggagggacagctgtccggccgtttcaaagatcttagaaagatcactgaagctgctttttgagacccgagacatatcacttattaagcagtacgttcagagacagtgcatgaaactgctggaggggaaggcgtccatacaggatttcatcttcgccaaagagtaccgggggtccttttcttacaaaccaggcgcctgtgttcctgccttggaactgacgcggaagatgctgacatacgatagaaggagtgaaccccaagtaggcgagcgggtgccctatgttataatatacgggacacctggagtccccctgatccagctggtgcgacgcccagtcgaggtgctccaagaccctacactgcggctgaacgctacgtactatatcacgaaacagattctgcccccactcgcccgaatttttagtctaatcggcattgatgtgttttcatggtatcacgagctgccgcgtattcacaaagcaacctcatcgtcacgctcagaacctgagggtcgaaaaggaacaattagccagtattttaccactctccattgtcctgtgtgcgacgacctcacgcagcatggaatctgttctaagtgtaggtcccagccccagcatgtggccgtcatacttaatcaggagatccgggaactcgaacggcagcaggaacagctcgttaagatatgtaaaaactgcacgggatgctttgacagacatattccctgtgtctctctcaactgtccagtgctgttcaagctatcccgggtgaatagagagctgagtaaagcaccttatcttcggcaactgttggaccagttctag

SEQ ID NO: 104766 - DNA, 9158 bp, Artificial Sequence
  derived and/or modified sequence
atggcatttagtatcgatagggcgcttaatgtggcgctggggaatcccagcagtaccgcacagcatgtcttcaaagtctctctcgtcagcggaatgccgttctatgggtaccacgagaaggagaggcacttcatgaagatttatctgtacaaccctacaatggtcaagcggatttgtgaactgcttcagtctggcgcaataatgaacaagttttaccaaccccatgaggcacacatcccttatctccttcagctattcatcgattataatctttatggaatgaatttgattaacctcgccgcagtgaaattcagaaaggccagaagaaaatcaaataccctccacgccaccgggagctgtaaaaaccatctgagcggcaactctctggccgacaccctcttccgatgggagcaggacgagattcccagctcattgatcctggagggagtggagccacagtcaacctgcgagttggaggtggacgcggtcgccgctgacattctgaacaggctggacatcgaagctcagatcggaggcaacccgggacttcaggccatctgggaggatgaaaagcaaagacggcgaaatcggaacgagaccagccagatgtctcagccagaaagtcaggaccaccgcttcgttcccgcaaccgaatcagaaaaaaagttccaaaaaagactgcaggaaatcctgaaacagaacgacttttctgtgaccctcagcggttctgtggattactcggacggctcacaggagttctccgctgaactgactctgcacagcgaggtgctgtcaccagaaatgctgcaatgcacacccgctaatatggtggaggtgcacaaagataaagaatcctcaaaaggacatacacggcataaagttgaagaagcgttgattaacgaagaggccatactgaaccttatggaaaattcccagacatttcagccactgacacagaggttgtctgagtcccctgtgttcatggactcctcacccgacgaggcactcgtccacctgctcgctggcttggagtcggatgggtaccgcggagagaggaacagaatgccgtcaccgtgtaggagcttcggaaataacaaataccctcagaactcagatgatgaggaaaatgagcctcagattgaaaaagaagagatggagctctcacttgtcatgagtcaacggtgggacagcaatattgaggaacattgtgcaaaaaagcgttccttatgcagaaacacccatcggtcctcaacggaggatgacgatagctcgagtggtgaggagatggaatggagcgacaactccctgcttcttgccagtctgtctatcccacagctggacgggacagccgatgagaactcagataacccattgaataatgaaaactcccgaacgcatagttccgtaatcgccacatctaaactctctgtcaaaccttccatcttccataaggatgcagccacacttgagccgagttcatcggcgaagattaccttccagtgtaagcatacctccgcactttcatcccatgtactcaacaaggaggacttgatcgaggatctcagtcagacgaataagaatactgagaagggactcgataactcagtgacatcctttactaacgagtcaacctactccatgaaatatccgggtagtctgtctagcacggtgcactctgagaattcacacaaggagaattctaaaaaagagatcctgccagtttcttcttgcgagtccagcattttcgattacgaggaggacattccttctgtcacccgacaggttcccagcagaaaatatacaaacatccgtaagattgagaaggatagcccctttattcacatgcacagacaccccaatgagaacactcttggtaagaactccttcaacttcagtgatctcaaccactctaaaaataaagtcagctctgaaggaaatgagaaaggtaactccacggccttgagctcgctgtttccatcctcgtttactgaaaattgtgagcttctatcttgctcgggcgaaaacagaacaatggtgcacagccttaacagtaccgcagatgagtctggattgaacaaactcaaaattcgctacgaagaattccaggagcacaaaactgagaaaccatcactgtcacagcaggctgcccactatatgttttttccttccgtggtgctctcaaattgtctcacccgtcctcagaagctgtcccctgtcacatataagctccagccaggtaacaagccatcccgactgaagctgaataagcgcaagctggccggtcaccaagagaccagtacaaagagcagcgaaactggaagtacaaaggacaattttatccagaataatccttgcaatagcaacccagaaaaggacaatgcactggcttccgatctgacaaaaacaactcggggtgcattcgagaataaaacccccactgatggattcatcgattgtcactttggcgacggcactctcgaaaccgaacagagcttcggcctgtacggtaacaagtacactcttcgggctaagcgcaaggtgaattacgaaacagaagattccgaaagtagcttcgtaacgcataacagcaaaatttctctgccccaccccatggagataggggaaagtctggacggaactctgaaatcccgtaagcgcaggaaaatgtcgaagaagttaccaccagtgattatcaaatacatcataatcaacaggttccggggtcgcaagaatatgctcgttaaactgggcaaaatcgactccaaggagaaacaggtgatcctcaccgaggagaagatggagctgtacaagaaactggcccctttaaaggacttttggcccaaagtccccgactctccagccaccaaatacccgatatacccactgaccccaaagaaatcccacaggagaaagagtaaacacaagtccgctaagaagaaaaccgggaaacagcagcgtacgaacaatgagaatatcaaacgaacattaagctttcggaagaagcgctcacatgctatactgagcccccctagccccagttacaacgccgagacagaggattgtgacctgaattattccgacgtaatgagcaagctgggcttcctgtcagaacggagcacctctcctatcaactcttcaccccctaggtgctggagtcccaccgacccacgtgcggaagagatcatggccgcagcagaaaaagaagctatgctcttcaaagggcctaacgtctacaagaagactgtcaacagtcggattggaaaaacgtcccgggcacgagctcagataaagaaaagcaaagctaaactggccaatccttcaatcgtgacaaaaaagcggaataaacgcaatcagaccaacaaactcgtcgacgatggcaaaaaaaagccccgagcgaagcagaaaaccaatgaaaagggaacctccaggaagcacacaaccctaaaagatgagaaaattaagtctcaaagcggggcagaggtaaagttcgtgcttaagcatcagaacgttagcgagttcgcctcttcttcaggcggaagtcagctactattcaaacagaaggatatgcccctgatgggatctgctgtggaccatccactgagtgcctcattaccaactggaatcaatgcacagcagaagctttctggctgcttttcaagtttcctagaaagtaaaaaaagcgtggacctgcagacctttcccagttcccgcgacgatttgcatccatcggtggtgtgcaatagcattggtccaggtgtcagcaaaatcaacgttcagcggcctcacaaccagagcgccatgttcacactgaaggagtctacactgatccagaaaaacatctttgacttgagcaatcacctcagccaggtcgcacagaacacccaaataagcagtggcatgtcatccaagatcgaggacaacgcaaacaatatacagagaaactatcttagtagtattgggaagctgagcgagtatcgcaatagccttgagtccaaacttgaccaggcttatacacctaatttcctgcattgcaaagattctcaacagcagattgtgtgcatcgcggagcaatctaagcactcagagacgtgctctcccggaaacacagcgtccgaggaatctcagatgccgaataactgctttgtaacatcactcaggtctccaataaaacagatagcctgggagcagaaacagcgcggattcatactcgatatgtctaatttcaagcccgagcgagtcaaacctaggagcttatctgaggcgatttcccaaaccaaggcattatcccagtgtaagaacagaaatgtgtcgaccccaagtgcattcggtgagggccagagcgggctggctgtcctgaaagaactgttgcaaaaaaggcagcagaaggcccagaacgccaacactacacaggatcctctgtctaacaagcaccagcccaataagaacatttcaggtagtctggagcataacaaagccaataagagaacacgaagcgtgaccagcccacggaagccacgtaccccaagaagtacaaagcagaaggaaaagatccccaagctgttgaaagttgacagtctgaatctgcagaatagttcacagcttgataattccgtgtcagatgatagcccaatcttcttttctgatcccggattcgagagctgttactcgcttgaggattcattgagccccgagcacaactacaacttcgacattaataccatcggccaaaccggtttctgctccttctacagcggcagtcagttcgttcccgcagatcagaatctgccgcagaagttcctcagcgacgccgtgcaggatctgtttcccggtcaagcaatcgagaagaacgaatttctgagtcacgacaatcagaaatgtgacgaggataaacaccacacaaccgattccgcatcatggattaggtcaggcaccctttctccagaaattttcgagaaaagcaccatagactctaatgagaatcgtcgacacaatcagtggaaaaatagcttccatcccctcacaacacggtctaacagcatcatggattccttttgtgtccaacaagccgaggattgtctgtccgaaaagtcccggcttaacagaagcagcgtctccaaagaggtatttttgtctctcccacagcccaacaactccgactggattcaggggcacaccaggaaagaaatgggccagagtttggacagtgctaatacttctttcacagcaattctcagcagcccggacggagaactcgtggatgtcgcttgtgaagacctagagctctacgtgtctcgcaacaacgatatgctgacacctactcccgatagctcacctaggtcaacttccagtccctcacagtctaagaatggttccttcactccgagaacagccaatatcctcaaacctctgatgtccccaccctccagggaggaaatcatggctacactgctggatcacgacctgtccgaaacaatctaccaagagccattctgcagtaatcccagcgatgtgcccgagaagccacgagagatagggggtagacttctcatggtggagacgagactcgccaatgatctcgccgagtttgagggagacttctctctggaaggattgagattgtggaaaaccgcattttcggctatgactcagaatcccagacctggatcgcctttgcgttcaggtcagggggtagtgaacaaaggatcatcgaattcccctaaaatggtggaggacaagaaaatcgttataatgccatgtaagtgtgctccaagccggcagctggtccaagtgtggcttcaggctaaggaggagtatgaaagatctaaaaaactgccaaagaccaaacctacaggcgtcgtgaagagtgctgaaaatttcagctcaagcgtgaatccggacgataaacccgttgttccgcctaagatggatgtatcgccatgcatcctgcctaccaccgcccacacaaaggaggatgtcgataattctcagattgcgctacaagctcctacgacaggctgttctcagactgccagcgagtcccagatgctacctcccgtggcgtcggccagcgaccccgaaaaggacgaggacgatgatgacaactactatatttcatattcttcccccgactcccccgtgatcccaccctggcagcagccgatctcccctgatagcaaggctctgaacggcgatgaccgaccttctagcccagtggaggaactgcctagcttggccttcgaaaacttcctcaagcctatcaaggacgggatccagaagtccccctgctcggaaccccaagaaccgctggtgatcagcccaattaacacccgggcaaggacggggaagtgtgaaagcctttgcttccacagcacgccaattattcagcgtaaactactagagcgcctgccagaggctcctggactcagcccgctcagtacagaaccgaagacacagaaattatcaaataagaagggtagtaatacggacacactcaggagggtcctgcttacccaggccaagaaccagtttgccgcagtgaacacgccccagaaggaaacatcacagattgatggaccaagcctcaataatacctatgggtttaaagtgtccattcagaacctacaggaagccaaggccctgcatgaaattcaaaacctgactctgatctccgttgagctccatgccagaacccgacgggatctggaaccagatcctgaattcgatcctatttgtgccctgttttactgtatttcatccgataccccactgcccgacaccgaaaaaaccgagctgacaggtgttatcgttatcgacaaggataagacggtgttttctcaggacattagataccagacacctctgctaatcagaagcggtattaccggtttagaggttacatatgcggcagatgaaaaggccctcttccacgagatcgccaatataattaaaagatatgaccctgatattctgttgggctatgagattcagatgcattcttggggctatttgctgcagagggctgccgctttaagcattgacctttgccgaatgatctcccgcgtacccgacgacaaaattgaaaatcgcttcgctgcagaacgagatgagtacggctcctatacaatgtcagaaattaacatagtgggcagaataactctgaatctctggaggattatgcgaaatgaggtagcactgaccaactatacattcgagaacgtgtcttttcacgttctgcatcaacgctttccactgttcacatttagggtactttcagattggttcgataacaaaaccgatctgtataggtggaaaatggtagaccactatgttagcagggtgcgaggtaacctgcaaatgctggagcagttagatctgatcggaaagactagcgagatggccaggctgttcggcatacaatttctgcatgtgctcacccggggaagccagtacagagtcgagagcatgatgctcagaatcgccaagcctatgaactacatccctgttaccccatccgttcagcagcggagccagatgcgcgctcctcaatgcgtgccactgatcatggaacctgagtctcgcttttattccaactcagtgcttgttctggattttcagtctctgtatccgtctattgtgatcgcctacaattattgtttctccacgtgccttggccatgtggagaacctggggaaatatgacgaattcaaattcgggtgtacaagccttcgggttccgcctgatctgttgtaccaggttagacacgacattactgtctcaccaaacggcgtggcctttgtcaagcccagtgttagaaagggagttctccccagaatgcttgaggagatcctgaaaacaagattcatggtgaagcagagtatgaaggcctataaacaggaccgcgcactttccagaatgctagacgctaggcagctgggcctgaagcttattgccaacgtaaccttcgggtacacttctgcaaatttttcaggccgtatgccatgtatcgaagtgggcgatagcattgtccataaggccagagaaacactagagagggctatcaagttagtcaacgacacaaaaaagtggggagcgagggtagtatatggagataccgattcaatgttcgtgctgctcaagggggcaactaaagaacagagttttaaaataggccaggagattgcagaggccgtgaccgccaccaacccaaagcccgtgaaactcaagtttgaaaaggtctacttgccctgcgtcctccagacaaaaaagcgctacgtcggctatatgtacgaaacactggatcagaaggaccccgtgtttgatgccaaagggatcgagacagtccggcgtgattcctgtcccgctgtttctaaaattctggagaggagcctcaagttgttattcgagacaagggatattagtcttatcaagcagtacgtacagaggcagtgcatgaaactactggagggcaaagccagtatacaggactttattttcgccaaggaatacagaggttccttctcctacaagccaggtgcttgcgttcccgcactggagctgactcgcaaaatgctaacctatgataggagaagcgagccacaggtgggtgagagggtcccgtacgtgattatctacggaactcctggggtgccgctcattcagctggttcgacggcctgtggaggttctccaggatccgacacttaggttaaatgccacatattatatcaccaaacaaatcctgcctcccctcgccaggatcttctcgttgattggaattgacgtcttttcttggtatcacgagctccctcgaatccacaaagctaccagcagctcacgctcagagcccgaaggtcgcaaaggcacaatcagccagtattttacaaccctgcactgtcctgtttgtgatgatctgactcaacacgggatctgtagtaaatgtcgctcccagcctcagcacgtggcagtcatactgaaccaagagatcagggagttggagagacagcaggagcaactcgttaagatttgtaaaaattgcaccggatgttttgatcgccatattccttgcgtcagtctgaattgcccagtcctgtttaaactgtcccgtgtaaatagggagttatccaaggcaccgtatcttcgccagctgctcgatcagttcta

SEQ ID NO: 104767 - DNA, 9159 bp, Artificial Sequence
  derived and/or modified sequence
atggccttcagcatcgacagagccctgaacgtggccctgggcaaccccagcagcaccgcccagcacgtgttcaaggtgagcctggtgagcggcatgcccttctacggctaccacgagaaggagagacacttcatgaagatctacctgtacaaccccaccatggtgaagagaatctgcgagctgctgcagagcggcgccatcatgaacaagttctaccagccccacgaggcccacatcccctacctgctgcagctgttcatcgactacaacctgtacggcatgaacctgatcaacctggccgccgtgaagttcagaaaggccagaagaaagagcaacaccctgcacgccaccggcagctgcaagaaccacctgagcggcaacagcctggccgacaccctgttcagatgggagcaggacgagatccccagcagcctgatcctggagggcgtggagccccagagcacctgcgagctggaggtggacgccgtggccgccgacatcctgaacagactggacatcgaggcccagatcggcggcaaccccggcctgcaggccatctgggaggacgagaagcagagaagaagaaacagaaacgagaccagccagatgagccagcccgagagccaggaccacagattcgtgcccgccaccgagagcgagaagaagttccagaagagactgcaggagatcctgaagcagaacgacttcagcgtgaccctgagcggcagcgtggactacagcgacggcagccaggagttcagcgccgagctgaccctgcacagcgaggtgctgagccccgagatgctgcagtgcacccccgccaacatggtggaggtgcacaaggacaaggagagcagcaagggccacaccagacacaaggtggaggaggccctgatcaacgaggaggccatcctgaacctgatggagaacagccagaccttccagcccctgacccagagactgagcgagagccccgtgttcatggacagcagccccgacgaggccctggtgcacctgctggccggcctggagagcgacggctacagaggcgagagaaacagaatgcccagcccctgcagaagcttcggcaacaacaagtacccccagaacagcgacgacgaggagaacgagccccagatcgagaaggaggagatggagctgagcctggtgatgagccagagatgggacagcaacatcgaggagcactgcgccaagaagagaagcctgtgcagaaacacccacagaagcagcaccgaggacgacgacagcagcagcggcgaggagatggagtggagcgacaacagcctgctgctggccagcctgagcatcccccagctggacggcaccgccgacgagaacagcgacaaccccctgaacaacgagaacagcagaacccacagcagcgtgatcgccaccagcaagctgagcgtgaagcccagcatcttccacaaggacgccgccaccctggagcccagcagcagcgccaagatcaccttccagtgcaagcacaccagcgccctgagcagccacgtgctgaacaaggaggacctgatcgaggacctgagccagaccaacaagaacaccgagaagggcctggacaacagcgtgaccagcttcaccaacgagagcacctacagcatgaagtaccccggcagcctgagcagcaccgtgcacagcgagaacagccacaaggagaacagcaagaaggagatcctgcccgtgagcagctgcgagagcagcatcttcgactacgaggaggacatccccagcgtgaccagacaggtgcccagcagaaagtacaccaacatcagaaagatcgagaaggacagccccttcatccacatgcacagacaccccaacgagaacaccctgggcaagaacagcttcaacttcagcgacctgaaccacagcaagaacaaggtgagcagcgagggcaacgagaagggcaacagcaccgccctgagcagcctgttccccagcagcttcaccgagaactgcgagctgctgagctgcagcggcgagaacagaaccatggtgcacagcctgaacagcaccgccgacgagagcggcctgaacaagctgaagatcagatacgaggagttccaggagcacaagaccgagaagcccagcctgagccagcaggccgcccactacatgttcttccccagcgtggtgctgagcaactgcctgaccagaccccagaagctgagccccgtgacctacaagctgcagcccggcaacaagcccagcagactgaagctgaacaagagaaagctggccggccaccaggagaccagcaccaagagcagcgagaccggcagcaccaaggacaacttcatccagaacaacccctgcaacagcaaccccgagaaggacaacgccctggccagcgacctgaccaagaccaccagaggcgccttcgagaacaagacccccaccgacggcttcatcgactgccacttcggcgacggcaccctggagaccgagcagagcttcggcctgtacggcaacaagtacaccctgagagccaagagaaaggtgaactacgagaccgaggacagcgagagcagcttcgtgacccacaacagcaagatcagcctgccccaccccatggagatcggcgagagcctggacggcaccctgaagagcagaaagagaagaaagatgagcaagaagctgccccccgtgatcatcaagtacatcatcatcaacagattcagaggcagaaagaacatgctggtgaagctgggcaagatcgacagcaaggagaagcaggtgatcctgaccgaggagaagatggagctgtacaagaagctggcccccctgaaggacttctggcccaaggtgcccgacagccccgccaccaagtaccccatctaccccctgacccccaagaagagccacagaagaaagagcaagcacaagagcgccaagaagaagaccggcaagcagcagagaaccaacaacgagaacatcaagagaaccctgagcttcagaaagaagagaagccacgccatcctgagcccccccagccccagctacaacgccgagaccgaggactgcgacctgaactacagcgacgtgatgagcaagctgggcttcctgagcgagagaagcaccagccccatcaacagcagcccccccagatgctggagccccaccgaccccagagccgaggagatcatggccgccgccgagaaggaggccatgctgttcaagggccccaacgtgtacaagaagaccgtgaacagcagaatcggcaagaccagcagagccagagcccagatcaagaagagcaaggccaagctggccaaccccagcatcgtgaccaagaagagaaacaagagaaaccagaccaacaagctggtggacgacggcaagaagaagcccagagccaagcagaagaccaacgagaagggcaccagcagaaagcacaccaccctgaaggacgagaagatcaagagccagagcggcgccgaggtgaagttcgtgctgaagcaccagaacgtgagcgagttcgccagcagcagcggcggcagccagctgctgttcaagcagaaggacatgcccctgatgggcagcgccgtggaccaccccctgagcgccagcctgcccaccggcatcaacgcccagcagaagctgagcggctgcttcagcagcttcctggagagcaagaagagcgtggacctgcagaccttccccagcagcagagacgacctgcaccccagcgtggtgtgcaacagcatcggccccggcgtgagcaagatcaacgtgcagagaccccacaaccagagcgccatgttcaccctgaaggagagcaccctgatccagaagaacatcttcgacctgagcaaccacctgagccaggtggcccagaacacccagatcagcagcggcatgagcagcaagatcgaggacaacgccaacaacatccagagaaactacctgagcagcatcggcaagctgagcgagtacagaaacagcctggagagcaagctggaccaggcctacacccccaacttcctgcactgcaaggacagccagcagcagatcgtgtgcatcgccgagcagagcaagcacagcgagacctgcagccccggcaacaccgccagcgaggagagccagatgcccaacaactgcttcgtgaccagcctgagaagccccatcaagcagatcgcctgggagcagaagcagagaggcttcatcctggacatgagcaacttcaagcccgagagagtgaagcccagaagcctgagcgaggccatcagccagaccaaggccctgagccagtgcaagaacagaaacgtgagcacccccagcgccttcggcgagggccagagcggcctggccgtgctgaaggagctgctgcagaagagacagcagaaggcccagaacgccaacaccacccaggaccccctgagcaacaagcaccagcccaacaagaacatcagcggcagcctggagcacaacaaggccaacaagagaaccagaagcgtgaccagccccagaaagcccagaacccccagaagcaccaagcagaaggagaagatccccaagctgctgaaggtggacagcctgaacctgcagaacagcagccagctggacaacagcgtgagcgacgacagccccatcttcttcagcgaccccggcttcgagagctgctacagcctggaggacagcctgagccccgagcacaactacaacttcgacatcaacaccatcggccagaccggcttctgcagcttctacagcggcagccagttcgtgcccgccgaccagaacctgccccagaagttcctgagcgacgccgtgcaggacctgttccccggccaggccatcgagaagaacgagttcctgagccacgacaaccagaagtgcgacgaggacaagcaccacaccaccgacagcgccagctggatcagaagcggcaccctgagccccgagatcttcgagaagagcaccatcgacagcaacgagaacagaagacacaaccagtggaagaacagcttccaccccctgaccaccagaagcaacagcatcatggacagcttctgcgtgcagcaggccgaggactgcctgagcgagaagagcagactgaacagaagcagcgtgagcaaggaggtgttcctgagcctgccccagcccaacaacagcgactggatccagggccacaccagaaaggagatgggccagagcctggacagcgccaacaccagcttcaccgccatcctgagcagccccgacggcgagctggtggacgtggcctgcgaggacctggagctgtacgtgagcagaaacaacgacatgctgacccccacccccgacagcagccccagaagcaccagcagccccagccagagcaagaacggcagcttcacccccagaaccgccaacatcctgaagcccctgatgagcccccccagcagagaggagatcatggccaccctgctggaccacgacctgagcgagaccatctaccaggagcccttctgcagcaaccccagcgacgtgcccgagaagcccagagagatcggcggcagactgctgatggtggagaccagactggccaacgacctggccgagttcgagggcgacttcagcctggagggcctgagactgtggaagaccgccttcagcgccatgacccagaaccccagacccggcagccccctgagaagcggccagggcgtggtgaacaagggcagcagcaacagccccaagatggtggaggacaagaagatcgtgatcatgccctgcaagtgcgcccccagcagacagctggtgcaggtgtggctgcaggccaaggaggagtacgagagaagcaagaagctgcccaagaccaagcccaccggcgtggtgaagagcgccgagaacttcagcagcagcgtgaaccccgacgacaagcccgtggtgccccccaagatggacgtgagcccctgcatcctgcccaccaccgcccacaccaaggaggacgtggacaacagccagatcgccctgcaggcccccaccaccggctgcagccagaccgccagcgagagccagatgctgccccccgtggccagcgccagcgaccccgagaaggacgaggacgacgacgacaactactacatcagctacagcagccccgacagccccgtgatccccccctggcagcagcccatcagccccgacagcaaggccctgaacggcgacgacagacccagcagccccgtggaggagctgcccagcctggccttcgagaacttcctgaagcccatcaaggacggcatccagaagagcccctgcagcgagccccaggagcccctggtgatcagccccatcaacaccagagccagaaccggcaagtgcgagagcctgtgcttccacagcacccccatcatccagagaaagctgctggagagactgcccgaggcccccggcctgagccccctgagcaccgagcccaagacccagaagctgagcaacaagaagggcagcaacaccgacaccctgagaagagtgctgctgacccaggccaagaaccagttcgccgccgtgaacaccccccagaaggagaccagccagatcgacggccccagcctgaacaacacctacggcttcaaggtgagcatccagaacctgcaggaggccaaggccctgcacgagatccagaacctgaccctgatcagcgtggagctgcacgccagaaccagaagagacctggagcccgaccccgagttcgaccccatctgcgccctgttctactgcatcagcagcgacacccccctgcccgacaccgagaagaccgagctgaccggcgtgatcgtgatcgacaaggacaagaccgtgttcagccaggacatcagataccagacccccctgctgatcagaagcggcatcaccggcctggaggtgacctacgccgccgacgagaaggccctgttccacgagatcgccaacatcatcaagagatacgaccccgacatcctgctgggctacgagatccagatgcacagctggggctacctgctgcagagagccgccgccctgagcatcgacctgtgcagaatgatcagcagagtgcccgacgacaagatcgagaacagattcgccgccgagagagacgagtacggcagctacaccatgagcgagatcaacatcgtgggcagaatcaccctgaacctgtggagaatcatgagaaacgaggtggccctgaccaactacaccttcgagaacgtgagcttccacgtgctgcaccagagattccccctgttcaccttcagagtgctgagcgactggttcgacaacaagaccgacctgtacagatggaagatggtggaccactacgtgagcagagtgagaggcaacctgcagatgctggagcagctggacctgatcggcaagaccagcgagatggccagactgttcggcatccagttcctgcacgtgctgaccagaggcagccagtacagagtggagagcatgatgctgagaatcgccaagcccatgaactacatccccgtgacccccagcgtgcagcagagaagccagatgagagccccccagtgcgtgcccctgatcatggagcccgagagcagattctacagcaacagcgtgctggtgctggacttccagagcctgtaccccagcatcgtgatcgcctacaactactgcttcagcacctgcctgggccacgtggagaacctgggcaagtacgacgagttcaagttcggctgcaccagcctgagagtgccccccgacctgctgtaccaggtgagacacgacatcaccgtgagccccaacggcgtggccttcgtgaagcccagcgtgagaaagggcgtgctgcccagaatgctggaggagatcctgaagaccagattcatggtgaagcagagcatgaaggcctacaagcaggacagagccctgagcagaatgctggacgccagacagctgggcctgaagctgatcgccaacgtgaccttcggctacaccagcgccaacttcagcggcagaatgccctgcatcgaggtgggcgacagcatcgtgcacaaggccagagagaccctggagagagccatcaagctggtgaacgacaccaagaagtggggcgccagagtggtgtacggcgacaccgacagcatgttcgtgctgctgaagggcgccaccaaggagcagagcttcaagatcggccaggagatcgccgaggccgtgaccgccaccaaccccaagcccgtgaagctgaagttcgagaaggtgtacctgccctgcgtgctgcagaccaagaagagatacgtgggctacatgtacgagaccctggaccagaaggaccccgtgttcgacgccaagggcatcgagaccgtgagaagagacagctgccccgccgtgagcaagatcctggagagaagcctgaagctgctgttcgagaccagagacatcagcctgatcaagcagtacgtgcagagacagtgcatgaagctgctggagggcaaggccagcatccaggacttcatcttcgccaaggagtacagaggcagcttcagctacaagcccggcgcctgcgtgcccgccctggagctgaccagaaagatgctgacctacgacagaagaagcgagccccaggtgggcgagagagtgccctacgtgatcatctacggcacccccggcgtgcccctgatccagctggtgagaagacccgtggaggtgctgcaggaccccaccctgagactgaacgccacctactacatcaccaagcagatcctgccccccctggccagaatcttcagcctgatcggcatcgacgtgttcagctggtaccacgagctgcccagaatccacaaggccaccagcagcagcagaagcgagcccgagggcagaaagggcaccatcagccagtacttcaccaccctgcactgccccgtgtgcgacgacctgacccagcacggcatctgcagcaagtgcagaagccagccccagcacgtggccgtgatcctgaaccaggagatcagagagctggagagacagcaggagcagctggtgaagatctgcaagaactgcaccggctgcttcgacagacacatcccctgcgtgagcctgaactgccccgtgctgttcaagctgagcagagtgaacagagagctgagcaaggccccctacctgagacagctgctggaccagttctag

SEQ ID NO: 104768 - protein, 169 aa, Artificial Sequence
  derived and/or modified sequence
  misc_feature (1)..(1): Xaa can be any naturally occurring amino acid
XWRSALRGLRCGPRAPGPSLLVRHGSGGPSWTRERTLVAVKPDGVQRRLVGDVIQRFERRGFTLVGMKMLQAPESVLAEHYQDLRRKPFYPALIRYMSSGPVVAMVWEGYNVVRASRAMIGHTDSAEAAPGTIRGDFSVHISSHRLAPLDRGQREQQMVPGIPQGAHEA

SEQ ID NO: 104769 - DNA, 510 bp, Artificial Sequence
  derived and/or modified sequence
tgatggagaagcgccctgagaggcctgagatgcggccccagagcccccggccccagcctgctggtgagacacggcagcggcggccccagctggaccagagagagaaccctggtggccgtgaagcccgacggcgtgcagagaagactggtgggcgacgtgatccagagattcgagagaagaggcttcaccctggtgggcatgaagatgctgcaggcccccgagagcgtgctggccgagcactaccaggacctgagaagaaagcccttctaccccgccctgatcagatacatgagcagcggccccgtggtggccatggtgtgggagggctacaacgtggtgagagccagcagagccatgatcggccacaccgacagcgccgaggccgcccccggcaccatcagaggcgacttcagcgtgcacatcagcagccacagactggcccccctggacagaggccagagagagcagcagatggtgcccggcatcccccagggcgcccacgaggcctag

SEQ ID NO: 104770 - DNA, 510 bp, Artificial Sequence
  derived and/or modified sequence
tagtggcggtctgcactgcgagggttgcggtgcggacctagggccccaggtccttctctgcttgtcaggcatggctcagggggcccttcatggacacgggagcgcaccctggtggccgtcaagccagatggagttcaaaggcgtctcgtaggcgatgtgatccagcggttcgaacgccgggggtttactctggttgggatgaagatgttgcaggcccctgagagcgtgttagcagaacattatcaggatcttcggcgaaaacccttctaccctgccctgatccgatatatgtcatccggccccgtggtggcgatggtgtgggaagggtataatgtggtcagggcaagcagggccatgatcggccacaccgattctgcggaagctgctccagggactatacggggcgatttctctgtgcacatcagttctcatagactggccccactggatcgcggtcagcgtgagcagcaaatggtgccggggattccccagggggcccacgaagcttag

SEQ ID NO: 104771 - DNA, 510 bp, Artificial Sequence
  derived and/or modified sequence
tgatggaggtctgccctgcggggcctgcgctgtggcccccgggcccctggccccagcctgctggtgcgccacggcagcggcggccccagctggacccgggagaggaccctggtggccgtgaagccagatggagtgcagaggcggctggtgggagatgtgatccagagatttgaaagaagaggcttcaccctggtgggcatgaagatgctgcaggcccctgagagcgtgctggccgagcactaccaggacctgcggaggaagcccttctacccagccctgatccgctacatgagcagcggccctgtggtggccatggtgtgggagggctacaacgtggtgcgggccagccgggccatgattggccacacagattctgctgaggccgcccctggcaccatccggggggacttctctgtgcacatcagcagccaccggctggcccccctggaccggggccagcgggagcagcagatggtgcccggcatcccccagggcgcccacgaggcctag

SEQ ID NO: 104772 - DNA, 510 bp, Artificial Sequence
  derived and/or modified sequence
tgatggcggagcgccctgcggggcctgcggtgcggcccccgggccccaggtccctcactcctcgtgcggcacggcagtggcgggcctagttggacacgagaacgcacactggtcgccgtcaagccagacggcgtgcagaggcggctggtcggagatgtgattcagcgattcgaaaggcggggatttacgcttgttggtatgaaaatgttgcaggcacccgagtccgtactcgccgagcattatcaagacctccggaggaagccgttctatcctgcactgatcagatacatgagttctggacctgtggttgccatggtgtgggaaggctataacgtcgtcagagccagtagagccatgatcggacacactgatagcgctgaggccgccccgggaacaatcagaggtgattttagtgttcatattagtagtcacagactggccccactcgatagaggccagcgtgagcagcagatggtacctggaatccctcagggggcccacgaagcctag

SEQ ID NO: 104773 - DNA, 966 bp, Artificial Sequence
  derived and/or modified sequence
ctggcgctccgcgctgcgggggctgcgctgcggcccgcgggccccgggcccgagcctgctagtgcgccacggctcgggagggccctcctggacccgggagcggaccctggtggcggtgaagcccgatggcgtgcaacggcggctcgttggggacgtgatccagcgctttgagaggcggggcttcacgctggtggggatgaagatgctgcaggcaccagagagcgtccttgccgagcactaccaggacctgcggaggaagcccttctaccctgccctcatccgctacatgagctctgggcctgtggtggccatggtctgggaagggtacaatgtcgtccgcgcctcgagggccatgattggacacaccgactcggctgaggctgccccaggaaccataaggggtgacttcagcgtccacatcagcagtcacaggcttgctcccctagacagagggcaacgggagcagcagatggtccctgggattcctcagggtgcacatgaagcctgagcctcacattgctcctgtcctggcacaggaatgtcatccacgccagcgactccgtggagggggcccagcgggagatccagctgtggttccagagcagtgagctggtgagctgggcagacgggggccagcacagcagcatccacccagcctgaggctcaagctgcccttaccaccccatcccccacgcaggaccaactacctccgtcagcaagaacccaagcccacatccaaacctgcctgtcccaaaccacttacttccctgttcacctctgccccaccccagcccagaggagtttgagccaccaacttcagtgcctttctgtaccccaagccagcacaagattggaccaatcctttttgcaccaaagtgccggacaacctttgtggtgggggggggtcttcacattatcataacctctcctctaaaggggaggcattaaaattcactgtgcccagca

SEQ ID NO: 104774 - DNA, 719 bp, Artificial Sequence
  derived and/or modified sequence
attggagggggctcagaccagggcttctagacctccttttggtccgtgaatttatttttgagacagagtcttgctctattgctcaggctggagtgcagcggtgcagtcacagctcactgcagcctcaatctcctgggctcacgcgatcctcctgcctcagcctcccgagtgggccttcctccgtgggaaagcgttaaaacgatagttaacggttgcgtcggtgtaaagacgaatgcaattcgagaaggattcattattattttgttttttcttctgatttttaacagaaattggcgttgaacatttccccccgtcccctccagaggaggacggctggggcggagctcagcgctgaccctgggtctggaagcgacaggccttgaaactccacagcagcacaggccccgtctcctggctcggacagaaccctgctaccttccctcttcaatcttcaggcccctttttgtccgtgtttccagggctcacctggagggccctcctggacccgggagcggaccctggtggcggtgaagcccgatggcgtgcaacggcggctcgttggggacgtgatccagcgctttgagaggcggggcttcacgctggtggggatgaagatgctgcaggcaccagagagcgtccttgccgagcactaccaggacctgcggaggaagcccttctaccctgccctcatccgctacatgagctctgggcctgtggtg

SEQ ID NO: 104775 - DNA, 510 bp, Artificial Sequence
  derived and/or modified sequence
tagtggcgcagtgctctgcgcggactcaggtgtggcccacgagccccagggccaagtctattggtaagacatggctctggcggaccttcctggacacgcgagaggactctggtggctgtaaagcctgacggtgttcaaagacgactggtgggagatgtcatccaacgttttgagagacgcggatttactctcgtgggtatgaagatgctccaggcaccagagtctgtcctggctgagcattaccaggatttgcggaggaaacccttctatcctgcccttattcggtacatgtcatctgggcctgtggtagcaatggtgtgggagggctataatgtggtccgcgcatccagggccatgatcggccacaccgactcagctgaggcggcaccgggaaccatcaggggagacttttcagtgcacatatcctcgcaccgcttggctcccctcgaccggggtcagagggagcagcaaatggtccccggtataccacagggggcacacgaagcctag

SEQ ID NO: 104776 - protein, 117 aa, Artificial Sequence
  derived and/or modified sequence
MKMLQAPESVLAEHYQDLRRKPFYPALIRYMSSGPVVAMVWEGYNVVRASRAMIGHTDSAEAAPGTIRGDFSVHISRNVIHASDSVEGAQREIQLWFQSSELVSWADGGQHSSIHPA

SEQ ID NO: 104777 - protein, 37 aa, Artificial Sequence
  derived and/or modified sequence
MKMLQAPESVLAEHYQDLRRKPFYPALIRYMSSGPVV

SEQ ID NO: 104778 - DNA, 354 bp, Artificial Sequence
  derived and/or modified sequence
atgaagatgctgcaggcccccgagagcgtgctggccgagcactaccaggacctgagaagaaagcccttctaccccgccctgatcagatacatgagcagcggccccgtggtggccatggtgtgggagggctacaacgtggtgagagccagcagagccatgatcggccacaccgacagcgccgaggccgcccccggcaccatcagaggcgacttcagcgtgcacatcagcagaaacgtgatccacgccagcgacagcgtggagggcgcccagagagagatccagctgtggttccagagcagcgagctggtgagctgggccgacggcggccagcacagcagcatccaccccgcctag

SEQ ID NO: 104779 - DNA, 114 bp, Artificial Sequence
  derived and/or modified sequence
atgaagatgctgcaggcccccgagagcgtgctggccgagcactaccaggacctgagaagaaagcccttctaccccgccctgatcagatacatgagcagcggccccgtggtgtag

SEQ ID NO: 104780 - DNA, 354 bp, Artificial Sequence
  derived and/or modified sequence
atgaaaatgcttcaggcgccagaatctgtgctggcagagcactaccaagacctgcgtaggaagcctttctacccggcgctgatccgatacatgagctccggccccgtcgtagcgatggtttgggagggatacaacgtggtgcgggccagtcgagcaatgattggtcacacagattctgctgaagccgctcccggcacaattcgcggcgacttttcagtgcacatttccagaaatgtcatacacgcctcagattctgtggaaggggcacagagggagatccagttatggtttcagagcagcgaactggtttcttgggctgacggcggacagcattctagcatccacccagcttag

SEQ ID NO: 104781 - DNA, 354 bp, Artificial Sequence
  derived and/or modified sequence
atgaagatgctccaggccccagaatccgtgttggctgaacattatcaagacttacggaggaagccgttctatcctgccctgatcagatacatgtctagcggacccgtagtggcaatggtatgggagggttacaacgtggtgcgcgcgagtcgcgctatgattgggcacacagatagtgccgaggcagcccccgggacaattcggggagacttctcagtgcatatatcacgcaacgtcatccatgcctcagattcagtcgaaggagctcagagggagatccagctctggttccagtcttccgaactagtctcttgggccgacgggggacagcattcctcgattcatccagcttag

SEQ ID NO: 104782 - DNA, 114 bp, Artificial Sequence
  derived and/or modified sequence
atgaaaatgctccaggctcctgagtctgtcctggcagagcactaccaggatctacgtcggaagccattctaccctgcgttaatcaggtacatgtcatctggcccagttgtgtag

SEQ ID NO: 104783 - DNA, 354 bp, Artificial Sequence
  derived and/or modified sequence
atgaagatgctgcaggcccctgagagcgtgctggccgagcactaccaggacctgcggaggaagcccttctacccagccctgatccgctacatgagcagcggccctgtggtggccatggtgtgggagggctacaacgtggtgcgggccagccgggccatgattggccacacagattctgctgaggccgcccctggcaccatccggggggacttctctgtgcacatcagcagaaatgtcatccacgccagtgacagcgtggagggcgcccagcgggagatccagctgtggttccagagcagcgagctggtgtcctgggcagatggcggccagcacagcagcatccacccagcctag

SEQ ID NO: 104784 - DNA, 114 bp, Artificial Sequence
  derived and/or modified sequence
atgaagatgctgcaggcccctgagagcgtgctggccgagcactaccaggacctgcggaggaagcccttctacccagccctgatccgctacatgagcagcggccctgtggtgtag

SEQ ID NO: 104785 - DNA, 354 bp, Artificial Sequence
  derived and/or modified sequence
atgaagatgctgcaggcccccgagagcgtgctggccgagcactaccaggatctgaggcggaagcctttctacccagccctgatcagatacatgtctagcgggccagtggtggcgatggtgtgggaggggtataacgttgtccgggccagccgagcaatgatcggacacacagatagtgcagaggccgccccaggtaccatcaggggcgatttctctgtccacattagccgcaatgtgatccacgccagcgactcggttgagggagcccagcgcgaaatccagttgtggttccagagctccgaactcgtttcctgggcagacggtggtcagcattcatccatacaccctgcctag

SEQ ID NO: 104786 - DNA, 354 bp, Artificial Sequence
  derived and/or modified sequence
atgaagatgctgcaggcccccgagagcgtgctggccgagcactaccaggacctcagacgcaaacctttctaccccgctctgatccgatatatgtcctccggccctgtcgtcgcgatggtctgggaaggctacaatgtcgtccgggcatcccgtgccatgattggacacacggactcagccgaggctgctcccggcacaattcgcggcgatttctccgtgcatataagccgcaacgtgatacatgcgtcggactctgtggaaggcgctcagcgtgagatacagctctggttccagagtagcgaacttgtctcgtgggctgatggtggccagcactctagtattcacccagcctag

SEQ ID NO: 104787 - DNA, 114 bp, Artificial Sequence
  derived and/or modified sequence
atgaagatgctgcaggcccccgagagcgtgctggccgagcactaccaggacctgcgtcgcaaacctttctatcccgctctaattcggtatatgtctagcggcccagttgtgtag

SEQ ID NO: 104788 - DNA, 354 bp, Artificial Sequence
  derived and/or modified sequence
atgaaaatgctccaggccccagaatccgtgctggccgaacattaccaggacctgagacggaaacctttttacccagcactgatccggtatatgtctagtgggccagtggttgccatggtctgggaggggtataacgtggtgagagctagccgtgctatgatcggccatactgacagcgccgaggcagccccaggcacgatcagaggtgatttttccgtgcacatcagccgcaacgtgatccatgccagcgatagtgtggagggcgcacagagggaaattcaactctggtttcagtcaagtgagctcgtatcctgggcggatgggggacagcactcatcgatccatccagcctag

SEQ ID NO: 104789 - DNA, 354 bp, Artificial Sequence
  derived and/or modified sequence
atgaaaatgctgcaggctccggaaagtgtgttggccgaacactatcaggatcttagaaggaagccattttaccctgctctaattagatatatgtccagcggcccagtggtggcaatggtatgggagggttataacgtggttcgggctagccgagcaatgatcggccacaccgatagcgccgaggcagcacctggcactatacgcggtgacttttctgtgcacattagtcgcaacgtcatccacgcctctgacagcgtggagggagcccagcgcgaaatccagttatggttccagagctccgagctagtgtcctgggctgatggcggacagcatagttccattcaccccgcatag

SEQ ID NO: 104790 - DNA, 114 bp, Artificial Sequence
  derived and/or modified sequence
atgaagatgctgcaggcccctgagtctgtgctggctgaacactaccaagatctgagaagaaaacctttttacccagccctgatccgctatatgtcctctggtcccgttgtgtag

SEQ ID NO: 104791 - protein, 1047 aa, Artificial Sequence
  derived and/or modified sequence
MQFFDAEELLVDEEDDVFGEGLPTRLPEIMLVGSQSFSPGGPNGIIRSQSFAGFSGLQERRSRCNSFIENSSALKKPQAKLKKMHNLGHKNNNPPKEPQPKRVEEVYRALKNGLDEYLEVHQTELDKLTAQLKDMKRNSRLGVLYDLDKQIKTIERYMRRLEFHISKVDELYEAYCIQRRLQDGASKMKQAFATSPASKAARESLTEINRSFKEYTENMCTIEVELENLLGEFSIKMKGLAGFARLCPGDQYEIFMKYGRQRWKLKGKIEVNGKQSWDGEETVFLPLIVGFISIKVTELKGLATHILVGSVTCETKELFAARPQVVAVDINDLGTIKLNLEITWYPFDVEDMTASSGAGNKAAALQRRMSMYSQGTPETPTFKDHSFFSNLPDDIFENGKAAEEKMPLSLSFSDLPNGDCALTSHSTGSPSNSTNPEITITPAEFNLSSLASQNEGMDDTSSASSRNSLGEGQEPKSHLKEEDPEEPRKPASAPSEACRRQSSGAGAEHLFLENDVAEALLQESEEASELKPVELDTSEGNITKQLVKRLTSAEVPMATDRLLSEGSVGGESEGCRSFLDGSLEDAFNGLLLALEPHKEQYKEFQDLNQEVMNLDDILKCKPAVSRSRSSSLSLTVESALESFDFLNTSDFDEEEDGDEVCNVGGGADSVFSDTETEKHSYRSVHPEARGHLSEALTEDTGVGTSVAGSPLPLTTGNESLDITIVRHLQYCTQLVQQIVFSSKTPFVARSLLEKLSRQIQVMEKLAAVSDENIGNISSVVEAIPEFHKKLSLLSFWTKCCSPVGVYHSPADRVMKQLEASFARTVNKEYPGLADPVFRTLVSQILDRAEPLLSSSLSSEVVTVFQYYSYFTSHGVSDLESYLSQLARQVSMVQTLQSLRDEKLLQTMSDLAPSNLLAQQEVLRTLALLLTREDNEVSEAVTLYLAAASKNQHFREKALLYYCEALTKTNLQLQKAACLALKILEATESIKMLVTLCQSDTEEIRNVASETLLSLGEDGRLAYEQLDKFPRDCVKVGGRHGTEVATAF

SEQ ID NO: 104792 - DNA, 3256 bp, Artificial Sequence
  derived and/or modified sequence
agtgtgactgctgagactgccggggctgctgcctgctgcttctcgcgcctgtcctctccaagatgcagttttttgatgctgaggagctcctggtcgatgaagaggatgatgtttttggtgaaggactaccgaccagactcccggaaatcatgttggtaggatcccagtctttttcgcctggagggcccaatgggatcattagaagccagtcctttgcgggtttcagcggcctccaggaaaggcgatccaggtgtaactccttcattgaaaattcctccgctctcaagaagcctcaggccaaactgaagaaaatgcacaatttaggccacaaaaacaacaatccccccaaagagcctcagcctaaaagggtggaagaagtctacagggccttgaaaaatggacttgatgaatatctggaggttcaccagacggagctggacaagttgacagctcagttaaaagatatgaaaagaaactctcgcctgggtgtactgtatgacctagacaagcaaattaaaacaattgaaagatacatgagacgcctggagtttcatataagtaaggtagatgaactctatgaagcttattgtatccagcgacgcctccaggatggtgccagcaaaatgaagcaagccttcgcaacatcccctgccagcaaagctgcccgggagagtctgacagagatcaatcggagcttcaaggagtacacagagaatatgtgcaccattgaagtggagctagagaatctgctgggagaattctccatcaagatgaaaggtctggctggctttgcacgcctctgtcctggagatcaatatgaaattttcatgaagtatggccggcagcggtggaaactgaaaggcaaaatagaagtaaatggcaagcagagctgggatggagaagaaacagtttttctgcccctgatagttgggttcatctccatcaaggtcacggagctcaaagggctagcaactcacatcctggtaggtagcgtgacctgtgagaccaaagagctgtttgcagcccgacctcaggtagtggctgtcgacatcaatgaccttggtaccatcaaactgaacctggaaatcacctggtatccatttgacgtggaggacatgaccgcatcctcaggcgctgggaacaaggcagcagcccttcagaggagaatgtccatgtacagccagggtaccccggaaacgcccaccttcaaagaccactccttcttttcaaatctacctgatgacatctttgaaaatggaaaggcagccgaggagaaaatgccactgtcgctcagcttcagtgacctgcccaacggggactgcgccctcacctcccactcaacaggctccccttccaactcaacaaatccagaaattaccatcacccctgcggagtttaacctcagcagcttggcctcccagaatgagggtatggatgacaccagctcagcatcttccaggaactccctgggagaaggccaagagccaaagtcacacctgaaggaggaagacccagaggagcccagaaaacctgcctcggccccatctgaggcttgccgccgacagtcctcaggtgctggggctgagcacctgttccttgagaatgatgttgcagaagcacttctgcaagagtctgaggaggcctctgagctcaagcctgtggaactggacacttcggaaggaaacatcacaaagcagctggtcaagaggctcacatctgcagaggtgccaatggccacagacaggctgctctctgagggttctgttggtggagaatctgaaggctgcagatcctttctagatggaagcttagaggatgcttttaatgggcttttacttgcattagaaccacataaagagcagtataaagagtttcaggatctgaaccaagaagtcatgaatttggatgatattctaaaatgcaagccagcagtaagccgcagcaggtcttccagtttaagtctcacagttgaaagtgctttagaaagctttgatttcctgaacacctctgattttgacgaggaggaggatggtgatgaggtttgtaatgttggcggaggtgctgactcagtattttcagacactgagactgagaaacacagttacaggtcggttcacccagaagccagggggcatctcagtgaagcgctcactgaagacacaggagttgggaccagtgtggcaggaagtcctctcccactgaccacaggcaacgagagcctggacatcaccatcgtcaggcacctccagtactgcacccaactcgtgcagcaaattgttttctcaagcaaaaccccatttgtggcaagaagtctcttagagaagctttctaggcagatccaagtgatggagaaactcgcagctgtcagtgatgagaacataggaaatatcagttctgttgtggaagccataccagaatttcacaaaaagctgtctttgctgtcattctggaccaagtgctgcagccctgttggtgtctaccacagcccagcggacagagtgatgaagcagctggaggccagctttgccagaactgtcaacaaagaatatccaggacttgcagacccagtgtttcgaaccctggtgtcccaaattctggaccgggctgagcctctgctttcctccagcctgtcctcggaagtcgtcactgttttccagtattacagttacttcaccagccacggcgtcagtgacctggagagttacctgagccagctggccaggcaagtttccatggttcagactctgcaatcactaagagatgaaaaactgctacaaaccatgagtgaccttgctcccagcaacctcctggcccagcaggaagtactcaggactctggctctgctattaaccagagaggacaacgaagttagtgaggctgtgacgctttacttggcagcagcctccaaaaatcagcatttcagggaaaaggccttgctctattactgtgaagcactaacaaagacaaacctccagctccagaaagcagcttgcctggctctgaaaatccttgaggctactgaaagcattaaaatgctggtgacattgtgtcaatctgatactgaagaaatcagaaatgtggcctcagaaaccctcttgtctctgggagaagatgggcggctggcatatgaacaattggacaaatttcctcgagactgtgttaaagtcggaggtcgtcatggaactgaagttgccacagccttttaattacaggttaactgcctaacagctgtcttaatatctggcccttttcatca

SEQ ID NO: 104793 - DNA, 3144 bp, Artificial Sequence
  derived and/or modified sequence
atgcagttcttcgatgccgaggagctgttggtggatgaggaggacgatgttttcggagaggggcttcctactcggctgccggaaatcatgcttgtggggtcgcagagcttttctccaggcgggccgaacggcattattcgtagtcaatcgttcgcaggcttctcgggcctgcaagaaagacgctcccgctgtaattccttcatcgagaatagtagcgcactaaaaaagccgcaggctaaacttaagaagatgcacaacctcgggcacaagaacaacaaccctccgaaggaaccacagcccaaaagggtcgaagaggtctaccgcgcactgaaaaacggactggacgagtacctggaggttcaccagaccgagctggataagctgacggcccagctgaaagatatgaaaagaaactcacggctgggcgttttgtatgaccttgacaaacagatcaagaccattgagaggtatatgaggcggcttgaattccatatcagtaaggtggatgaactatatgaggcctactgtatacagcgacgtctgcaggatggtgcctctaaaatgaaacaggcttttgcaacttcccccgcctctaaagcagcaagggaatctcttaccgagattaaccggtcttttaaagaatacacagagaatatgtgcacaattgaggtggaactcgagaatcttctgggagaattttccattaaaatgaagggactggccgggttcgctcgcctctgccccggggatcaatatgaaattttcatgaagtacggcagacagagatggaaacttaaagggaaaatagaagtcaacgggaaacagtcctgggatggagaagaaaccgtcttcttgccacttattgtcggctttattagcattaaagttacggagcttaaaggcctggctacacatatcctcgtcgggagcgtgacatgcgaaaccaaggaattgtttgctgcccgcccacaagttgtggccgttgatatcaatgacctgggtactataaagcttaacctcgaaattacatggtacccttttgatgtagaagatatgactgcctcgagcggagcgggcaacaaagctgctgccttgcaacgccggatgagtatgtactcccaggggactccggaaacgcctaccttcaaagatcatagcttcttcagcaaccttcctgacgatatctttgaaaacggcaaagcagcggaagaaaagatgcccctcagcctttcgttttcggacctgccaaacggggattgtgctttaacatcacactctacaggaagtcccagcaactccactaatcccgagatcacaatcacaccagccgagttcaacttaagtagtctcgctagccagaacgaagggatggatgacacgtctagcgcgtcaagtagaaattcactcggcgagggccaagagcctaagtctcacttaaaagaggaagaccccgaagagccgcgcaaacccgccagcgcccctagcgaagcttgcagacgccagtcttctggtgccggggcggaacacctcttcctggaaaacgacgttgctgaagcgctgctgcaggagtcagaagaagcctccgaactgaaacctgtggaactggacacctccgaggggaacatcacaaaacaactcgtaaagcgcctgacttctgcagaggtcccgatggccactgatcggttactgagtgaaggctctgtagggggcgagagcgaaggatgccgttcctttctcgacggcagcttagaagatgcttttaacgggctcttattggcgctggagccacataaagagcagtataaggaatttcaagacttaaatcaggaggtcatgaacctggacgacattctaaagtgtaagccagcagttagccgctcgaggtcctcttccctttcactgaccgtggaaagcgcactggagtccttcgatttcctgaacacttcagacttcgatgaagaggaggatggtgacgaggtatgcaatgtgggcggaggagcggactccgtcttttctgacacagagacggaaaaacacagttataggtccgtgcacccagaggccaggggacacctgtctgaagcactgactgaggataccggcgtcggcacctcagtggccggaagtcctttgcccttaacaaccgggaacgagagcttagacattaccatagtcaggcaccttcagtattgtacgcaactcgtgcagcagatcgtattctcatctaagactccctttgtggcgcgcagcttactggaaaagctgtctcgtcaaatccaggtaatggaaaaactcgccgccgtcagcgatgaaaacatcggcaacatatcttctgtcgtagaggcaattccagaatttcacaaaaaactgtctctgttatccttctggactaaatgctgctcacctgtgggggtgtaccacagtcctgcagaccgggtcatgaagcaactcgaggcatctttcgctcggaccgttaacaaggagtaccccggcctggccgacccagtcttccggacactcgtgtctcagatccttgacagagccgagcctctcctgtccagttcactttcctctgaagttgtgacagttttccagtactacagctattttacaagccatggcgttagcgatctagaatcctacctgagccagctggccaggcaagtcagcatggtacagacactccaaagcctgagggacgagaaacttctgcagacaatgtccgatctggcgcccagcaacctcctcgctcagcaggaagtgcttaggactctggccctgctcttgacccgagaagataatgaagtgtcagaagcagtcaccctgtatcttgccgctgcgagcaagaaccaacattttagggagaaggcactcctgtattattgtgaggccctgaccaagaccaacttacagttgcagaaagcagcctgcctggcccttaagatcctggaagccacggaaagtatcaaaatgttggtcactctctgccagtcggatactgaggagattagaaatgtcgccagcgaaacactcctctccctgggtgaagacgggagactggcctacgagcaactggataaatttccgagagactgcgttaaagtgggcggacgccacggtacagaggtagctacagctttctag

SEQ ID NO: 104794 - DNA, 3144 bp, Artificial Sequence
  derived and/or modified sequence
atgcagttctttgatgctgaggagctgctggtggatgaggaggatgatgtgtttggagagggcctgcccacccggctgcctgagatcatgctggtgggcagccagagcttcagccctgggggccccaacggcatcatccgcagccagagctttgctggcttcagcggcctgcaggagcggcgcagccgctgcaacagcttcatcgagaacagcagcgccctgaagaagccccaggccaagctgaagaagatgcacaacctgggccacaagaacaacaacccccccaaggagccccagcccaagagggtggaggaggtgtaccgggccctgaagaatggcctggatgagtacctggaggtgcaccagacagagctggacaagctgacagcccagctgaaggacatgaagaggaacagccggctgggcgtgctgtatgacctggacaagcagatcaagaccatcgagcgctacatgaggcggctggagttccacatcagcaaggtggatgagctgtatgaggcctactgcatccagaggcggctgcaggatggagccagcaagatgaagcaggcctttgccaccagccctgccagcaaggccgcccgggagagcctgacagagatcaacagaagcttcaaggagtacacagagaacatgtgcaccatcgaggtggagctggagaacctgctgggggagttcagcatcaagatgaagggcctggccggctttgcccggctgtgccctggggaccagtatgagatcttcatgaagtatggccggcagcgctggaagctgaagggcaagattgaggtgaatggcaagcagagctgggatggagaggagaccgtcttcctgcccctcatcgtgggcttcatcagcatcaaggtgacagagctgaagggcctggccacccacatcctggtgggctctgtgacctgtgagaccaaggagctgtttgctgcccggccccaggtggtggccgtggacatcaatgacctgggcaccatcaagctgaacctggagatcacctggtacccctttgatgtggaggacatgacagccagcagcggggccggcaacaaggctgctgccctgcagaggaggatgtccatgtacagccagggcaccccagagacccccaccttcaaggaccacagcttcttcagcaacctgcctgatgacatctttgaaaatggcaaggctgctgaggagaagatgcccctgagcctgtccttcagtgacctgcccaatggagactgtgccctgaccagccacagcacaggcagccccagcaacagcaccaaccctgagatcaccatcaccccagctgagttcaacctgagcagcctggccagccagaatgaaggcatggatgacaccagcagcgccagcagcaggaacagcctgggggagggccaggagcccaagagccacctgaaggaggaggaccctgaggagcccaggaagccagccagcgcccccagcgaggcctgccggcggcagagcagtggagctggagctgagcacctgttcctggagaatgatgtggccgaggccctgctgcaggagagcgaggaggccagcgagctgaagcctgtggagctggacaccagcgagggcaacatcaccaagcagctggtgaagaggctgaccagcgctgaggtgcccatggccacagaccggctgctgtctgagggctctgtgggcggggagagcgagggctgccgctccttcctggatggcagcctggaggatgccttcaacggcctgctgctggccctggagccccacaaggagcagtacaaggagttccaggacctgaaccaggaggtgatgaacctggatgacatcctgaagtgcaagccagctgtgagccgcagccgcagcagcagcctgagcctgactgtggagagcgccctggagagctttgacttcctgaacaccagtgactttgatgaggaggaggatggagatgaggtgtgcaatgtgggcggcggcgctgacagcgtcttcagtgacacagaaacagagaagcacagctacagatctgtgcaccctgaggcccggggccacctgtctgaggccctgacagaggacaccggggtgggcacctctgtggccggcagccccctgcccctgaccactggaaatgaaagcctggacatcaccatcgtgcgccacctgcagtactgcacccagctggtgcagcagatcgtgttcagcagcaagaccccatttgtggcccggagcctgctggagaagctgagccggcagatccaggtgatggagaagctggccgctgtgtctgatgaaaatattggcaacatcagctctgtggtggaggccatccctgagttccacaagaagctgagcctgctgtccttctggaccaagtgctgcagccctgtgggcgtgtaccacagccctgctgacagagtgatgaagcagctggaggccagctttgccaggacagtgaacaaggagtacccaggcctggccgaccctgtgttccgcaccctggtgtcccagatcctggacagagctgagcccctgctgagcagcagcctgagcagcgaggtggtgaccgtcttccagtactacagctacttcaccagccatggagtgtctgacctggagagctacctgagccagctggcccggcaggtgtccatggtgcagaccctgcagagcctgagagatgagaagctgctgcagaccatgtctgacctggcccccagcaacctgctggcccagcaggaggtgctgcggaccctggccctgctgctgacccgggaggacaatgaggtgtctgaggccgtgaccctgtacctggccgccgccagcaagaaccagcacttccgggagaaggccctgctgtactactgtgaggccctgaccaagaccaacctgcagctgcagaaggccgcctgcctggccctgaagatcctggaggccacagagagcatcaagatgctggtgaccctgtgccagagcgacacagaggagatcagaaatgtggccagcgagaccctgctgagcctgggggaggatggccgcctggcctatgagcagctggacaagttcccccgggactgtgtgaaggtgggcggcagacatggaacagaggtggccacagccttctag

SEQ ID NO: 104795 - DNA, 3144 bp, Artificial Sequence
  derived and/or modified sequence
atgcagttcttcgacgccgaggagctgctggtggacgaggaggacgacgtgttcggggaaggacttccaacccgccttcccgagattatgcttgtcggttcccagtcctttagtcctggcgggcctaacggtattatacgtagccagtcgttcgcagggttctcaggcttacaagagcgcaggtccagatgtaatagttttattgagaactctagcgctcttaaaaagccccaggcaaagctcaaaaaaatgcataatctgggacataagaataataatccccctaaggaaccccagccaaaaagagtagaggaagtctatcgcgcactgaagaacgggttggacgaatacctcgaggttcatcagaccgaactcgataagttaacagcccagcttaaggacatgaaacgcaactccaggctgggagtgctttatgatttggacaaacagatcaaaaccattgaacgatatatgagacggctggaattccacatctccaaagtcgatgaactttatgaagcctactgcattcagcgtagattgcaggacggcgcttctaaaatgaaacaggcctttgcaacttcccctgcttccaaagcggctcgggagagtctaactgagatcaatcgatcatttaaggagtatacagaaaacatgtgcacaattgaggtggagttagagaacttattaggtgagttctccatcaaaatgaagggactggctggtttcgcaagactgtgccctggcgatcagtacgagatctttatgaaatacggaagacaaagatggaaattgaagggcaagatcgaggttaatgggaaacagagctgggatggagaggaaacagtattcctccctctgattgtcggattcatcagcattaaggtaaccgagcttaagggattggctacccacatcctggtggggtccgtaacatgtgagacaaaagaattattcgctgcccggccacaagtggtggccgtcgatattaatgatctgggtactatcaaactcaatcttgagatcacctggtatcctttcgacgtagaggatatgactgcatccagcggagctggcaataaagccgccgctctccagcgaaggatgtccatgtactcacagggaacccccgagacacccacattcaaagatcactctttcttttctaacttgccggatgacatcttcgaaaatgggaaggctgcagaagagaagatgcccctgtcattatcattctcagatcttccaaatggcgattgcgctcttaccagccactccaccggctccccttccaattcaactaatcccgaaatcaccatcacacccgccgaatttaatctttctagtctggcaagccagaacgaaggaatggacgacacctcttctgcatcttccaggaattctttgggcgagggacaagaacccaagagccacttgaaagaagaggacccagaggaaccacggaagcctgcgagtgcaccaagtgaggcttgtcgccggcaatcatcaggcgctggcgccgagcacctgttcctagagaacgacgtggccgaagcattactgcaagaaagtgaggaggcgagcgagctgaagcctgtggagctggacacctctgagggcaatatcacgaagcagctggttaagcggctgacctctgcagaagtcccgatggcgaccgaccggctactgtctgagggcagcgttggcggggaatcagaaggctgtagaagttttctcgacgggagcctagaggatgcatttaatggtctgttactcgcactggagccccataaagaacaatacaaggaattccaggatctcaaccaggaggtgatgaacctcgacgatatcctcaagtgcaagccagccgtgagtagatctaggagcagcagcctatcattaactgtggagtcagcgctcgagagttttgacttccttaatacgagcgacttcgatgaggaggaggatggggacgaggtgtgcaacgtgggtgggggggccgacagcgtgttctccgacaccgagaccgaaaagcattcttacagatctgtgcacccagaggcccgcggccacctgtctgaggcactcaccgaggataccggggtgggcacttcagttgccggcagcccactgcctcttactactggcaatgagtctttggacattacaattgtccggcacctccagtactgcacccagctggtacaacagatcgttttcagttctaagacccctttcgtggcgaggagcctcctggagaagctgtcccgccaaattcaggtcatggaaaaactggcagctgtgagcgacgaaaatattggcaacatcagcagtgtggtcgaagcaatcccggagtttcacaagaagttgtccctgctcagcttttggaccaagtgctgctcgcctgtgggcgtttaccactcccccgccgaccgagtgatgaaacaactggaggcctctttcgcacgcaccgtaaacaaagaataccctggattggcagacccagtcttccgaactttggtgagccagattctggatagggccgaacctttgctgagttcctccctctcatcagaagtcgttactgtgtttcagtactacagctattttacaagccatggtgtcagtgacttagaatcatacctgagccagctggcgcggcaggtcagtatggtgcagacactccagagtctcagagacgagaagctactgcagacaatgagtgacttggcaccctcaaatctgttggctcaacaggaagtgttgagaaccttagctctcctcctgacccgggaagataacgaggtaagcgaggccgtgaccctctacctcgcagctgcctccaaaaatcaacacttcagagaaaaagccctcctgtattactgcgaagctttaaccaaaaccaatctgcagctccagaaagcagcatgtcttgctctgaaaattctggaggccaccgagtccattaagatgctggtcactctctgccaatcagacacagaagagatacgcaatgtagcctccgagaccctcctaagtcttggggaggacggccgattggcctacgaacaactagataaattcccacgtgattgcgtaaaagttggaggtagacacggaaccgaggtggcgacggccttttag

SEQ ID NO: 104796 - DNA, 3144 bp, Artificial Sequence
  derived and/or modified sequence
atgcagttcttcgacgccgaggagctgctggtggatgaagaagatgacgttttcggagagggattgccaacgagactgcctgagatcatgctcgtcgggtcccagtctttctcccccggtggcccaaacggaattatacggagtcagtcgttcgccggattctctggcctccaggaacgccgttcacgatgtaactcgtttattgaaaattccagcgctctgaaaaagcctcaggccaaactgaaaaaaatgcacaacctgggccacaagaacaacaaccccccaaaagagccgcagccaaaaagggtggaagaagtctatagggccctaaagaatggtctggacgaatacctcgaggtgcaccaaaccgaactggacaaattaacagcccagcttaaagacatgaagcggaacagtaggcttggtgtgttgtatgatctcgataaacaaatcaaaaccattgagaggtatatgcggcgactcgagtttcatatatcaaaagtggatgaactgtacgaagcttactgcattcagcgtagactgcaggacggggcttccaagatgaagcaggcgtttgcgaccagccccgctagcaaagctgctcgggagtccttaaccgagataaatcgcagcttcaaggaatataccgaaaacatgtgtacgattgaggtcgaactggagaacctgctgggagagttttctattaagatgaaggggttggccggttttgctcggctttgccccggagatcaatatgaaatctttatgaagtacggtcgtcagcgatggaagctgaagggcaagatcgaggttaatggaaagcagtcatgggacggcgaggaaactgtattccttcctctaatagtgggatttatcagtatcaaagtgaccgaactgaagggcctcgccacccacatcctggtcgggtctgtcacatgcgaaaccaaggaactctttgccgctagacctcaagtagttgccgttgatatcaatgaccttggcactatcaagctcaacctggaaattacatggtacccatttgatgtggaagacatgacagcttctagcggcgcaggcaacaaagccgctgctctgcagcgccgtatgtctatgtacagtcagggcacgccagagacacccacatttaaagatcactcatttttctctaacctccctgacgacatcttcgagaatggaaaagccgcagaggaaaaaatgcctctgtccctcagtttctcagatctcccgaacggagattgcgccctgacaagccattccactggctcaccaagtaacagcacaaatcccgaaattacgattacacccgctgagtttaatttaagttctctggctagccagaatgagggcatggacgatacctcatccgcctccagtcggaacagcctcggcgagggccaggaaccaaagagtcacctgaaagaggaagatcctgaggaaccaaggaaacccgcttcagcacccagtgaggcgtgtcgccgtcagagctctggcgcaggggcagaacacctcttcctggaaaatgacgtcgccgaagccttgctccaggagagtgaagaggcaagcgaactgaagccagtggagctggatacttcggagggaaacatcaccaagcaactcgtgaagcgccttacaagcgcagaggttcccatggctaccgatagattgctgtcggaaggctctgtcggaggcgaatctgagggctgtcgtagttttctcgatggctccctggaagacgcctttaacggattgctgctggcgctggagccccataaggagcagtataaagagtttcaagacctcaaccaagaggtgatgaatctggacgacatcctgaaatgcaagcccgcagtgtcccggtctcggtcgagtagcctaagccttaccgtggaatccgccctggagtctttcgactttttgaacactagcgacttcgacgaggaagaggatggggacgaggtctgcaatgtgggcggaggagccgatagcgtcttttcggatacagaaactgaaaaacattcataccgcagcgtacacccagaggcaagaggccatctgagcgaggcattgaccgaagacacaggggtcgggactagcgtcgctggaagtccactacccctgaccacaggcaacgagtccctagacattaccatagtccggcatctccagtactgcacacagttggtgcaacagatcgtgttctccagcaagacaccctttgtagctcgcagcctcctcgaaaagctgtcgaggcagatccaggtaatggagaaattagctgcggtgagcgacgagaatatcggcaacataagctctgtggtggaagcaatcccagagttccacaagaagcttagtctgctgtcgttttggacaaaatgctgctcgcccgttggcgtttaccacagccctgcagaccgagtgatgaaacaactcgaagcttcattcgccaggactgtgaataaggagtacccgggactggcagatcccgtcttccgaaccctggtgagccagatccttgatagggccgaaccattactgagctcctccttatcgtccgaagtggttaccgtgttccagtactattcttacttcaccagccatggggtgtctgacctggagtcctatctgtcccagctggccaggcaggtcagcatggtgcagaccctccagtccctaagagatgagaaacttctgcagacaatgtccgatctggcgccatcaaacctcctggcccagcaggaagtgctgaggacactggccctgctcctaacaagggaagacaatgaagtatccgaagccgtaaccctgtacctggccgcagcctctaagaaccagcatttccgggaaaaagcgctcctgtattattgtgaggcactgacaaagacaaacctgcaattgcagaaggcggcttgcctggcactgaagatcctggaggcaactgagtctattaagatgctcgtcaccctgtgccaatccgacactgaggagatcagaaacgtggcatctgaaaccctgctctctctgggcgaggatggacggctagcttatgagcagctggataaattcccacgggattgtgtgaaggttggaggccgacacggtacggaagttgccactgcgttctag

SEQ ID NO: 104797 - DNA, 3144 bp, Artificial Sequence
  derived and/or modified sequence
atgcagttcttcgacgccgaggagctgctggtggacgaggaggacgacgtgttcggcgagggcctgcccaccagactgcccgagatcatgctggtgggcagccagagcttcagccccggcggccccaacggcatcatcagaagccagagcttcgccggcttcagcggcctgcaggagagaagaagcagatgcaacagcttcatcgagaacagcagcgccctgaagaagccccaggccaagctgaagaagatgcacaacctgggccacaagaacaacaacccccccaaggagccccagcccaagagagtggaggaggtgtacagagccctgaagaacggcctggacgagtacctggaggtgcaccagaccgagctggacaagctgaccgcccagctgaaggacatgaagagaaacagcagactgggcgtgctgtacgacctggacaagcagatcaagaccatcgagagatacatgagaagactggagttccacatcagcaaggtggacgagctgtacgaggcctactgcatccagagaagactgcaggacggcgccagcaagatgaagcaggccttcgccaccagccccgccagcaaggccgccagagagagcctgaccgagatcaacagaagcttcaaggagtacaccgagaacatgtgcaccatcgaggtggagctggagaacctgctgggcgagttcagcatcaagatgaagggcctggccggcttcgccagactgtgccccggcgaccagtacgagatcttcatgaagtacggcagacagagatggaagctgaagggcaagatcgaggtgaacggcaagcagagctgggacggcgaggagaccgtgttcctgcccctgatcgtgggcttcatcagcatcaaggtgaccgagctgaagggcctggccacccacatcctggtgggcagcgtgacctgcgagaccaaggagctgttcgccgccagaccccaggtggtggccgtggacatcaacgacctgggcaccatcaagctgaacctggagatcacctggtaccccttcgacgtggaggacatgaccgccagcagcggcgccggcaacaaggccgccgccctgcagagaagaatgagcatgtacagccagggcacccccgagacccccaccttcaaggaccacagcttcttcagcaacctgcccgacgacatcttcgagaacggcaaggccgccgaggagaagatgcccctgagcctgagcttcagcgacctgcccaacggcgactgcgccctgaccagccacagcaccggcagccccagcaacagcaccaaccccgagatcaccatcacccccgccgagttcaacctgagcagcctggccagccagaacgagggcatggacgacaccagcagcgccagcagcagaaacagcctgggcgagggccaggagcccaagagccacctgaaggaggaggaccccgaggagcccagaaagcccgccagcgcccccagcgaggcctgcagaagacagagcagcggcgccggcgccgagcacctgttcctggagaacgacgtggccgaggccctgctgcaggagagcgaggaggccagcgagctgaagcccgtggagctggacaccagcgagggcaacatcaccaagcagctggtgaagagactgaccagcgccgaggtgcccatggccaccgacagactgctgagcgagggcagcgtgggcggcgagagcgagggctgcagaagcttcctggacggcagcctggaggacgccttcaacggcctgctgctggccctggagccccacaaggagcagtacaaggagttccaggacctgaaccaggaggtgatgaacctggacgacatcctgaagtgcaagcccgccgtgagcagaagcagaagcagcagcctgagcctgaccgtggagagcgccctggagagcttcgacttcctgaacaccagcgacttcgacgaggaggaggacggcgacgaggtgtgcaacgtgggcggcggcgccgacagcgtgttcagcgacaccgagaccgagaagcacagctacagaagcgtgcaccccgaggccagaggccacctgagcgaggccctgaccgaggacaccggcgtgggcaccagcgtggccggcagccccctgcccctgaccaccggcaacgagagcctggacatcaccatcgtgagacacctgcagtactgcacccagctggtgcagcagatcgtgttcagcagcaagacccccttcgtggccagaagcctgctggagaagctgagcagacagatccaggtgatggagaagctggccgccgtgagcgacgagaacatcggcaacatcagcagcgtggtggaggccatccccgagttccacaagaagctgagcctgctgagcttctggaccaagtgctgcagccccgtgggcgtgtaccacagccccgccgacagagtgatgaagcagctggaggccagcttcgccagaaccgtgaacaaggagtaccccggcctggccgaccccgtgttcagaaccctggtgagccagatcctggacagagccgagcccctgctgagcagcagcctgagcagcgaggtggtgaccgtgttccagtactacagctacttcaccagccacggcgtgagcgacctggagagctacctgagccagctggccagacaggtgagcatggtgcagaccctgcagagcctgagagacgagaagctgctgcagaccatgagcgacctggcccccagcaacctgctggcccagcaggaggtgctgagaaccctggccctgctgctgaccagagaggacaacgaggtgagcgaggccgtgaccctgtacctggccgccgccagcaagaaccagcacttcagagagaaggccctgctgtactactgcgaggccctgaccaagaccaacctgcagctgcagaaggccgcctgcctggccctgaagatcctggaggccaccgagagcatcaagatgctggtgaccctgtgccagagcgacaccgaggagatcagaaacgtggccagcgagaccctgctgagcctgggcgaggacggcagactggcctacgagcagctggacaagttccccagagactgcgtgaaggtgggcggcagacacggcaccgaggtggccaccgccttctag

SEQ ID NO: 104798 - protein, 647 aa, Artificial Sequence
  derived and/or modified sequence
MVLPSRLHWIRNRPWRDRIRRRQLNRLPTRLPEIMLVGSQSFSPGGPNGIIRSQSFAGFSGLQERRSRCNSFIENSSALKKPQAKLKKMHNLGHKNNNPPKEPQPKRVEEVYRALKNGLDEYLEVHQTELDKLTAQLKDMKRNSRLGVLYDLDKQIKTIERYMRRLEFHISKVDELYEAYCIQRRLQDGASKMKQAFATSPASKAARESLTEINRSFKEYTENMCTIEVELENLLGEFSIKMKGLAGFARLCPGDQYEIFMKYGRQRWKLKGKIEVNGKQSWDGEETVFLPLIVGFISIKVTELKGLATHILVGSVTCETKELFAARPQVVAVDINDLGTIKLNLEITWYPFDVEDMTASSGAGNKAAALQRRMSMYSQGTPETPTFKDHSFFSNLPDDIFENGKAAEEKMPLSLSFSDLPNGDCALTSHSTGSPSNSTNPEITITPAEFNLSSLASQNEGMDDTSSASSRNSLGEGQEPKSHLKEEDPEEPRKPASAPSEACRRQSSGAGAEHLFLENDVAEALLQESEEASELKPVELDTSEGNITKQLVKRLTSAEVPMATDRLLSEGSVGGESEGCRSFLDGSLEDAFNGLLLALEPHKEQYKEFQDLNQEVMNLDDILKDAKHLDDQKLNGAASWTEITEGE

SEQ ID NO: 104799 - DNA, 2407 bp, Artificial Sequence
  derived and/or modified sequence
acgtctggacttaacttccaggatagctgcaagacccttttgttcctttgccatgagcaggttttaggccgctctgttgggaccatggtgttaccttcgcgattacactggatcagaaacaggccatggagggacaggatccggaggcgccagctcaaccgactaccgaccagactcccggaaatcatgttggtaggatcccagtctttttcgcctggagggcccaatgggatcattagaagccagtcctttgcgggtttcagcggcctccaggaaaggcgatccaggtgtaactccttcattgaaaattcctccgctctcaagaagcctcaggccaaactgaagaaaatgcacaatttaggccacaaaaacaacaatccccccaaagagcctcagcctaaaagggtggaagaagtctacagggccttgaaaaatggacttgatgaatatctggaggttcaccagacggagctggacaagttgacagctcagttaaaagatatgaaaagaaactctcgcctgggtgtactgtatgacctagacaagcaaattaaaacaattgaaagatacatgagacgcctggagtttcatataagtaaggtagatgaactctatgaagcttattgtatccagcgacgcctccaggatggtgccagcaaaatgaagcaagccttcgcaacatcccctgccagcaaagctgcccgggagagtctgacagagatcaatcggagcttcaaggagtacacagagaatatgtgcaccattgaagtggagctagagaatctgctgggagaattctccatcaagatgaaaggtctggctggctttgcacgcctctgtcctggagatcaatatgaaattttcatgaagtatggccggcagcggtggaaactgaaaggcaaaatagaagtaaatggcaagcagagctgggatggagaagaaacagtttttctgcccctgatagttgggttcatctccatcaaggtcacggagctcaaagggctagcaactcacatcctggtaggtagcgtgacctgtgagaccaaagagctgtttgcagcccgacctcaggtagtggctgtcgacatcaatgaccttggtaccatcaaactgaacctggaaatcacctggtatccatttgacgtggaggacatgaccgcatcctcaggcgctgggaacaaggcagcagcccttcagaggagaatgtccatgtacagccagggtaccccggaaacgcccaccttcaaagaccactccttcttttcaaatctacctgatgacatctttgaaaatggaaaggcagccgaggagaaaatgccactgtcgctcagcttcagtgacctgcccaacggggactgcgccctcacctcccactcaacaggctccccttccaactcaacaaatccagaaattaccatcacccctgcggagtttaacctcagcagcttggcctcccagaatgagggtatggatgacaccagctcagcatcttccaggaactccctgggagaaggccaagagccaaagtcacacctgaaggaggaagacccagaggagcccagaaaacctgcctcggccccatctgaggcttgccgccgacagtcctcaggtgctggggctgagcacctgttccttgagaatgatgttgcagaagcacttctgcaagagtctgaggaggcctctgagctcaagcctgtggaactggacacttcggaaggaaacatcacaaagcagctggtcaagaggctcacatctgcagaggtgccaatggccacagacaggctgctctctgagggttctgttggtggagaatctgaaggctgcagatcctttctagatggaagcttagaggatgcttttaatgggcttttacttgcattagaaccacataaagagcagtataaagagtttcaggatctgaaccaagaagtcatgaatttggatgatattctaaaagatgctaaacaccttgacgatcagaaactaaatggtgctgcctcttggacggagatcactgagggtgaatgagacaactgtgatttaaaagaccgaaagacgttttcccatgtgcttttgtgccatcttgagtgtcagagacagatccctgcaaggcccttcctaccttgcgctaagaaatcagcaaggagtgtcacctaactggatggaggacatttagtgcttctaacttgcagaatttgtcccattcgacccaccccagcatcctcttgaatatttggaaatacttctctccaactctgtgcccatagcaactggcattgttttgcttgtaatgtttctgcatgtggccagcattatagaatgctccaggccagagaatgggattgctcccatgatgccagggcctggtcagggaagtggtgggacttgttccctttgaggcagagct
